United States Patent Application Publication US 2003/0143606 A1 - sequence listing, part 5

SEQ ID NO: 1608 - DNA, 5998 bp, Artificial Sequence
  chemically treated genomic DNA (Homo sapiens)
tttgggagtaggaggtatagagatcgttttattaattttattttttagagatgtgtttagaatgttaggttttatttttatttttttaggagtatttggcgagattttgttttttttttgggggagtttagagtagtgggttttcgtatttggttgggagggtgtgtatagtggggaatatatgttttgggtagtgaatatttgtaagattcgttgcgtaagttttggagattcgggtagtaaatttttagggttttttaggttttgttttaataatagtattttttttattttttatttagtttatttatttttatagtttagttataaaggtttcgtttttgttattttttttttttttagaattgggtgtggttgttggaggtttgtttaggggtttgtagtggaaaaaattagtatagtcgtttagtttttagtatggggaggggtaaagtgaggtggtagaggtaagggttggaagagaagttgtagaggttatgtattttttcgagttgggttgttgcgtgtagggtagaggtttatggggtatattattagataaaggtttatagttgttttttgttttttttttgttttttgttttcgagtgcgtaatttagtaaatatgagttagtgtagatatttataggtatatatatattaatacgtattatagtaatagcgtgtgtaagtttatattttagaagtatttggagagtttaaatttagttatttgtttatttttttgtttgttttttttttcgttttacgtgtatgtgtgtgtgtgttatgtatatttacgtatataatttatttagagttttatattagaattttatatttggatttttttagtatatttggtttttattagtttttttttttttttttttagttttggtttttgatattttttgtatgttagttaggttaatataatttattaaattaagaaagaagaagcgttgaggagagagggttgtagagaggggaagaatggggacggtttagaggtttgatttatttatattttagttaggttttgtttatagtaggggataggggagagcggatattgtttttttgttgtgggttgatgcggtaagtgttatagtattttttattagtttagtcgtggaattaagttttttgtttttaggtgggtattcgtgggtaacgggtaagttttagcggttattagtaggggattggatgagatgggtattatttagtgtatatagtttagtttgagttttagagaggtggaggaaggggtagtttgtgtttggagtatgggggatagggagtagttttatggggatttaggaaaggagatgtagggggtggtgggtgataggtgggagattgttttggaaatgtggtgatataaaagttaggggggagatgggaggatcgtttgaggttaggagtttaagattagtttaggtaatatagagagatttttgtttttataaaaaggaaaaataatttttttttttaattagttgggtagtatggttgtagtttgtagttttagttagttaggaagttgagataggaggattatttgagtttaggagttcgagattgtagttggttatgtttaagttattgttttttagtttgagtaatatagaggattttgttttttaaaaaaataaagatttagaaataaaaattggggtggggatttttatgttcggtattgtttgttatgttaagtaaggtttagggtcggggcggggggatttggaggggaataggtttatatttaaaggaggttttgggattattttaggaacgttagtgggaaaggttttgggtgaggtagtgatggagtggagtggtagtgaggcgtgggggtttacggatagattttaggttcggagagggtattaggaggggttatttaaagttgggatgagtgttaggaatgaagaatttaggttggggtggagagttagaggtgaaatggtatgaaataggggagttataattcgggttaattttttagggtgggttataaatttagtgagggttagaagtagggggttaaggtttttagggggttgcggttttagggataggggttagtttaagttatttttttatttttttatatagagtatttttttttggttgggagaaatattttagatattttaattttattagtgttgttttttgggtttttatagttcgaggtagggaataaatatttttattgtatttacggttttatttttttttaattatgagtattgagttttaggggaaatttaggtagtttttttttaaagattttaaagaaagagagagaggaagggaggataggggtttttgttttgtttttacgtttttttgttggattttggaggttattgtatttttgtagggtttgtaattttttttagggagtattttgtttttgtttttagttgttttttcgtagtggaaaaggttagagaggagtaaagagtttaggagacgcgtttttagagaagaattaaataaaattaagttgatgttagttttttattaggagttaaataggtttttttttatcgtggttttattggtgtacgttttgttgagtttcgagggttttagagtagatttcgtttttttttatttataagggaggttataggggtgcggtaggtaggttgggttttagagtggttttattttttattcgttgggtattttgaggaaggagtttttatatttttgggttttttaggtaaaatgggttaattgatcgtagaagatttgggtaagtttagattgaaaggggtataggagagagggtaggagggggtgtgggagatatgtttagttttcgatagttagcgtattttttggagtagaggttattgggagtaggggggttttgaggggtagtttttgaagtattcgtggtagtagagatagaggtaggtaagtgagcgtatatattttataaagtttatttcgtagtttttgttggtgtttagaatatttatgaatttgttgtagttatattttcgaaatttagtttgtgtaagggaagggttgggagaggtaagggagtaggatgaggagggtagaatagttttatacgttatttttttttttttttttttaagtggatttattttattttaaattatatttttttgagggtcgattttaatttttttgttttgataatgtattcgttgtaatttttttttaaatttgtttttttagattattaatcgagtatttattatttgttattgagtgtttattaagtgttaggtattttttatggtgtttttatttagtttttttaatagttttgtaaggtagtagggatgattgttattttattttatagatgaggaagttgaggtttttgttgtgttagtttttttttttttattttttttttataatttagtttttttttttgttgttttgtgtttatgtttgttgtttttaggtttttttttgtagagtttaggtagtgttttttttcggaggaggaggggacggatattttgattgtttatcggggtttaggtggttagttttttttgtagtagttttttgagtttcgtttggtagagtttgtatttgtttttatagcgttttgcgtatttttggaaggtgtatacgatggtagttatcgtttgttttagaggtttggttatttttattgttatagaataagggtgtggtttatagtagagttttaggttagttttttagtttatttttgttttttgtgttttttagagattgtttttagatttattttaatttttattaggttttaggtttcgtagttttttttttttttgagtagtttttttagattatattagttttttttaatttatttttttgttgttttgttgttatttttttatgtagaggttttattgttttaatatcgttgtaaattttttagagagatagtattttattttattatttatatattttatcgtggggttttttaagtatttttagattatttgttatttttttttatttttaatatttagggatggttcggttttagtttgttttagtttatgagatgttttagaagtttttttttttgtaggaatttgtataaggagagtttggttttgtgtttttttgtttttagtttttggagaagttaggttttagtagggaggggtaggtttgagaggcgtttttatagttttattattattgtttttattttgttttttgttttgaattcgaggaagttgtatttagaagaaaaatttgtgggattttttttgtttgtcgttagttgtgtaattttggtgagttatttgtttttttgggttttaggggcggggtttgatttgtaagttggggtttattttatttcgttggtttagttaggaatttgaattagatggttttttgagagttgattagttcgggtgtttattaatttgagattggttttttttgaggttattttttcgatttttgggggttttgagtagggaggttttgtatagggatattttgttttattggaggggaagttttttttggaattgtttatttttttttatttatattgtttttttttatcgtttttttgggatgatgtttttagtttgggaaaattcgaaggtagttaggaaggtaagagttttttttatgttagtttagtgatttatttttgatttttttacgggataagagttttgtagtatagggcggttagggttaagattttttttgaagatttgtttattgttgggttttttgttgggagtaaatggttggtatggttgtggttggtaggaaagtaggggaaggggagtggggagtgttaagtattgttaggatttaatttattgtaaatattttaggattagagtaaggtgtttaggtttttaggagaggaaagggttatgatttttagaaatgaggagatttagaggtgaagtaaggaggtaaggagtaggtgaggggtttgattaaggggaagattagagttttgagtttagtgtttttattttaaggtagattttagttttatatatttttttgtttaaatttttttaatagttttttattgtgtaaggaaatttttgcgtttattatatttgattttttttttcgtgttaggttcgtttgtggttatttttttgtttttaatgttagattttgggttaggagttaggttggttattgggggtttttaaattgttttgatatttaatttagggtaggatttaagtagttggtatttattattggtgttggcgttttagttgtaggagtttagagatagggcgttattatttgtagttttttaagaaaggaaggaagtaattatgggggatataagtaggttaatattgaggatgtttttagggattttttagtagatttattataggttttatttgtttatttatttacgtatatattaaaggttagtttgggtttagatattattttttttttattttttatttgtttttttttagagttgggaataggggatagttttttgttaagtttttttagtttagttggaggagatagtttggtttatttattatattatagttttatttttttattttgtagaggtttttagaatattaagtggggatatatttttgtttcgtttaggttgtatttttataaatttttatttcgggtagaatttggagagtacgtggttaagttttttttttatagacgagaagtttgaatttgtttgattagattttagtttttggttgtgaattgtttgttttttaggggggaaattattaggtgggatgtttttgaggtataggaaggaggtgtgttttttttaggggtatttttagagtttaagtttgagatttttggtttttttattttaggtgatgggaatgaatttgggttagagttatatgaaggttggttagtggttggagttttttaagggttgttttttttttttttttgttttgtttagtattaaaataattttttttga

SEQ ID NO: 1609 - DNA, 7306 bp, Artificial Sequence
  chemically treated genomic DNA (Homo sapiens)
taaaaatgtaaaaattagtcgggtatgggggtaggtatttgtaattttagttattcgggaggttgaggtacgagaatcgtttgaatttgggaggtagaggttgtagtaagtagagatcgcgttattgtattttagtttgggtaataaaaatagattcggttttaaaaaaaggaaaagatatatatatatatataaagataaatatatatatatgtgtgtgtgtatatatttaaatattatagtttttatttttttaattgatttaattttttattgatttaatttttttttttttttttttgagatggagtttcgtttttgtggtttaggttggagtgtaatggtgtaattttggtttatcgtaatttttatcgttcgggtttaagtaatttttttgttttagttttttaagtatttgggattataggtatatgttattatatttagttaattttgtatttttagtagagacgggttttttttatgttggttcggttggttttgaatttttaattttaggtgatttatttgttttagttcggtaaagtgttgggattataggcgtgagttatcgtatttagttgatttaatttttatagataatttatttattataaagaattaatttattggttgggtgtggtggtttataattgtaattttagtattttgggaggttaaggtaggcggattgtttgagtttaggagttttagattaatttgagtaaaatatttattttttgtgtttatttataataaatataaaaagttatttaggtttagtggtgtgtatttgtagttttagttattcggggggttgaggtgggaggtttatttgatgtcggagaggttgaggttttagtgagttgagattgtatttattgtattgtagtttgggtgatagagttagttttgttttaaaaagaaagaaagaaagaaagaaagaaagagagagagagagagatagagagagagagagggggggagagagaaagagagagagaaagaaagaaagaaagaaagaaagaaagaaagaaaggaaggaaggaaggaaggaaggaaggaaggaaataaataaataaataaataaataaataaataaagatagaaagaaagaaagaaagaaagaatttgttgtttttttgataaaaattttagtgggaaattttgatttatattgtatttaatttataaataaatttgggagaattggtatttttgttaagttaaaatataatttttgtggatatgacgtatattgttattgtttattttttaatagattaaattttttttgtaagaggttattttttagatagttaatatttttggtattattttgtgttgtattttataattattaaggaatgttgtagagaaatgttattaattgttaaaattttgttatgaatatagtagttttattgaatttttttagtagttttaatagtttgttatttgattttaataggttttttatgtaaaagatggtgttatttttaaataatgatagttttatttttttttttttattttttattttttttgtgtttttttagtattgggtaggttttttagggatatgtgaaatagtggtagtaataattagatattttggtttttttgtttttttttttatgatgaagttttatttcgttgtttaggttggagtgtagtggtacgatattcggtttattgtagtttttatttttcggttttaagtgatttttttgttttaattttttaagtatttgggattataggtatttgttattatattcgattaatttttgtatttttagtagagatagggttttattatgttggttaggttggttgagaatttttgatttttagtgatttatttgtttcgttttttttaagtttttggattataagtgtgagttattacgtttgttattgtggtttttttattggtttttttgagaatgtatttgaagtgttttaattatatataatgtttgttgtagagtaatgatttttaaattttttggttttaggattttattatattattaaaaattattgaatattttaaagaatttttatttatggggattttatttattagtatttattataatagaaagaaaaaatttaaatatttattaattttttaaaaaattatttattttttatatgttaatataaataatatatttttatgaaaaataattattttttaaaagaaaaaaagtaagaagagtattatggttttatttttttgaaaattttttatgtttgattttttttttatagttggatttttttatttgatttattatttaatttgttttaatatgttatttaggttggagtatatgaagaaaatttagttttatatagatatatagttgaaatgggggagtgtattttaatggtatttttagataattgtggttattttatattatattaaatttaataagtggtagtttttgaaaagttagttattatgtggaaatttatatttatattaattaatttgttatattgtgtgtatttatgagaaaatgagattgaaatatgaaaatagtgtgttagtattattttaaaaataattttgagattaaagtttttttaaggagggatttttagggttttttggaaaatagtttgagaattgttgttataatatattggtatttatttttttttaagttagaaatggtttttttattttgttatatattttttttattattagtagatgttgataattatgaaatttattttttgtatttagtaaaataaatgtataatttttttttttgattattggtatagtgaattataaagatagatttttttgatatgaaattttttttgattttttggaataagttttggttaattacgatgtgttattatttttatttgatttgtgttgtattatgtatagtatgatgtattattattgttatttagttggaaatatttagtttttttttgtgagttttttttttttggggatgttaattattttgtttaaaatatgtgtgattgtgtgtgtggatttattttagtaggtattatttttagtggttttaaggtggtaagatgtagtgggggaggtggaggtgttaatgtataggttttagaatagagtttataatattattgtttatattggagttacgtatttgttgtttatggagtatttggttattttttattttttggttttatttattttttagagattaaaaaaaattttttaagataattttgttgtgttgtttaggttggttttaaatttttgggtttaagtaggttttttgttttggttttttaagtagttgggattataggtatatgttattatgtttggtttatttttaaattgtttgtttgtttgttattataaatgtttagtttttagggtatgaatatggattggagaagaagaaattagagttgttgttatgtttattagtttttttgtatgttttggttttagttttttgggttttggtattgatttatttttggttattatgtttttttataagtttttgtagagttaatttgattttgttgatgtttttatgagagagtgatttgtatgttttttgtattttttcgtgataatatagtagattaagagtttttttatttttttttgtttggatgttgggtacgtttttagttgggttgtttatttaacgtattatatttttatttttttaaggtggggttttaggattaggttggggtagtagaaagtttttttttttatattgtttttggtttaggagttaatttagaaaaagtatttttaaattggttaagttagcggagtagagattttttgtgttgagaaatattaggatatttagaggggtggaaggaggtttttagggtatatatgagatgtggtaggggtaggttgttcgttttaaagtttaaagttttagatatgaatttatagggattttagttagggttatttgttatgcgttagtagggtttattttgaggaaatgatcggtatagttaggagttggttgaagagttgtttttattttatattttttagtagtttaggtgtcgttattacggggtttttattggtatttttgtagttgtattttttttaatgttgaggagtagagttgatttagtattttgtttattgttaaggtatagtaaattttttttgtttttataggttatataattgggataaatgattcgggatgaagaaattatcggtatttaggaatttgttttagattagtttgtaggggaaatgatttgtagggattttttttagggattatatttagtttttttttttttttaagagattagtaaggtttattataaatagtagttatttttttttggtagatagggattcgtagtttagttatagtatagattaggtgaggagtatattaaggagtgatttttaaaatttattttgtttttttttttttaataagattattattttttttaaaaaaaatagttattttggggtatatagttatattattttgaaggtgttttattttttttgatttagagaggtaagtagggtcgggtttggtagtatttggatgggagaatatttgggaatattaggtgttaaaggttttaagaataaaaaataatgattttgttttgtgtttattttatgttgagttttgtgcggggtagagggaatatacggtaaatgcgttatggggaattataggttatttgagggagtgatagtttggtggtaatttttgtttttttttattagtgttacgttggtatttttttatgtagttaggttttagggttgatgggtttagaatcgagggtttttggttttgagtgaggttttgttgtaaggttttttagatgagttattgagattttaataagatttagtggaaataattaggttttcgtcggaatataagttttaagggaagttgtgttagttttgtgggcgattgtttgatttttttttttattttagtattatgaagttttttacgggtttggttttttgttttttggttttgggtgttagtagtcgaagttttttttcgttttttggcgaggtttttgatggtaaggttttagaaggtttgtaggatttttgaagagaaatattattttggatttgataaattggggaaaatgatgttttcggaaggttgtttttgaattatagagttgttagtgtttgcgttgttgaggtttgttaggaattagggtttgttgggttgtttgtttcgagttttttagagttgttgggaatatttttttttttcgtagtgtagttttttaggatgtgttaagtggatggattatattttagaagtcgttgtaaggtgtattaaaaatatattttttgagtcgtaagggacggggtatttagtaataacgtatacggggtatttttgggtttttttaagatttgagtcgttgttttaggttgtgttgtttaatgtgtttggggagttgttaaatagattagagagtcgaggattgttgttagttatttagagaaagaataattattttttttaggagtatttgagttgtttgttttgcgtagaagatgtaaaataaggtttgtaatgggtataaaatgttttttagtataaatcgtataggagtatgattaaggttgttgatttttttgtttttttttttttttttttttcgattttttagttggataatgtatagggttttttagtttcgttttgttaggggttttttttttggtttgttttgtttttatttttttttttttagtttttttgataagagttgggaattaacgtgttttaagtttttataaggattatagtatttttttatttagttttagaatgattttgtgacgtaattttttttttttggaaggtgagaaagttgattttggaaggtgagaaagttgagatttagagtagttgaagttaatgtttagggatttattgttagttagtaggtggtagggtagaggtttgagttcggttgtgtttgaggttagggtttttgttaggtagacgtattattgattattttttagaggttgatggttatgaattttaggtatattttggtattatttgaaatatttatgtttttaattttttagtagagtttgtagaaattggtttggggtgtggtttgggtattgggatttttagtttttttttgggtgattagaaagtgtagttaaggtttacgtttgtaattttagtattttgggaggttaaggtggatgaattatttgaggttatgagtttcggagtagtttggttaatatggtgaaatttcgtttttattaaaaatattaaaatgtagttaggcgtgtggtaggtatttgtaattttagttatttaggaggttgaagtacgagaattatttgaattcgagaagtagaggttgtagtgattagagatcgtattagtgttttttaatttgggtgatagagcgagattttatttaaaaaaaatgaaaaagaaagtgtagttaaggtagagtattattgttttattgtttttttaagtaatttatagtattagtatagtttattaagaaagtatttagggatttttatgtttttaatagttattggaatttacgttataatgacgtgtattttatttgtaagaatatatattttaggtcggggtgcggtggtttacgtttgtaattttagtattttgggaggttaaggtagggggattacgaggttaggagttcgagattagtttgattaatatggtgaaattttcgtttttattaaaaatataaaaattagttaggcgtgatggcgtatgttgtaattttagttatttaggaggttgaggtagaagaattttttgaatttgggaggtggaggttgcgatgagttgagatagtattattgtattttagtttgggcgatagagtaagattttgtttaaaaaaaaaaaaaaaaaaaaaaaaaaaaaaaagaatataaattttagtagttagggtagaagtattttgtgtttgttattttttttagtattagtattttatgttattattttatttatatatatttttggattttattataggtagttttattttatagtagtggttttttattagggtatttgaagaagttaattaggataaaggaatgtgttttttaatttatggtatttaaggttgttatgattataggttgaaagtttgaagttagtggaagatttgtttttttttatttttttttaaggtgttgttggagtttttatgtttttttgatgttttttttgtttttttttttttttttagg

SEQ ID NO: 1610 - DNA, 7306 bp, Artificial Sequence
  chemically treated genomic DNA (Homo sapiens)
tttggaaaggaaaggaaaggtagaagggatattaggagaatataaagattttaataatattttagaggggaatgaggaaggataaattttttattgattttaagtttttagtttgtgattatagtagttttggatattatgggttgagaagtatatttttttattttagttggtttttttaagtgttttggtgaagagttattgttatagaatgaagttgtttatgataagatttaggagtgtgtatgaatgaggtagtgatatggaatattgatgttgagaaaggtggtagatatagagtatttttgttttgattattaaagtttatatttttttttttttttttttttttttttttttttttagatagagttttgttttgtcgtttaggttggagtgtagtggtgttattttagtttatcgtaatttttattttttaggtttaagagatttttttgttttagttttttgagtagttgagattatagtatgcgttattacgtttggttaatttttgtatttttagtagagacggggattttattatgttggttaggttggtttcgaatttttgatttcgtgatttttttgttttggttttttaaagtgttgggattataggcgtgagttatcgtatttcgatttaaagtatatatttttgtaaatggaatatacgttattgtgacgtgagttttagtgattgttaggagtataaaagtttttaaatatttttttagtaggttgtattgatgttgtgggttgtttgaggaagtaatagggtagtggtgttttgttttggttgtatttttttttttattttttttagatggagtttcgttttgttatttaggttggaggatattggtgcgatttttagttattgtaatttttgtttttcgggtttaagtgattttcgtgttttagttttttgagtagttgggattataggtgtttgttatacgtttggttatattttagtatttttagtagagacggggttttattatgttggttaggttgtttcggaatttatgattttaagtgatttatttattttggttttttaaagtgttggaattataggcgtgagttttggttgtattttttaattatttagagagaaattgaaagttttagtgtttaggttatattttaggttagtttttgtagattttgttggggagttgaaggtatgggtattttaggtgatgttaaggtgtgtttgagatttataattattaatttttaggaggtggttagtgatgcgtttatttggtaagagttttgattttaagtatagtcgggtttaaatttttgttttgttatttgttgattggtagtaagtttttgggtattggttttagttgttttaagttttagtttttttattttttaagattagtttttttattttttaagagaggaagattgcgttatagagttattttgaaattaaatgagaaaatgttgtggtttttgtgggggtttgaggtacgttagtttttagtttttgttaagaaggttggagaaggaagaatggaaatagaataaattaggaagggagtttttgatagagcgaggttaaagagttttgtatattatttaattaggaaatcgaaggaggaaggagaaagaagatagaagagttaatagttttagttatatttttatgcgatttatgttgagggatattttatatttattgtaggttttattttgtattttttacgtaaaataaatagtttaggtgtttttggaaaggatgattgttttttttttgagtaattgataataattttcgattttttaatttgtttagtagttttttaggtatattgggtagtataatttaaggtagcggtttaaattttaaggaagtttaaaaatatttcgtgtgcgttgttattggatgtttcgttttttacggtttaggagatgtgtttttgatatattttgtagcggtttttgaaatgtgatttatttatttaatatattttgagaagttgtattacggggaaaggggatatttttagtagttttgaaagattcgagataggtaatttagtaaattttagtttttggtaggttttagtaacgtagatattagtaattttgtggtttaaaagtagtttttcgaaagtattattttttttagtttattaggtttagggtgatgtttttttttagaaattttgtaaattttttgaagttttattattaaaagtttcgttaaggaacgaaaagaagtttcggttgttgatatttaggattaaggagtagaaaattaggttcgtgagaagttttatggtgttgaaatgaaaggagaagttaggtagtcgtttataagattggtatagttttttttgggatttatatttcgacgagagtttggttatttttattggattttattagagttttagtggtttatttaggaaattttgtagtaggattttatttagagttagaagttttcggttttgaatttattagttttgaagtttgattgtataagaggatgttaacgtggtattgatggaggaaggtaggagttattattagattgttatttttttaagtagtttataattttttataacgtatttatcgtgtgttttttttgtttcgtatagaatttaatatgggataaatataaagtaggattattattttttatttttaaagtttttagtatttggtatttttaggtgtttttttatttaagtattattaggttcgattttgtttatttttttagattagaggagataagatatttttagaatggtatggttgtatgttttaggataattattttttttaaaggaaatgataattttgttgggaaagagaaaatagagtaagttttaaaaattattttttggtgtgttttttatttgatttgtgttgtagttgagttgcgggtttttgtttgttagggagaggtggttgttatttatagtgagttttgttggttttttgggagggaagaaaagttggatgtggtttttggggaaagtttttgtaggttattttttttataaattggtttaagataagtttttggatgtcggtggtttttttatttcgggttatttattttagttgtgtaatttatgggaataagagaggtttgttgtgttttggtaatggatagggtgttagattagttttgttttttagtattgggggaagtgtagttgtagagatgttagtgggagtttcgtgatggcggtatttgggttgttggaaggtgtggagtgagggtagttttttagttagtttttgattatatcggttatttttttaggatgggttttgttgacgtatggtagatgattttgattgaaatttttgtgagtttatgtttaaagttttaagttttaaaacggatagtttatttttgttatattttatgtgtgttttggaagtttttttttatttttttggatgttttgatattttttagtatagaaaatttttgtttcgttggtttagttaatttggaaatgttttttttaagttggtttttgagttaaggataatgtagagagggggattttttgttgttttagtttagttttggagttttattttgggagaatgagagtgtggtgcgttaaataggtagtttagttggggacgtgtttagtatttaggtagggaagggtgggagagtttttggtttgttgtattattacggaggggtgtagggggtatgtagattatttttttatgagaatattaatagggttagattagttttgtagaggtttatggaggagtatggtggttagagatgggttagtattagagtttagggggttgaggttaggatatgtagagaggttggtggatatagtagtaattttggtttttttttttttagtttatgtttatattttgagggttaggtatttgtaataataaataaataagtaatttagaaatgggttaggtatggtggtatgtgtttatagttttagttatttgggaggttaaggtaggaggtttgtttgaatttagaaatttgaggttagtttgggtaatatagtaagattattttaaaaaattttttttaatttttgagaaatgggtagggttaggaagtaaaggatggttaaatattttataagtagtaaatgcgtggttttaatgtgaataatgatattatagattttgttttgagatttatgtattgatatttttattttttttattatattttgttattttaaaattattgagagtggtatttgttggaatgggtttatatatatagttatatatattttaggtagggtagttgatatttttagggaaaaagagtttatagagagaggttgaatgtttttaattgggtagtagtaatagtatattatgttgtatatggtatagtatagattaggtgaaaataatagtatatcgtgattaattagggtttattttagggagttaagaagagttttatattagaaaaatttatttttgtaatttattatattagtaattaaagaaaaggattgtatatttattttattagatgtagaaaatgaattttataattgttaatatttattgatgataaggaaaatgtataataaaataaagagattatttttgatttgagaaaggataaatattaatatgttatagtaatagtttttaaattgttttttagggaattttaagaatttttttttagggaggttttgattttaaaattatttttagaatagtgttaatatattatttttatgttttagttttatttttttatgagtatatataatatgataagttagttgatatgagtgtggatttttatatggtaattgattttttagaagttattatttgttgagtttggtataatatagaatagttataattatttaaaaatattattaaaatatatttttttattttaattatatatttgtgtgaggttgaattttttttatatattttaatttaaataatatattaaaataggttggatgatgaattagataggaaaatttagttatgaaaaaaaaattagatatgaaaaatttttaaaagggtaaaattatagtattttttttatttttttttttttggaagatggttattttttataaaaatatattatttatgttaatatatagaagatggataattttttgaagaattgataaatgtttaaattttttttttttattatggtaaatattgatgaatagagtttttataaataaaagttttttggggtatttaataatttttaatagtgtaatgggattttgagattaaaaggtttgagaattattgttttatagtaaatattatgtgtaattaagatattttaggtgtatttttaagaagattaataaagaggttataatggtaggcgtggtggtttatatttgtaatttaagaatttagagaggacgaggtaggtggattattggaggttaggaatttttaattagtttggttaatatggtgaaattttgtttttattaaaagtataaaaattagtcgggtgtagtggtaggtatttgtaattttaagtatttggggggttgaggtaggagaattatttgaagtcgggaggtggaggttgtagtgagtcgagtatcgtgttattgtattttagtttgggtaacggagtgagattttattatggaaaaaaaaataaagaggttaggatgtttggttgttattgttattgttttatatatttttgaaggatttgtttaatgttaaagaaatataaggaaggtaagaggtgaaagagaagaaatgaaattattattgtttgaagatgatattattttttatatagaaaatttgttagaattaaatggtaagttattagaattattaagagaatttagtgaggttgttgtatttatggtaaaattttaataattgatagtatttttttgtaatattttttaatagttataaaatatagtataaagtagtattaaaaatattaattatttaggaaataattttttatagagaaaatttagtttgttaaaggataaatagtggtaatgtacgttatgtttatagagattatattttagtttagtaaagatattaatttttttaaatttatttataaattaaatgtaatgtgaattaaaattttttattggaatttttattaggaaggtaataaattttttttttttttttttttttttatttttatttatttatttatttatttatttatttattttttttttttttttttttttttttttttttttttttttttttttttttttttttttttttttttttttttttttttttttttttttttttttttttttttttttgtttttttttttttttttttttttttttttttttttttttttttttaagataaagttggttttgttatttaggttgtagtgtagtgaatataattttagtttattgaaattttaattttttcggtattaggtgaattttttattttagtttttcgagtagttgggattataggtgtatattattgggtttagataattttttgtatttattgtaaataaatataaaaaataaatattttgtttaggttggtttggaatttttgggtttaagtaattcgtttgttttggttttttaaagtgttagaattatagttgtgagttattatatttagttaataaattaattttttatgatgaataagttatttatgaaaattaagttagttgggtgcggtggtttacgtttgtaattttagtattttgtcgggttgaagtaggtggattatttgaggttgggagtttaagattagtcggattaatatagagaaaattcgtttttattaaaaatgtaaaattagttgggtgtggtggtatatgtttgtaattttagatatttaggaggttgaggtaggagaattgtttgaattcgggcggtggaggttgcggtgagttaagattgtattattgtattttagtttgggttataagagcgaaattttattttaaaaaaaaaaaaagagaagttaagttaatgaaaagttaagttaattaaaaaagtaagagttgtagtgtttagatatatatatatatatatatatatatatttatttttatatatgtatatatatttttttttttttttgagatcgagtttgtttttgttgtttaggttggaatgtagtggcgcgatttttgtttattgtaatttttgttttttaggtttaagcgattttcgtgttttagtttttcgagtagttgggattataggtgtttgtttttatgttcggttaatttttgtattttta

SEQ ID NO: 1611 - DNA, 6316 bp, Artificial Sequence
  chemically treated genomic DNA (Homo sapiens)
agagtataattttgttatttaggttggaatgtagtttcggtttatcgtaatttttattttttaggttaaagggattttttgttttagttttttaagtagttgggattataggcgtttattattatatttagttgatttttgtatttttcgtagagaaggggttttattatgttggttaggttgttttcgaattatttattttaagtgatttgttcgtttcggttttttaaagtgttgggattataggcgtgagttattatgtttggttgaagaaggatattttaatattaaaaaattaaaaagtttataattttaaaaggatagttttttatattgaataagtttggtttttagaaaaattataagagtgtttttattttttttatttttttattaagaagagaaaaaattattatagattaagagttgggaataatatttttaaaaagagtgagatttgttatttagtttatttaaatttttttatttgtacggtattggtagagtagtgattaagatttgtagatttgtgttttttagtagtcgggaacgatgaagtagtaggagaatgggggaatttggaagtatttatagttgtaaattgggtttgggttttgtagttttagtttagggtagttttttgatggggatattgaaagaagtattttagttatttttttttttttgtttttttttttttgagttggagtttggttttgttgtttaggttggagtgtagtggtataattttggtttattttaatttttattttttgggtttaagtgatttttttgttttaattttttaagtagttgggattatatatattattatgtttagtttttttttttttttttttttgtatttttagtagagatagggttttattatgttggtttggttttaagtttttgatttttaggtgattcgtttatttcggttttttagagtgttgggattataggtgtaagttatcgtgttcggttatagtaattttttttttgtttacgttggaatatagtgatatgtttacggtttattataattttaatattttaggtttaaataattttttggtataagttaagtagttgggattataggtatatattattaggtttggttaattttgtttattttttatagagatagggttttattatgttgtttaggttgtttttaaatttttgtgtttaagtgatttatttgtttttgttttttagagtgtttagattataggtgtgtgttattgtgtttggttttatttattgttttttgtttgtttgtttttttgttgtttgtttttgagataaggattcgttttgttgtttaggttggaatatagtggtgtgattatggtttattttagttttaattttttaggtttaagtcgttttttagttttagttttttagagtgttgggattataggcgtgagttattatattttatttatataatatagttttgtattttaatttttttattataggagtagtaaatggttataggagaaaatgtgaaaaattatagataagaaaattgaaataaagtttattattttattataaggtaatgagagatttttaattattaatgttagtttaaggtgtatttttgtaaagtatgtataggtatagtatgtatatgaatttgtatgtatgtgtgtaaatatgtttgtgtgtatatgtatgtgtgtgtaaatgtatatatatgtatgtatatataaatatatagtttttgtgtgtttgtaaaacgtggatatgttaagtatattattttgtagttttgttggttttgttataattttttatttttttattttaggtattttattatagttagatttttttaatgaatttaaaatgttttatatattttttttgattagttgtgtatttagtttggggttgtatatgatatttgggtttcgagtgttttagcgttttttaatttagtaaattttatgtttttttttttttttttttttttttgagatagagtttcgttttgttatttaggttggagtgtagtggtacgattttgatttattgtaattttttttttcgggtttaagtagtttttttgttttagtttttcgagtagttggaattataggcgtttattattacgtttggttaatttttgtatttttagtagagacggagttttattatgttggttaggttggtttcgaatttttgattttgtgattcgttcgtttcggttttttaaagtgttgggattataggcgtgagttattgtatttggtttatttatttttatggtattgtttgttggatttgtttggttgtttatttgcgttacgtagttcgttttttgtattttcgataaattagaaatgatgtttgaaggtttatggatttaagttaatttaaggggatatattttatgtggttgatattattagtaatgttaagattgattatggtatttgtcgtgtattttgtgatgatattatgattcgtgtggtattattttatttttatagttatttttttagtaattttttatttaatggttttagtattaatgaataatttttgtgttttaaaatagggggtttgtagtttaggtatggtgaggttaattatagagtatgttaaggatagggtgatattgaagtaaagatttaaagttattgaaggagtgagttatgtggttggttgtgggaagattgttttaggagaggaaatagtaagtggaaaggtttagacggaggtttaaagaaaagtaggttagtggtggtggtttacgtttgtaattttaatattttagaaggttgaggtgagaggattagttgaggttgggagttcgagattagtttgagtaatatagtaagattttatttttataaaaaggttaaagaattagttgggtgtggtggtatgtgtttgtagttttagttattcgggaggtttaagtgggaggagcgtttgagtttaggagtttaaagttgtagtgagttatgattgtattattgtattttagtttgggtgatagagcgagattttgtttttaaaagaaaagaaaataggtttagtattttggagtgaagtgggtaagggagagggtggtgagaaataaagttagaggtaaaggggggttagagtatgtcggatttggtaagtattgtttagatttaaatgggaagttattggaatgtttgggtggatgttgatattttaaacgttagaataggttttttgtatatatttgttttatttttaagttagttttttatgtaagtgtgttagtggtcgtagagttttttttatttattttttgagtgtttttgggagtaggtattgttttgggtattgtgaagataaaagtgaaggaaataaaatggtttaggttttgtttttatggagtttggattttagtgagggaagagagattgtagaataatttttaagtaagagtgaaatgtggttaggtacggtagtttatgtttataattttagtattttaggaggttaggagtttgatattaatttggttaatatgacgaaattttatttttattaaaaatataaaaattagttgggtatgttggtgtataattgtaattttagttattcgggaggttgagataggagaatcgtttgtatttaggaggtggaggttgtagtgagtcgagatcgcgttattgtattttagtttaggtaatagagtgagattttatttcgaaagtaaaaaaaaaaaagagtgaaatgtaagcgtgtttttaatttggttttggaggttggggatagtttttttgaggaagtgatttttggttaaaaatttgaaaggttaagaagagttaataaagtggagagaggagaggtttgttttaggtagaaataatagtgggaaggaggaagcgtggtagacggcgtggaaggaaaggtaggtagaggttttagaggttgtaagttttttgtttgtattttaagagtaatgggtgattgtaagcgagggatgatagggtttagaaggtttttttgtttttgtgtggaaaagggtttggagggtagaaataaatgtggtcggttgggtgcggtgatttatttttggaattttagtattttgggaggtcgaggtaggtggattatttgaggttaggagttcgagattagtttggttaatatagtaaaattttgtttttattaaaaatataaaattagtttagtgtggtggtaggcgtttgtagttttagttattttggaggttgaggtaagagaattatttgaatttgggaggtagaagttttagtaagttgagattgtattattgtattttagtttgggaggtagaagttttagtaagttgagattgtattattgtattttagtttgggagatagagtaagattttattttaaaataaaaaataaaataaaaaaaagaaaagaaatagatgtagttagatagtggggaattatttcggttttgagaagtaaaggcggtgttggggatgggaggatgtagataggttttagagatattgaggggattaataggatttttgaagttattaattagtaggatcgggtggaggagagggatagatttagtttggtttgtataatattaggtttattttgaggttgatatttttttttgatttttttgtttagtttttattcgtaaggtcgtattagttgtttgttgagtttaattaaatttttttttgttttggtaatgttcgggaatgaagagataattagtttatttttagaatttaaagaggtttagaagaaaaagtagtttttatttagttgttggtttttttattaattttttttaagttagttgggtgatttatatatttgtgagatttttcgtatggagatcggggcggggggtgttgtttaatgtttagaattgttgaaattattagtttattgttttagtattaatttaattttgttttttaagtgggatttggtttttagatattgagatttggatgttgggtattttcgttagattttttataaattttttatatacgtaggttaggagttttagcggtgtttttttaggtttatttggtaagacggtattagtttgtttagaataggggttggttatttattattttagagtatagagattttttttttgttattcggttttttttatttggttggtgataaattataaggtatgtgattattataggttaaaattttattagaaatttggggtaggtgtggggaagagtaaggatgggcgtttttttgtagatagtatgtttcgtttttattttttttgtgtggtttttataagatttggttgttatttaaggagatttggagtgagcgggtgtaatggtttatgtttatagttttagtgatttaggaggttgaggttggaggattatttgaagttaggaattcgagattaatttgagtaatatagttagatttagtttttataaaaaaataaaaataaaaataaattagttaggtatggtgttatatatttgtagttttggttatttagttggttgaggtaggaggattacgagtttaggagttcgaggttgcggtgagttatgattgtggtattgttttttagtttgggtaatagaacgagtttttatattttaaaaaaaaaaaaaattttagagtatgtttaattttagatcgttaagatggttttttaattgtaaaatagagtggttattttttagtaggaattgttaaatagaatttttgggattttaatatattttttttttttaaaaaaagtgataggattttgttatgttgtttaggttagtttttaatttttggttttaaatgattttttcgttttagttttttagaatgttgagatgataggtgtgagttatagtgttcggttattaatatttttttgaaaatagtttttgcgaagtggttatgttgtggtttttaggaatttttttgatttattcgttattagatatagttacgatagaattttaaatttaatttggttaagtgtgataatattaaaggttagttagaaagtaaaattttattggaatttagttagattttttggtaaggtgtattgagaaatgtttgaagtttattaagaaaaataaaatattgaaaatattttaaagtatgttgtagtaaaatataaattaagtaaagatttatcgatgaaattcggatgttgaagtcggtataagggtatggtgaggacgtataggatttcgtgagtaggttttataattaggatgtttttgatttgatatttaggattgttttatttttttttaattttttaatatttgattaatattttaagg

SEQ ID NO: 1612 - DNA, 6316 bp, Artificial Sequence
  chemically treated genomic DNA (Homo sapiens)
ttttggggtgttggttaggtgttagagggttggagaaaggtaagataattttaaatattaagttaagaatattttagttatgaaatttatttacgagattttgtgcgtttttattatgtttttgtatcggttttaatattcgagttttatcggtgagtttttgtttagtttgtattttattgtagtatgttttggggtgtttttaatattttattttttttggtaagttttaaatattttttagtatattttgttagggagtttagttagattttaatgaggttttattttttgattaatttttggtgttattatatttagttaggttgaatttaaagttttatcgtgattgtgtttaatggcgaataaattagaaaagtttttgaaaattataatataattatttcgtaaagattgtttttaagaagatattaatggtcgggtattgtggtttatatttgttattttaatattttgggaggttgaagcgagaggattatttgaaattaggagttggagattggtttgggtaatatagtaagattttattattttttttaaaaaaaaagaatatattaaaattttaaaagttttatttggtaatttttattaagagatagttattttgttttataattaagaggttattttagcggtttagaattaagtatattttgaggttttttttttttttaagatataggagttcgttttgttgtttaggttggagggtagtgttataattatagtttatcgtagtttcgaatttttgggttcgtgatttttttgttttagttagttgagtagttaggattataggtgtgtgatattatgtttagttaatttatttttatttttgtttttttgtagagattgggtttgattgtattgtttaagttggtttcgaatttttggttttaagtgattttttagttttagttttttgagttattgggattataggtatgagttattgtattcgtttattttaagtttttttaaatagtaattaagttttatggaaattatatagaaaaggtgaaggcgggatatattgtttgtaggaaaacgtttatttttgtttttttttatatttgttttaggtttttgataaggttttggtttgtggtggttatatattttgtgatttgttattaattaggtgggaagggtcgggtggtaaggagagggtttttatgttttgagatgatgaatagttagtttttgttttgagtaagttggtatcgttttgttagatgagtttgaaggggtatcgttgaggtttttggtttacgtatgtggggaatttgtaggggatttagcgaggatgtttagtatttaggttttaatgtttaaaagttaaattttatttaaggagtagagttggattagtgttgagatagtgaattggtagttttagtagttttaagtattaagtaatatttttcgtttcggtttttatacggagggttttatagatgtatgagttatttagttgatttggggaaggttggtgggagggttaatagttaaatgaaagttatttttttttttaaatttttttggattttggaaatagattgattatttttttattttcgggtattgttaggataggaagagatttgattaaatttagtaggtagttaatgcgattttgcgggtggggattaaataaaaaggttaaggagaaatgttaattttaagatgaatttggtgttatgtaagttaagttggatttgttttttttttttattcggttttattgattgatggttttaggagttttgttgatttttttagtgtttttggaatttgtttgtatttttttatttttagtatcgtttttgttttttaggatcggagtgattttttattgtttgattatatttatttttttttttttttttgttttgttttttgttttgagatggagttttgttttgttttttaggttgaagtgtagtggtgtagttttagtttgttgaaatttttgttttttaggttgaagtgtagtggtgtagttttagtttgttgaaatttttgttttttaggtttaagtgatttttttgttttagtttttagagtagttgggattataggcgtttattattatattgagttaattttgtatttttagtagagatagggttttattatgttggttaggttggtttcgaatttttgattttaggtgatttatttgtttcggttttttaaagtgttgggattttaggaatgagttatcgtatttagtcgattatatttatttttattttttaagtttttttttatatagaggtagagagattttttgagttttgttatttttcgtttataattatttattgtttttagaatgtaggtaaaaagtttgtagtttttggaatttttgtttgtttttttttttacgtcgtttgttacgtttttttttttttattattatttttgtttggaataagttttttttttttttattttgttgattttttttggttttttagatttttgattaggagttatttttttaggggagttatttttaatttttaggattagattggaggtacgtttgtattttatttttttttttttttgttttcgagatagagttttattttgttgtttgggttggagtgtagtggcgcgatttcggtttattgtagtttttattttttgggtgtaagcgatttttttgttttagtttttcgagtagttgggattatagttgtgtattagtatgtttagttaatttttgtatttttaatagagatggggtttcgttatgttggttaggttggtgttaaatttttggttttttgaagtgttgggattataggtatgagttatcgtgtttggttatattttatttttgtttgggaattattttatagtttttttttttttattggagtttaggttttatgagggtagggtttaggttattttgttttttttatttttgtttttatagtgtttagaataatgtttgtttttaagaatatttagggaatggatggaggggattttgcgattattaatatatttatatgggggattgatttgggaatgaaataagtatatgtagaaagtttgttttgacgtttggggtattagtatttatttaaatattttaatggttttttatttaagtttggataatgtttgttaggttcggtatgttttggtttttttttatttttgattttattttttattatttttttttttgtttattttattttagagtattgagtttgttttttttttttttagagatagggtttcgttttgttatttaggttggagtgtagtggtgtaattatagtttattgtagttttgaatttttgggtttaagcgttttttttatttaagtttttcgagtagttaggattataggtatatgttattatatttagttaattttttaatttttttgtagagatggggttttgttatgttgtttaggttggtttcgaatttttaattttaattgatttttttattttaattttttaaagtgttggggttatagacgtgagttattattattggtttgtttttttttaaattttcgtttaggtttttttatttgttatttttttttttggaatagtttttttatagttagttatatggtttatttttttaatggttttgagtttttattttaatgttattttatttttagtatattttatggttggttttattatatttgaattgtaaattttttattttaaaatataaagattatttattggtgttaaaattattaggtgaagagttgttgggaaaatgattgtaggagtgaagtgatgttatacggattatggtgttattataaggtgtacggtagatgttatggttaattttagtattgttggtggtgttagttatatgggatgtgtttttttgggttaatttgaatttatgagtttttagatattatttttagtttatcggaaatataaggaacgagttacgtgacgtaagtgagtagttagataaatttaataaataatgttatagaaatgggtaggttaggtgtagtggtttacgtttgtaattttagtattttgggaggtcgaagcggacggattataaggttaggagttcgagattagtttggttaatatagtgaaatttcgtttttattaaaaatataaaaattagttaggcgtggtggtgggcgtttgtagttttagttattcgggaggttgaggtagaagaattgtttgaattcgggaggggaggttgtagtgagttaagatcgtgttattgtattttagtttgggtgatagagcgagattttgttttaaaaaaaaaaaaaaaagaaaaaagatatggggtttattagattaaaagacgttaagatattcgagatttagatgttatgtgtagttttagattgaatatataattggttaaaaaggatgtgtaggatattttgggtttattgggaaaatttgattatggtaaaatgtttggagtagaaaggtgagagattgtgatagaattaataagattgtagaatggtgtgtttagtatgtttacgttttgtaaatatatagagattatgtatttgtgtatatatatatatatgtatatttatatatatatgtatatatatataagtatatttatatatatatatgtaggtttatatgtatgttatatttatgtatattttgtaagaatatattttaagttaatattggtagttaaaggttttttattattttgtaatgaaatggtaggttttgttttaatttttttgtttataattttttatatttttttttatgattatttattgtttttataatagaaaggttaaaatataaaattgtgttatataagtgaggtgtggtggtttacgtttgtaattttagtattttggaaggttgaggttggaggacggtttgagtttgggaggttgaggttggagtgagttatgattatattattgtattttagtttgggtaatagagcgagtttttgttttaaaaataaataataaaaaaataaataaataaaaaataataaatagggttaggtatagtggtatatatttgtaatttgagtattttgagaggtagaggtaggtggattatttgagtataggagtttgagaatagtttgggtaatatagtgagattttatttttataaaaagtaaataaaattagttaggtttggtggtgtgtgtttgtggttttagttatttggtttatgttagaggattgtttgggtttgggatgttgaggttatagtgaatcgtgagtatgttattgtattttagcgtgggtaaaaaaaaaattgttgtggtcgggtacggtggtttatatttgtaattttagtattttgggaggtcgaggtgggcggattatttgaaggttaggagtttgaggttaggttaatatggtgaaattttgtttttattaaaaatataaaaaaaaaaaaaaaaaaaagttgggtatggtgatgtgtgtaattttagttatttggaaggttgaggtagaagaattatttgaatttaggagatggaggttgaagtgagttaagattgtgttattgtattttagtttaggtaatagaattagattttaatttaaaaaaaaaaaaataaaggggaaaaaatgattagggtgttttttttagtgtttttattagagggttgttttgagttgaggttgtaggatttaggtttagtttgtagttgtgagtgtttttagatttttttatttttttgttgttttatcgttttcggttgttggaaggtatagatttgtagattttagttattgttttgttaatgtcgtgtaggtggggaaatttgggtggattggatgatagattttattttttttggaaatgttatttttaatttttggtttgtgatgattttttttttttttggtggagaaatgagaaaaataaggatatttttgtagtttttttgggagttaaatttatttaatataaaggattgtttttttgagattatgagttttttaattttttggtattaaaatatttttttttagttaggtatggtggtttacgtttgtaattttagtattttgggaggtcgaggcgggtagattatttgaggtaagtagttcgagagtagtttggttaatatggtgaaattttttttttacgaaaaatataaaaattagttgggtgtggtggtaggcgtttataattttagttatttgggaggttgaggtaaaaaatttttttaatttgggaggtggaggttgcggtgagtcgagattgtattttagtttgggtaatagagttatatttt

SEQ ID NO: 1613 - DNA, 5449 bp, Artificial Sequence
  chemically treated genomic DNA (Homo sapiens)
cggagggtgtgtgtgtaaaagtagatagtaggaaataggttattgtaagagattattgtggtatggatttagggagatggaaaaatgttaaatataggagtatgtgggagatgatattaatagaattttggataggtttggtgtggaaggtgaagaaaaaggagaatttagggagatattttaattttttatttgagtagttaatagtagtgatgtcgttttttgggttgaagggtggaatagtggaaaatgtaaacgtttgattgtagttgggagggtgtgagttatttcggtggagtcgtttgggggtagttgaatatattagtttggacgttaagggaaacgtttattatatttttatgatattattattattttatttatgaatttattattttataattaatttattattttattgtatttattgatttttagagatacggttttgttttatcgtcgaggttgtagtgtagtagtgtaattatagtttattgtagattttattttcgtgggtttaagtgatttttttgttttagtttttcgaatagttgggattataggtatatattatcgtatttagttaattattttgttttttgtggagatagggttttattatgttgtttagattggtttttaatttttaggtttaaacgatttttttattttggttttttaaagtattgggattataggcgtgagttatcgtgtttggttttatgatattatttatggttataggaatgatgttattttgaattagttcgaattttgaaaaatattagagattggggatagaaattaggataagtagaggaaagtgatacggagtagttagggatgtggaagggaaatagtaagtagtttttatggaggttgtgagaattaggtgtttttagaaaggggttgtggttaattgggttgtatgtttttgagaggttttgggagttgaggatagaagcgtgtttattggatttggtagtagggagggtgttagtgatttgataaaagtagttttagttgaaggggaaacggaagttaggttggaatggattggagagagaatgaaaggtaaggaagttaagatagttggtgtagatattttttaagaagttttattgtgaagaggaaagaaaaatagggtaatagatgtagggaggtgtggggttaggagaatagttttgttattattgttattgtttttaaagtgggggatattagagtttgtttatagatggggagaggtggatgggtagtagagagagggtatttggagaggtttttgagaagtaagaggggttggggttttgagttttaggaaagtttgatttttgttttttattattattttaataggatagaggaagacggggtgggatggggagatggttttgtggatttgatagtgtgtgtgtagtggtttttttttttttagggaagattattagttgggaggtttatggggaggagcgcggaggtttgaggaaagaggagaaggtatgaaatagttgtttttaaaaagtggaaaagtgagtttattagaaaaatttatattatagggttggtaggattgaggataaatttagaatatgtgattatgaatttacggtgagtttagtttagttatattatttttttagttatatttttttagttcggggttgattttggaaaattagagttggggatatgtagttaggggttttttaggattgtgtgatagaaggagagagatttttttttttgggatttttttttgggagttgtggaggagggattagaatgatgattttttaagtaagtttagatgaggagggatatgaagttagaagtaggtggaaagggagaaagtgtagggttaaagaattgaaagtgtttaaagattatagtaatcgggtttttgagttaggagttgagaaggtggtaggggtaaaggaagagtttgaagtggtgattttagaggagatatggtttttggttatgatttaggtttagggtatgtttaaaggagaaaagagttaaggtagagtgtttttgtgatttatttatttatttatttgataaatttttattgagttggtgatataaataaggggagagttttatttagttagggtatttagggagggttttttggaggaggtggtttttgtgtgggttgagtttagaaagatgaatggaagttttttagggagataaagaagatgggtgttttgagaggagagtaaattataagtaaaggtatgggggttagggtaggggggtggaaaatagtttggtttatttgtgaaaatggaggtagtatggttagaggatgcgggaagggtaggtaatgaggtagggatttgattatggagggttttgagagttttgggtagggtttaggacgtatttttaagtagtggaaagttattgaagatttaagtagggggtgaaatttgtgattttataaatatttatggtagtttaggggagagtttggtgggaggtgtttttttggttggtttttgagatagggttttattttgttatttaggttggaggatagtggtattattatggtttattgtagtttcgaatttttgagtttaagggatttttttgttttcgtagttgggattataggagtatgttattacgcggggaggttatttgaatagaataggtgaggggtggagggtggagagggtagtgatattggagagggagtattagtagggtgtggaattggttagatttattattatgatgtttcgggtagttattaattaaagttagttttagtaagtggaattagtgaggatatttttttttttatattataaaatagttagattttaggggtaatggaggagtaggagaagaggaaattaggaggaagtgaatattttgaagggagaggtgtacgttgtgtaaagaaaataggttgtagagtaggttttagagaagaagtattttttaggggtagggaaggggtaggttttagagtagagttggggagagtggtcggacgtataggtgatgttttgtttttaagaagaaaggcggtgtgcggtgtgggaagtttaggagggttagcggggaagaaaatattggatttgttttttggggagttttggtgatttaggtgagagttattttttcgagtgttggggttgggagttagattatgtgtttgtgggtttttgtggttttatttgggttcgtgtaatgaaaagagtgagtagtattaggataggaggattattatagtagggattgtagattgggtgggtgtatagtagttttggggtttttttaaggttatttggttggttggcgttttttgtgtagtgataagtagtatgtgggggtgtacgtggagtgggtgatggggaggaaggtggtaaggtatatgatagagttgtgagatgtaattgggaaggtttgtatgtggggtggttttaggtcgggtgtgcgtgtatgtgtttgtgtgtgtaagtgtgtgtatatgtacgtttacgtttacgataggggttagtgagtagttgagggtagggttggtaggaataagtagagttattttcgtggaaatacgattttttgggtgttgtaaggagtagttgggagttaggtataagggcgtggttagttttgtttagtggttttggtttttttttggttattttttttatttgttgagtaagtttgagaagcgttcgtgttgattagggtaggggcgttgttgtaagggttaaggtttattgggagaggtttatttttaggtgtggttttgggggtttttaggggtttgtttaggtttttgtggtgtaggggtggttttaggtttgtttatgtgggtttggtagtggttgtttgtagttggtttgtaggggttttattgtaattgtttgttgatgtggttatttttttagggttatttgtaataagtgatttttttttttttttataggaataggttttggagggttgggtagaaggggagaggggttaggtggggtttagattatataatgtttataggtattaaaggttttttgtggatgtttttttttttaatttagtttgtgttgggattattagttaaaagtagtttttaggagttttagttttgtttttattattggagttgtttatttttttgtttttgtgattttttttgtacgtttttttttttacgttagtatttgtagttttttagatgtaatgttttttttttagtttattttgtttgtttagtgggttagagtttttagggttgtgggagggaattgttaggagatttttgtcgggtttagggtttttttttttttttttttttagtttaatattaagtattttaaagattaggaaagaggaatttatatttatttttatttttttttttttttttttttaggttagggatggtaaatataggtagaggtattacggtttttttttttgcgtttttggtagatattattaattaattatagtaatttttttgtatagagtttggttgttatttttatggtttttatttatatttttaggtggttaatattaggatttacgtcggtttttagggtgaagtttttgtgttagttttattttgatttaattttttaattaggttttttattttggtttatttagaggtcgtttgagtatagttagttgtggttttttttttgttttattaggttgaagttatatagttttcggagtttgggtttaggaggtagtcgaaggtattggggtgttggttttaagttttaagattataaagaatttggttggtttgtcgtcggttttgagggtagtcgttgttatttttggggaaagtgtggtgggggggttaggggtgatgttttgtgtttagtatttgtgtagtagtagtattttgtaggtatattttttagttttgatagagtttgtacgtttattttttcggttcggttattgggtaagtaggaggtgaggagtggacggttcgtttagggaggggcggtcgtttagtatttcggggttgcgtattgtagttttttaggttatttattatttttttggtttttgagtttaggatgcgaggatggttagattatttttgtgtattttggtgtttttgggttttgagtgtttgcgtttttttattcgggagttattggtagttatagaatagcgggcggtggaggaggaggttcggttgtagcggaataagtagatggagattgaggagttcgaacggaagttacgaagtgatttggaggttggtaagaatttatttatgatttacggagatttttcgtcggaggttatcggtatttttttggaggatttggatttttattatagtaataagaaggtttgggtttgggaaggttttttttgtttgtttgttatttatttatttgtttgtttgtttgtttgtttttgggttttatagttttttttttattttaga

SEQ ID NO: 1614 - DNA, 5449 bp, Artificial Sequence
  chemically treated genomic DNA (Homo sapiens)
tttaaggtgggagagaggttgtgagatttagggatagatagataggtagatagatggatggatggtagatagatagaggaagtttttttaggtttagatttttttattgttgtagtagggatttaggttttttagggggatgtcgatgattttcggcggggggttttcgtagattatgggtaggtttttgttagtttttaagttatttcgtggttttcgttcgggttttttaatttttatttgtttatttcgttgtagtcgggtttttttttttatcgttcgttgttttatggttgttagtgattttcgggtgaaggggcgtaagtatttagggtttagaggtattagggtgtatagagatggtttggttattttcgtattttgggtttagagattagaagggtggtgggtggtttggggagttgtagtgcgtagtttcggggtgttgggcggtcgtttttttttgggcgggtcgtttattttttattttttgtttgtttagtggtcgagtcggggaggtgggcgtgtagattttattaggattgggagatgtgtttgtaaggtgttgttgttgtataggtgttgggtatagagtattatttttggtttttttattatattttttttagaagtggtagcggttgtttttaggatcgacggtaaattaattagattttttgtggttttgggatttggggttaatattttagtgttttcgattgttttttgggtttaagtttcgggaattgtgtggttttagtttaatgggatagagagagaattatagttggttgtgtttaggcgatttttggataggttaggatgaggggtttggttggggggttagattaaagtgggattggtatagggattttattttgagggtcgacgtggattttgatattggttatttggagatgtaggtggagattatgaaggtggtagttaggttttgtgtaaaaaggttgttgtgattgattagtgatgtttgttaggggcgtaaggaggaagatcgtggtgtttttgtttgtgtttgttatttttggtttggagggaagggaaaagaaagatgggggtgggtgtggattttttttttttgatttttggggtatttggtgttgggttgggagagggaagaagaaagggttttgggttcggtaggggttttttagtagtttttttttatagttttgggggttttagtttattgggtaggtagggtgaattgggagaggaatattgtatttggagagttgtaggtgttaacgtggaagagaagacgtatagggaaggttatagggataaggagatggataattttaatggtgggggtagggttagagtttttggggattgtttttggttggtggttttagtataagttggattgggggaaggggtatttataaggagtttttgatgtttgtgagtattgtgtggtttgggttttatttggtttttttttttttttgtttagttttttagagtttatttttgtggaagggaagggggattatttattgtaaatggttttgggggaatgattatattagtaggtagttgtagtgagatttttgtagattagttgtaggtagttattgttagatttatatggatagatttggagttatttttgtattatagggatttggatagatttttagagatttttaaagttatatttgagggtggattttttttagtgggttttgatttttgtagtagcgtttttgttttggttagtacgggcgttttttaggtttgtttaataggtggggagggtggttagggagaggttagagttattgggtagagttggttacgtttttgtgtttggtttttagttgttttttatagtatttagggagtcgtgtttttacggggatgattttgtttatttttgttaattttgtttttagttgtttattggtttttgtcgtgagcgtgggcgtgtatgtgtatatatttgtatatataggtatatgtacgtatattcggtttggagttattttatatgtagatttttttagttgtattttatagttttgttatatattttgttatttttttttttattatttattttacgtatatttttatatgttgtttgttattatatagaaggcgttaattagttagatggttttgaagagattttagggttgttgtgtatttatttagtttgtagtttttgttgtgatgatttttttgttttgatattgtttattttttttattatacgagtttaagtagggttataaaagtttatagatatatagtttggtttttaattttagtattcgaggaaatgatttttatttgagttattagagttttttaggggatagatttagtgttttttttttcgttggtttttttgagttttttatatcgtatatcgtttttttttttgggagtaggatattatttgtgcgttcggttattttttttagttttgttttgggatttgttttttttttgtttttggaagatgttttttttttggggtttgttttgtagtttgttttttttgtatagcgtatatttttttttttaaaatgtttatttttttttaattttttttttttttatttttttattatttttgaggtttggttgttttgtaatgtgaggggaggaatgtttttattggttttatttgttgaagttggttttggttggtggttgttcgaagtattatggtggtagatttggttagttttatattttattgatgttttttttttagtgttattgttttttttattttttattttttatttgttttgtttaaataattttttcgcgtggtgatatgtttttgtagttttagttacgaaggtaggaggattttttaagtttaggagttcgaggttgtagtgagttatgatggtgttattgttttttagtttgggtgatagagtgagattttgttttaaaaattaattaaagaaatattttttattaggtttttttttagattgttataaatatttgtaaagttataaattttattttttgtttaaatttttaatggttttttattgtttaggagtacgttttaagttttatttagggtttttaaggttttttatgattagatttttgttttattgtttatttttttcgtattttttggttatgttatttttatttttataaatgggttaagttgttttttatttttttgttttaatttttatgtttttgtttgtggtttgttttttttttagagtatttattttttttgtttttttggagagtttttatttatttttttagatttaatttatataagaattattttttttaggaagttttttttgggtattttggttgggtggaattttttttttgtttgtgttattagtttaataaaagtttattaaatgaataagtgagtgaattatagggatattttattttagttttttttttttttaagtatattttgaatttaaattataattagaaattatattttttttgaaattattattttaaattttttttttgtttttgttatttttttagtttttggtttaggggttcggttgttataatttttgggtatttttagttttttgattttgtattttttttttttttatttgtttttgattttatgtttttttttatttaggtttatttagaagattattattttggttttttttttatagtttttagggagagattttagaaggagggatttttttttttttattatatagttttggggaatttttaattgtatgtttttagttttggttttttaaagttagtttcgagttggagaaatgtggttggggaaatggtatgattaggttgagtttatcgtaaatttatggttatatattttgggtttgtttttaattttgttagttttgtagtgtggatttttttggtaggtttatttttttattttttgaaaataattattttatgtttttttttttttttttagattttcgcgtttttttttatgagttttttagttgatggttttttttgaggaaggaagaattattatatatatattgttaaatttatagaattatttttttattttatttcgtttttttttattttgttagaataataataagaagtaagggttaggtttttttggggtttaggattttagttttttttgttttttaaagatttttttaggtgttttttttttattgtttatttatttttttttatttgtgaatagattttagtgttttttattttaaaaataatggtagtggtgataaaattatttttttggttttatatttttttgtatttattgttttattttttttttttttttatagtaaaattttttggaaagtgtttatattagttgttttgatttttttattttttattttttttttaatttattttaatttggttttcgttttttttttaattgaaattatttttgttaagttattaatattttttttgttgttaagtttagtgaatacgtttttgtttttagtttttagagttttttagaagtatgtagtttagttggttatagtttttttttggaagtatttgatttttatagtttttatggaagttgtttgttgttttttttttatatttttggttgtttcgtattatttttttttgtttgttttgatttttgtttttaatttttaatgttttttagggttcgagttggtttagggtggtattatttttatgattataaataatgttatggggttaggtacggtggtttacgtttgtaattttagtgttttggaaggttaaagtgggaggatcgtttgagtttaggaattggagattagtttgggtaatatagtgagattttgtttttataaaaaataaaataattagttgggtgcggtggtgtgtgtttatagttttagttattcgggaggttgaggtaggaggattatttgaatttacggaagtggagtttgtagtgagttgtgattgtattattgtattatagtttcggcgatagagtaagatcgtgtttttaaaaattaataaatataataaaataataaattaattataaaataataagtttatgaataaaataatagtaatgttatgggaatgtgataaacgttttttttgacgtttaggttggtatatttaattgtttttagacggttttatcgggatggtttatatttttttaattgtaattagacgtttgtattttttattgttttattttttaatttaggaaacggtattattgttattggttgtttaaataaaaaattaaggtatttttttgaatttttttttttttttattttttatattaagtttgtttaaagttttattaatattattttttatatatttttatatttgatatttttttatttttttgggtttatattataatagttttttataatagtttgttttttgttatttgtttttgtatatatatttttcg

SEQ ID NO: 1615 - DNA, 6319 bp, Artificial Sequence
  chemically treated genomic DNA (Homo sapiens)
attttgggagttttgagttggatagtttgtaagaagttaggtatataaagtaggaaagagtgttttaggtagaaggggtagtaaattttagtgtatgtgtagataataagcgggattgtgtggttgtaagtttgtcgattgtgttgtgtaggattttgtgagattaattaagttagttgtatgttattttgagtttggtgggttatgttgtgttagaattagtagtatattgaaaagttgggtgtttgtgatattttttggggtattttttagtttttttgttgttatgaggggttttttatgttttttttatattgtttttgatatgtaaatacgagaggtttttttaaaaaaaaagtgttaaatgttagcggaaaatatagggggaaagggaatgtgggtagagtataaggaggtgttggaaaatatgaaaaagggttttgaatttcgaggtgttttttggtgttcgggtttttgttgtggatttgaatttgtgtttgtagtaggtagggggtttggtgtagatttgaggatttaagaggatattttgtttatgtgggtaatgaaataaggtttggtgtgggttttaagtagtattagatgagaagggaaagagattaggaaatgggttttagtaggggagagggtggtattgtttgggtttatgtgttgatgttgagaatggtttaggatcgaggggaaaaggatatagttttattgagtatttattatgtgttcggtttcgtggtgagtattttcgtatattttgtagtttataggatattgttcgttttttcgaagtattaattttgatttattataatttttaatattagggtttatgtttgttttgtttcgttgcggtatttttagtgtttggtatatattcggtgttttataatgattttgaatgatttaatttttttttttttttttttttttttttttttaaattttatttgattttttggataattttaaataaatgtgtttaaggtttggggagtttatttattgatttattgatttttattttattttattttatttttttgagattggagttttgttttgttatttaggttggagtgtagtggtgcgattttggtttattgtaatttttgtttttcgggtttaagcgatttttttgttttagtttggggagtttattttaaaaataatgaggagagttgtgttaagtttagttagttgtggagtttataatgagagagtaaagatttagaaagtgtaaattatttgtttaggttttagcggtggagttgagatttgatttagttgtgtttgattattttgtattttttttatagtttgttttttttttaagtgagggaatttagaaggtttgattttagagttggataaagtaagattagtatttttgtggttgtatgttgttgggtaaatgattttttttttgttagtttttatgttttgatttgtaaggattaggttgaattttaattgtaaggtaagtaggtagggttaagttttaggttattcgggttatttaggaggaggaaagagggttggaatatttttggatatttttagatattattgggcgttattggaggagatgttttaagaggtagttgtatgggttgaattttatttggtttttatttgttttttgtaattagtatttattttataaaagatgattaagaaaatttatttttaagtagttttgatttttaaatttttaacgaagaaatgtgtttatatgaataattggtttagtgtttattttgagagtattttttatatattagtttattttatgttatttgttttagtttgtttagttatataattgtttaattgagttattatttggttttagtttttgtgttagagtttagagaagtttgtgtttttgatagttatattggggtggaagagatatttatgagaaatattaagtttttgtgtgataagagtttttagttagttttttttatgtgttgagggagtttggaaaggaaaagtatgattaaattttgttgttttttttttgtttgtgttggtttgattgtggttatagggaggtggggggaggggaagggggtggtggagtgggtagttcggtttttttttttgattgggttgggtagtaattttaggaggaggggaagaataaagaatttttaaggtggttatatttttttttgtttgttttttatatttaaaggatttatagttatatttggttgattgattatttatttgtatttttttttttttttgatacgttatggtaaaggaataaaaaagtatttattttttgtagaaatgttatttgatttagtaattttattattgggtatatatttaaaggaatataaaatattttattataaagatataggtatacgaatttttattgtagtattttttataatagtaaagacgtggaattaatttaaatgtttattaatgatagattggataaagaaaatggtatattttgtatatgtattttggaatttaaaataaaagttgaaagaaaaagatggatgtatagcgtatagtaggatgaatagtatatagtatttatttatttttaaggataaagagaataggatagaaataatagtagtttgtggttttaattattttttaggtggtaggaagtagttgaaaggataaatggtatttggttgggttgagtagaggaagttagttgtggattgtgtaaaaagtgtgtttttagaggtagttgtatatgaaggttaaaagattagggtttaagttttattgtttttgaggttaatatgattttggataagttattttttttttattttattataatatgaagtgattatacgagatatgtgatttttattttttggtgtttgagaaaattatttgaaaattttttttttttaatatgtatatgtatatgtgttttgatttttattttgaaatgggattaagatatttagatttttataaaagtttttttaaaatattttaagagttattgttgtagatagtttggaagagtttttttaatttggatatttttatgtttggagagcggattaaaggaaagtgttgtaggaattgtatggtaatttaggtatgagagtttttataagaggttgagattttatttgttagatatggtagaagtgtttttgtggagataatgatatttgtaatgggtaggatgtttatagagtgagatagagaggtgggttttgtaggtggaggttatagtaggagtaaaattttagagatagtatagtaagtggtagttatttgtaattaggaattgtaattattcgaatgtgttggtttttattgaggtatgatatgaagaattataaatatttaggtgagtagttcggtgttttatttaattgatggtgtggagttattgtaggtttttgagttaaagattgtataattagagtagattagtttagttattattttatataatgtatataggttttatgattttaatgtttagatttggtttagttatttttttttgagtatttattatgtgttttttatttcgagtattgtatatatttttatgatttagttttttttgtagttgtatagttatatttttttgtaattatttttttatttttgttattttttttggattttatatttttgttttttttgatgatttgaaatgaagtgtgtttttttatgttttgttgtttttatagaagattttgtttttatttagtttttttttttttatattagtatataggagatattgtttaaagaatatttttttagttggggtggtggtttatattggtaattttagtattttgggaggtcgaggtagaaggattgtttgaatttaggagtttaagattagtttggggaatatagtgagattttatttttacgtaaataaaaaataaaaaaattatttgggtaaggtagtgtatatttatagttttatttattgtgaggttgaggcgggaggatcgtttgagtttaggagtttgaggttgtagtgagtttgtattatggtattttagtttgggtaatagaatgagattttagaaaagaaaaaataaaaaggaaaaattttttggttgaggttggaggattgtttgagtttaggagtttgaggttgtagtgagtgtgtgttattgtattttagtttgggcgatagagtgagattttagaaaaaaaaaaataaaaagggaaaatttttttggtaggatttttagatgttgttgagtagtttttagttttttttgtaatttaaatataatatatttattttcgtgtttatattgggtggtttttatttgtttatttgtgaattgaagagaagttgtttgaggttaggtagtgttttttattggtaattgttttttttggggttaattaaggatttagaatagaataagttattgaaaattgttgaggattgaaaaaaatagaaaaaatagaaatggtaaatatttaggttagttattggatatagagaatgttatttaatttttatcgtacgtttttgagatatgtattgttatttgtattttgtgtgaatatgtatttgggtaagtttatgtaattttttttttgtagaattgggatttaaatgtaggtgtatttttgtttaggtttagatttttttgttttgaagtagtagtatttggatggaatgacgtagggttggataagttatatagaggttatttttttttatttatttttttttgttttttatttaattaggatagtttttacgtatttttttaagatttttatttgtttttatatttggggaagtttttaatgtaatttattaatttattattattacgaatattagttaggagaggtggggaaaggagtttattatatggtcgttgggtgtgagtaattgttttttgtttttatggttttttatttgtggtttttattatggtttggagttttgggtggagttttttaaataaaagtttttagtattgtaggacggtatagtggtgagtttttagttttattaggtttattaaagttgttttaggaaggtttaagttagattagaagatatgtagattattattatagttttggtgtgtttgttgttagttgggatgtggtcggaagatgtggatagtaagagtagtgagtgtggtaggtattattttgtttttttttggggagggtagaaacgtggttagttattttggggttggagtaggtttttttttgaatttattaattttattttttttttttttatttaaagaggaggaatggtgaatttggataggttggggtgagggttagtaggagaattatgagttggggtaaatatagagaattgaattgatagttttagtataagatttaaggaagggaatttgtgaggttattcgggtaaagttgggaggtttaaggtttaggggatagtttgggtgtagtttttatagtgtgatagatattaagtagagttagaaggtaagatcgggttttaataattggttatttttgggtaagttattttagtttttaaattttattttttttattagtgaaatggagttgatgatgtttgttttttaagattgtttggagaatattaatttagtaagaggtatgaaagggggtgtaaatagaaaaattaggaggaagaagttgggattggaatgtaggttttttgcgggatgtggtgtgggaggagaatgtataaatggatagagtgggggttgggggttgggaaagagttaaggattagggtaggaggggatttaagagattgagtagggtagttagttagtttttgggagttttttttttgttattttattagtttggatttttcgaataatttttaattttttttagattaggtttgtgaattgtggattattgtgttttgtattagattaattaggtttttagggtgtggggtttagagtttttggatatgaatattggggtagaattatgtatatgtggtgaaatattaaaattggatgagtttttagaaattaggttttaaaaagttttattttatagatgggaagtttggggttagggtgaaggtatattttttttagggttatttagttggggtgcggggagtttagatttgaattttaattttttgattttttatttagttttagaataaggtggttgatgaggtagagttatgtcggtatcgtttggatgtggtttttaagttagggtttgttttgggaggcgtttttttgtttgttttttaaaaattgtgttataggtgagaggttgagaaatggatgtaaattatcgtttgtgttttttttttagt

SEQ ID NO: 1616 - DNA, 6319 bp, Artificial Sequence
  chemically treated genomic DNA (Homo sapiens)
attagaagaggaatatagacgatggtttgtatttattttttaattttttatttgtagtataatttttaaaaaataaataaaaaaacgttttttaggataagttttggtttggggattatatttagacggtgtcggtatagttttgttttattagttattttgttttggggttaggtaaagagttagaagattggggtttagatttgagtttttcgtattttagttgagtggttttgaggaagatgtgtttttattttggttttagattttttatttgtaaaataaaattttttggagtttggtttttaaaggtttatttagttttggtattttattatatgtgtatggttttgttttagtatttatgtttaagggttttggattttatattttggggatttggttagtttgatgtaggatatagtggtttatagtttatagatttgatttggggaagattaggaattgttcgaggagtttaaattgatgagatgataagggaagagtttttaggaattagttagttgttttatttagttttttgaatttttttttgttttggtttttagtttttttttagtttttaatttttattttgtttatttgtgtattttttttttatattatatttcgtaagagatttgtattttaattttagttttttttttttagtttttttgtttgtatttttttttatgttttttattaggttggtattttttaaatagttttggagggtagatattattaattttattttattgatagagaaagtagagtttgagagttaaagtgatttgtttaagagtgattaattgttagagttcggttttgttttttgattttatttggtgtttgttatattgtagaagttatatttaggttgttttttggattttgggttttttagttttattcgagtaattttataggtttttttttttgggttttgtattgaagttgttagtttagttttttgtgtttgttttaatttatggtttttttattagtttttattttagtttgtttaagtttattattttttttttttaggtaggaagaggggagatagagttggtgagtttaaggagaagtttgttttaattttagagtggttgattacgtttttgttttttttagagagaagtaaaatgatgtttgttatatttattgtttttgttgtttatatttttcggttatattttagttagtagtaagtatattagggttgtggtgatgatttgtatgttttttggtttggtttgggtttttttggagtagttttgatgagtttggtgaagttaagagtttattattgtgtcgttttgtaatgttgagggtttttatttgaaaaattttatttaaaattttaggttatggtgggagttataagtgggaagttatagggatagggaatagttgtttatatttagcgattatgtggtaaatttttttttttattttttttggttggtattcgtggtggtgatggattgataggttgtattgggaatttttttaagtgtgggagtagataagaattttgaaaaagtgcgtgggaattgttttggttgagtgggaagtaaagaaaagtaagtgagaggaagtggtttttgtgtggtttgtttaattttacgttattttatttaagtattattgttttagggtagaagagtttggatttgaatagagatatatttgtatttgaattttagttttgtagaggagggattatataaatttatttaaatgtatatttatataaaatgtaaatagtaatatatgttttaaggacgtgcgataagaattaaataatattttttatgtttagtgattggtttagatatttgttatttttattttttttattttttttaatttttaataatttttaatagtttattttgttttaggtttttggttagttttagagaaggtagttattaatgaggagtattgtttgattttaagtaatttttttttaatttatagataaataagtgaaagttatttagtgtaagtacggagatagatgtgttatgtttgggttatagagaggattgagagttatttagtagtatttgagagttttgttaggggaattttttttttttgtttttttttttttagagttttattttgtcgtttaggttggagtgtagtggtatatatttattgtagttttaaatttttgggtttaagtaattttttagttttagttagggaattttttttttttgtttttttttttttagggttttattttgttgtttaggttggagtgttatggtgtaaatttattgtagttttaaatttttgggtttaagcgattttttcgttttagttttatagtgggtggaattataggtgtgtattattttgtttagataatttttttattttttatttgcgtagagatggagttttattgtgttttttaggttggttttgaatttttaggtttaagtaatttttttgtttcggttttttaaagtgttgggattattagtgtgagttattattttagttaggagaatgttttttaagtaatattttttgtgtgttgatgtggagaggggaaagttaagtagaggtagggttttttatgaggataataaggtataagggagtatattttattttaaattattaggaaaagtagaagtgtagggtttaaggagagtgataggagtgagagagtggttgtagagagatgtggttgtatagttatagagaagattgggttataaagatgtatgtagtattcggaataaagagtatatagtaggtgtttaagaaaaagtagttgagttaaatttaggtattgaaattatgaagtttgtgtgtattatatagagtgatggttagattgatttattttgattgtgtagtttttagtttaaaaatttgtagtggttttatattattaattgggtggagtatcgagttatttatttggatgtttgtggttttttatgttatgttttagtggaggttagtatattcgggtaattgtaatttttgattgtaagtaattgttatttgttgtattatttttgggattttgtttttgttgtaatttttatttgtagagtttatttttttgttttattttgtgaatattttatttattgtaaatgttattgtttttataaaggtatttttgttatatttagtagataggattttagttttttgtgagaatttttatgtttggattgttatataatttttgtaatatttttttttagttcgttttttaaatatggaaatgtttaagttgaaagggtttttttagattatttataatagtggtttttgaagtgttttgggagagtttttgtaaaaatttgaatattttagttttattttaggatgagaattaaaatatatgtgtatgtatatgttggaaagaaaaaatttttaggtaatttttttagatattagaagataagaattatatatttcgtataattattttatattatgatgaaatgagaggaaagtaatttgtttaaggttatgttgattttagggataatggaatttgagttttggttttttgatttttatgtgtagttgtttttgagaatatattttttgtatagtttataattaattttttttgtttagtttaattaagtattatttatttttttaattgttttttgttatttgaaaagtggttgaaattataaattgttgttgtttttattttattttttttgtttttagagatggataaatattatgtgttatttattttattatgcgttatgtatttattttttttttttaatttttattttaagttttagggtatatgtgtagggtgtattattttttttatttagtttattattgatgggtatttgggttaattttacgtttttgttattgtgaagagtgttgtagtgaaggttcgtgtgtttgtatttttataatagaatgttttatatttttttgggtatatatttagtagtgggattgttgggttaaatggtatttttataagagatgaatatttttttatttttttattatagcgtgttaggagagagagaagatgtaagtgggtggttagttagttaaatgtaattgtaggttttttagatgtaggaaatagatagggggaaatgtggttattttggaaattttttgttttttttttttttttggggttgttgtttagtttaattaagaagggaaatcgggttgtttattttattattttttttttttttttttatttttttgtggttatagttagattagtataggtaaaaagagaatagtaagatttagttatgttttttttttttaggtttttttagtatatggaaggaattgattggaggtttttattatataggaatttaatgttttttatgggtattttttttattttaatgtgattgttaaggatatagatttttttaggttttagtataaaggttaggattaagtagtaatttaattaaatagttgtgtaattgaataagttggaatagatggtataggatggattgatgtataagagatgtttttagaataaatattgaattagttatttatatgaatatattttttcgttagaaatttgaaaattagaattgtttggagataggtttttttagttattttttatgaaataagtattgattatagaggataggtagagattagatagagtttagtttatgtagttgttttttaagatattttttttagtggcgtttagtggtgtttgagggtgtttaggagtgttttagtttttttttttttttttggatggttcgagtggtttggggtttgattttgtttgtttgttttgtagttagagtttagtttgatttttgtagattagggtatagaaattgataagggagaagttatttgtttagtaatatataattatagaaatattggttttgttttgtttagttttggggttaagttttttgagtttttttatttagggaggaagtaagttatagaggaaatgtaggatagttagatataattgggttagattttagttttatcgttagagtttaggtaagtaatttatattttttgagtttttgtttttttattgtaagttttataattagttggatttggtataattttttttattgtttttaagataaattttttaggttgaggtaggagaatcgtttgaattcgggagatagaggttgtagtgagttaagatcgtattattgtattttagtttgggtgatagaataagattttagttttaaaaaaataaagtaaaataaaataaaaattaataaattaataaataaattttttaaattttaaatatatttatttgaggttatttaaaggattaagtgagatttaagaggagggaggggagagaaaaagaaaaagttgaattatttaaaattattgtggagtatcgaatatgtattagatattggggatatcgtagcgggataagataaatatgggttttggtattgggaattgtggtaagttaagattagtgtttcgaggagacggataatgttttgtgagttgtagagtgtgcggaaatgtttattacggggtcggatatatggtagatgtttaatgaaattgtgttttttttttttcgattttggattatttttagtattagtatatgaatttaggtagtattatttttttttttattggggtttattttttggtttttttttttttttatttggtgttgtttgaaatttatattaagttttgttttattgtttatatgagtagggtgtttttttgggtttttaagtttgtattagattttttatttattgtaagtataaatttaaatttatagtaaggattcgagtattaaaaaatatttcgggatttaaagtttttttttatgttttttagtatttttttatattttgtttatattttttttttttttatgtttttcgttgatatttagtattttttttttaaggaggtttttcgtatttatatattagaaataatgtgaaggaggtatggagaattttttatggtaataggaaaattgaggggtgttttaaaggatgttataggtatttagttttttaatgtgttgttgattttgatataatatggtttattaagtttagggtgatatgtaattgatttggttggttttatagggttttgtatagtatagtcggtagatttgtagttatataatttcgtttgttgtttgtatatatattgggatttattgttttttttgtttggaatatttttttttgttttatgtgtttaattttttgtaggttgtttaatttagagtttttaaagt

SEQ ID NO: 1617 - DNA, 6341 bp, Artificial Sequence
  chemically treated genomic DNA (Homo sapiens)
gaatattgatgtaaaaatttttaataaaatattggtaaagcgaatttagtagtataataaaaagtttatttattataatcgagttcgttttatttttgggatgtaagttttttttaatatatgtaaattaataaatataatttattatataaatagaattaatgataaaaaaattatatgattattttaatagatgtagaaaaggtttttaataaaatttaatatttttttatgttaaaaatatttaataaattaggtattgatgtaatatattttaaaattgtaagagttatttatgataaatttatagttaatattatattgaatgggtaaaagttggaagtattttttttgaaaattagtagaagataaggatgtttttttttattatttttgtttaatatcgtattggaagttttggttagggtaattaagtaagagagagaaataaagtgtatttaaataggaagagaggaagttaaattgtttttgtttgtagatgatatgattatatatttagaaaattttgtagttttagtttaaaaattttttaagtttataagtaattttagtaaagttttaggatataatattaatgtgtaaaagttataagtatttttatatattaataatagataaatagagagttaagttatgagtgaattttcgtttataattgttataacgagaatagaatatttaggaatataaattgtaagggatttgaaggatttttttaaggagaattataaattattgtttaataaaatgaaagaatataaataaatggaaaaatattttatgtttatggatagggagaattaatattgtaaaaatggttatattgtttaaagtaatttatagatttagtgttatttttattaagttattattgattttttttgtagaattagaaaaaattattttaaattttatatgaaattaaaaaagattttatatagttaagatatttttaagtaaaaagattaaagttggaggtattatgttatttgattttaaattatgtaataagtttataataataaaaatagtaaggtattggtattaaaatagatatatagattaatggaatagaatagagttttagaaataatattataaatttataattatgtgatttttgataaatttgataagaataagtaatgcggaaagggttttttatttaataaatagtgttgggaaaattggttagttatatatagaaaattgaaattggattttttttttatattttatataaaaattaatttaagatggattaaagatttaaaggtaagatataaaattataaaaattttagaagaaaatttaggtaatattatttaggagataagtatgagtaaagtttttatgattaaaatattaaaagtaatggtaataaaagttaaaattgataagcgggatttaattaaattaaagagtttttttatagtaaaagaaattatcgttagagtgaataggtaatttatagaatgggataaaatttttgtaatttatttatttaataaagggttaatatttagaatttataaggattttaaaaatatttataagaaaaaaaaattttattaaaaagtgagtgaaggatatgaatagatattttttaaaagaagatatttatgtgattaataaatatatgaaaaaaagtttattattattggttattagagaaatgtaaattataattataatgagatattattatatgttagttagaatgttaattattaaaaagttaggaaataatagatgttggaaaggatgtagagaaataggaatatttttatattgttggtgggaggagtataaattagtttaatcgttgtggaagatagtgtggtgattttttaaggatttagaattagaaatattatttgatttaataattttattatcgggtatataaggattataaattattttattgtaaagaaatatgtatacgttatgtttattgtagtattatttgtaatagtaaagattttaattaatttaaatgtttattaataatagattggataaagaaaacgtggtatatatatattatggaatattatgtagttataaaaaggaatgagtttatgttcgttgtagggacgtggatgaagttggaagttattatttttagtaaattaatataggaatagaaaattaaatattgtatgtttttattcgtaagtgggagttgaataatgagtatatatggaaatagggaggggaatattatatattggggtttgtcggtggatggtaggtaaggggagggagagtattaggataaatatttaatgtagatgacgagttgatgggtgtagtaaattattatggtatatgtatatttatgtaataaatttgtacgttttgtatatgtattttagaatttaaagaataataataaaaataaaagatattttttttaattaaaaaaaagaaaaaaaattttttagaagttaatattttgtttttataaggggggatttattttttgtttattatttaggattatttttgattaaggttttttatttattaggtattaaattataggtaagaaattggtttattttattttattgttgaaaagaaagtttttaagaaagaaagagaaaaagtttttgaagttgtttttgtttgttagggatggttagtgagttggatgaaatagttgtagagtttggatatttaaagattgattttatttatttttattgagttattgaggttttttaggtgtagagtaaatttaaagtttattaattttaaagttattttttaaggaaaatataaaaatgaataatcgtttgttgataatttttttaaattttcgttagagttatgaaattatttttattatagaaataattattaaattacgttagataaatatttttgaggttaataatattttaaatttattttgtcgagaattttttaaaatttcgtatttgttatatgtgtaatttaggtatttttggaaattatttttgcggtagtatatttttatttggaagtagtgggaaaatttggaagaatatttggagaaatatttagattttgaggtttttttagtatttttaatttgttttttttttttttttttttttgagatatagttttattttgttgtttaggttggagtgtagtggtatgatttttgtttattgtaatttttgttttttgtgtttaagtaatttttatgttttagttttttgagtagttgagattataaatattatttattatggttggttaattttttgtatttttagtaaagataggtttttattatgttggttaggttggttttgaatttttgattttaagtgatttgtttgttttagttttttaaagtgttgggattataagtgtgagttattgtattcggttttattttttaataataaaaaatagtaatttttatttattgagtatttatagtgatttagttatttttttaagtagtttagatatatgaatttatttaatttatacgataattttttaaagtatatatgattagtattttgtttttattttagtagagagtggttaagtaagttgtttatggtattatagttagttagttatagagttattatttaaatgtagatattttgaatttaggttttatattagattaatttattaggaatggagtaggaaagaatagggaagattttatatttttggtttttatttggtaattatagttaattttttaggtaattatagattaattattttagatgggtatttagagattttgtaggatagtaagagttgtttttaattttgtgtttatgatagatattattagttaattataatatagtatttaattaacgtaagttaattttttagaatttttaatatttttgtttgtgttattgtattaattaattaatttgatatgagagtgtgtaggaaaaaataggaaataggtttgtagtatttttatattagtatttaatgttgtaattcgttgtagtgattttattaaagattttgttttttttatattttttttaattagggtgtttagtgttatgaataaagggatatgtataggtttttgtgttgtttttttttttgatatttttagttattagatattttgtttgtaatgtgtgtttagagagtgaggggggaattagatgattgattttttaaatgtgttttttaaatgtgttttttggggaataagggtacgagaggttgtttattttattttaaataaattttttttattatagtgtatttgatgagttggggtttgttttaattttatttggaaaagggttttagtagttaagtaaatggttttaaagtgttttagaagttaagattaatagaaattatttagttttgatgttttattatgttaaaattttagggattaagattttgtgattattatattgaaatatagtagtaaagttgtggtgtgttgttttttttggtttagagatgtaattatgtgtagggttgttgagttttttttgtatttgggtgggagtttaatggaagttttggggtttttttttggtttttaaaatttttaagattattatgtgaatataggaattaaggaaggtttttagatcgatttattttttaggtttttggtttttttgtttttttttttaattataggtgttttattttaatttattttttagggttttggtttttttgttttttttttttattatagatgtttaattttattttataattatatatttttttttttttttaaggtaagatttagatggattaaaaaatgtattaagttttttttattagtttgttttttttttgttttgtttgattttttaggatttggaatttggttagtaattaggaatttttttatcgtgattttcgtatgggtaaaggtttttttggaattttttatattgtttgttttttataaaaggtaggtagatgggttagaggagtagagaggttgagattaatttagaaattattattttttacgttaaagtttatatttttagtttttaatatgaaggttttcgtagtatttttgtggttgttgtttatagtagttgtttttagtttttaggggttcgttgggttaggtaagttttttaattttttataggaaaggtaaggtaattatttttagagttattaggttagtaagaatttttatagatttattgtaaattttttatttgaaaaatagggaaataggttttgtgggtggataagaaatgttttaattttatatttagttattggaagagttagaattagaaagttttcgagttttttttttatatttaagagggttgttgggtgtatttatatttagttatttttatagtgtttgggaatggggaatggttttgttttattgtgggtatggtgggtatttttggtagtgggagagaaggaaaatttgttgattagaagtttagtatgttaattcgattttaggatagtttttagagatagtggttaagagaagaacgaggttttagggggattttttgaggtgatttattttgatattttttgggaaagttatttaggagatttgttttataatttatttttttatattttggtgataaatttattgagtgtatcggttttattgagttagtgtatagtatggtaataaatagttttaaattattaatgatttaatagaattaattaaattaataaaagttatttttttatttgtattaaatatttataatgtatgggtttaggtttttgtattttatatttaggattttagattgatggagaagttgtttatgtgggggaatattgatggatattgtgataaagtagaagaaagtttttaggagttttgtataggtaatgtattgtggtttaaaaatgatatttattattttgtttttttttttattgattaaaattaattaatgtttttaattaaataaaagtggttaagaaatgtaagtttattttgtgttttaaaatagaggatggagaatatttggtgaaaattattatgattattatatggttacgtaggtttttataatgatagagttagtatttgttatattgattaagttttgtttatatattttatagtaatgatgagtttttagtgtataggggaggatgttgaagatataggatagtattttttagatatataagattttagagtagagggattttttttttatttttcgtaattttttgtttttttttaattttttttataaagttatgtttggaaatgtttatgtattattatgtggtttatttttttttttgtttattttttttttttaaaatttagt

SEQ ID NO: 1618 - DNA, 6341 bp, Artificial Sequence
  chemically treated genomic DNA (Homo sapiens)
gttgaattttggggaaaaaaaatgaatagagaaaaaaatgagttatatgatgatatatagatatttttaagtatgattttgtaaaggaagttaggagaaagtaaggaattgcgagaggtggagggagaatttttttgttttgaagttttatgtgtttggaggatgttgttttgtgtttttagtatttttttttgtgtattgaggatttattattattgtagagtgtatggataaagtttggttaatgtgataaatgttagttttgttattataaagatttacgtggttatgtgatggttatggtaatttttattaaatattttttattttttgttttgagatataaggtagatttgtattttttggttatttttgtttggttggaggtattaattagttttgattaataaagaaggagataaagtgatgggtgttatttttgagttatagtgtattgtttatgtaagatttttgagagtttttttttgttttattatagtatttattaatgtttttttatatgggtaatttttttattagtttagaattttgagtataaaatgtagaagtttgagtttatatattatagatatttagtataagtgagaaagtaatttttgttaatttagttaattttgttaagttattgataatttagaattgtttgttattatgttatgtattggtttagtgggatcgatatatttagtaaatttgttattagagtatgggaaaatgagttatggaataaattttttagataatttttttaaagagtgttaaaataagttattttaagagatttttttgggatttcgttttttttttagttattgtttttgaaagttgttttggagtcgaattaatatattgagtttttaattaatagatttttttttttttttattgttaaaaatgtttattatgtttatagtaagatagagttattttttatttttaaatattgtaaggatagttgggtatggatgtatttagtaatttttttgaatgtggggaaaagattcgggagttttttagttttggtttttttagtgattggatgtgaggttgaggtattttttgtttatttataaaatttgtttttttattttttaaatggagaatttgtagtgagtttgtaaagatttttgttgatttagtagttttggaggtggttattttattttttttgtaaggagttggggggtttatttggtttagcgagtttttgggggttgaaggtagttgttatgagtagtagttatagaagtgttgcggagatttttatgttggaggttgaaggtgtgagttttggcgtgagaggtggtggtttttgggttggttttagtttttttgtttttttggtttatttgtttgttttttatagggagtagatagtgtgggagattttagggaagtttttgtttatgcgggggttacgatgaagggatttttgattgttgattagattttagattttaggaagttaagtagaatagaagagaggtaagttagtaggagggatttggtatattttttaatttatttggattttgttttggaaaaggaggggaatatgtggttatgaaatgaagttaaatatttgtagtgggggaagagagtaagaaaattaaggttttaggggatgagttgaaatgaaatatttgtagttggggaaaggagtaaggaaattaaaggtttgggggatgagtcgatttaagaattttttttgatttttgtgtttatatggtggttttgaggattttggagattaggaaggagttttaaaatttttattaggtttttatttagatgtagagagagtttagtagttttgtatatagttgtatttttgaattaggaaggataatatattatagttttgttgttgtgttttaatgtaatgattatagaattttagtttttgaaattttagtatgataggatattagaattggatagtttttattaattttgatttttgaggtattttaaaattatttgtttagttgttaaagtttttttttaaatggaattaaaataaattttaatttattaaatatattgtagtgaaggggatttgtttgaaatagaataggtagtttttcgtgtttttattttttagggaatatatttagggaatatatttggaaaattaattatttagttttttttttattttttgagtatatattgtagataaggtatttgatggttaaaaatattaaagagagaggtaatataagaatttatatatatttttttgtttataatattaggtattttagttggagagggtataagggaggtaaagtttttaatggagttattgtagcggattatagtattgaatattggtgtggaggtattgtaaatttgttttttgtttttttttgtatatttttatattaaattgattgattggtatagtagtataaataagaatgttaaagattttgaggagttgatttgcgttagttaaatattgtgttgtggttgattggtgatgtttgttatgggtataggattagagatagtttttgttgttttgtaaagtttttaagtgtttatttaggataattggtttataattatttaaaaagttaattataattattaaatagaggttaaaaatgtggagttttttttgtttttttttgttttatttttggtgggttagtttaatgtagaatttgaatttaggatatttgtatttggatgatggttttgtgattgattagttgtgatattatggataatttatttaattattttttgttagggtaagagtaggatattaattatgtgtattttagggaattgtcgtgtgaattaaatgagtttatgtatttaaattgtttagaagaatgattaaattattgtaggtatttagtgagtagaagttattgttttttattattaggaaatagggtcgggtatagtggtttatatttgtaattttagtattttgggagattgaggtaggtagattatttgaggttaggagtttaagattagtttggttaatatggtgaaaatttgtttttattaaaaatataaaaaattagttagttatggtggatggtgtttgtagttttagttatttaggaagttgaggtatgagaattgtttgaatataggagataaaggttgtaatgggtagagattatgttattgtattttaatttgggtaatagagtgagattgtgttttaaaaaaaaaaaaaaaagaagggtagattgggaatgttggaaagattttagagtttggatatttttttaaatatttttttaagtttttttattgtttttaagtaaagatatgttatcgtagggatggtttttaagaatgtttgagttgtatatgtggtagatacgaagttttaaaaaattttcggtagaataaatttggaatattattgattttagaggtgtttgtttgacgtggtttaatgattgtttttgtagtaagaataattttataattttggcgggaatttaaaggaattattagtaagcgattatttatttttgtgttttttttgaaaaatggttttggagttaatgggttttggatttattttatatttgaaaaattttagtggtttagtggaaataaataaaattaatttttagatatttaagttttgtagttgttttatttagtttattggttatttttagtaagtaggggtagttttaagggtttttttttttttttttttggaggttttttttttagtaatgaagtagagtagattaattttttgtttgtgatttggtgtttgatgaatgaggggttttgattaggaatgattttgagtgatgggtaggaaatggatttttttttgtgaaaataaaatattgatttttaaagagtttttttttttttttttaattggaaaaggtattttttatttttattattattttttaagttttgagatatatgtgtagagcgtgtaggtttgttatataggtatatatgtgttatggtggtttgttgtatttattaattcgttatttatattaggtatttgttttaatgttttttttttttttgtttgttatttatcgataggttttagtgtgtgatgtttttttttttgtttttatgtgtatttattgtttaatttttatttacgagtgagagtatgtagtgtttggttttttgtttttgtgttagtttgttgagagtgatggtttttagttttatttacgtttttgtaacggatatgaatttatttttttttatggttgtatagtattttatggtgtatatatgttacgttttttttatttagtttattattgatgggtatttgggttggttgaagtttttgttattgtaaatagtgttgtagtaaatataacgtgtatatgtttttttataatagaatgatttataatttttatatattcggtaatgggattgttgggttaaatggtatttttgattttagatttttgaggaattattatattgttttttataacggttgaattaatttatattttttttattaatagtgtaaaagtgtttttatttttttatattttttttagtatttgttgttttttgattttttaatgattgatattttaattggtatgtgatggtattttattgtggttatgatttgtatttttttaatgattagtgatgatgagtttttttttatatgtttgttgattatataaatgtttttttttgagaagtgtttgtttatattttttatttattttttgatgggattttttttttttgtaaatgtttttaaggtttttgtagattttggatattagttttttgttgggtggatagattgtaaaaattttgttttattttgtaggttgtttgtttattttgacgatagttttttttgttgtgaagaagttttttagtttaattagatttcgtttgttaattttggtttttgttgttattgtttttggtgttttagttatgaagattttgtttatgtttattttttgaatggtattgtttgggtttttttttagggtttttatggttttatgttttgtttttaagtttttaatttattttgagttaatttttgtataaggtgtaaggaaggggtttagttttagttttttgtatatggttagttagtttttttaatattatttattaaatagggagtttttttcgtattgtttgtttttgttagatttgttaaagattatatggttgtagatttgtggtgttatttttgaggttttgttttgttttattggtttatatgtttgttttggtattagtattttgttgtttttgttattgtaggtttgttgtatagtttgaagttaggtagtatgatgtttttagttttgatttttttgtttaggaatgttttggttatatggggttttttttggttttatatgaaatttaaagtagttttttttaattttgtaaagaaagttaatggtagtttgatgggaatagtattgaatttataaattattttgggtagtatggttatttttataatattgattttttttatttatgagtatggaatgtttttttatttgtttgtgtttttttattttgttgagtagtggtttgtagttttttttgaagaggttttttagattttttgtaatttgtgtttttaggtattttattttcgttgtagtaattgtgaacgggagtttatttatgatttggttttttgtttgtttattattggtgtataggaatgtttgtgatttttgtatattgatgttgtattttgagattttgttgaagttgtttatgagtttaaggagtttttgggttgagattatagggttttttaaatatataattatgttatttgtaaatagagataatttgattttttttttttttatttgaatatattttattttttttttttgtttgattgttttggttagaatttttaatacgatgttgaataggaatggtgagagagagtatttttgttttttgttggtttttaaagggaatgtttttagtttttgtttatttagtatgatattggttgtgagtttgttataaatagtttttataattttgagatatgttgtattaatatttagtttattgagtgtttttaatatgaagaggtgttgaattttattgaaggttttttttgtatttattgagataattatgtggtttttttgttattggttttgtttatgtgatggattatgtttattgatttgtatatgttgaaagagatttgtattttagggatgaagcggattcgattgtggtggataagttttttgttgtgttgttggattcgttttgttagtattttattgaggatttttgtattaatgttt

SEQ ID NO: 1619 - DNA, 6024 bp, Artificial Sequence
  chemically treated genomic DNA (Homo sapiens)
ttacgtagaaagataaaaagatgaattgatttaaatatttgtaataatttttgaagatatagatagtataataaaatataaatagaaataatagaaagttaaaaagtggggagatgaagttaaaatgtagaagttttattagttttttttttgtttatgtaattagtattaaattgtaattaatttttttaaaatgggttataagatattatttgtaatttttatggtaattttaaatttaaaaatatataatagatatataaaaaataaaaagtaagaaattaaattatattattagagaaaataatttttattaaaaggaagataggaaggaaggaaggaaagaaagaagagaagattataaaataattagaaaataaataataaaatggtaggagtaagtttttatttattaataataatattaaatgtaaatagattaaagtttttaattaaaagacgtaaaacgtggttaaaaggatgaaggagtaagatttgatgattcgttgtttataagaaatatattttatttataaaggtatataaagattgaaaataaaagggatgtaaagagatattttaagtaaatgaaaattaaaaaagagtaggagtggttatattaatattagataaaataaattttaagataaaaattataaaaaaagagatagagggagttattatatagtgataaaggggttaatttaataagaagatataataattataaatatataggtatttaatattagagtatttagatatataaagttaatattattagagttaaagagagagatagattttaataggataatagttggataatttaatattttatttttagattttgaaatagattatttagatagaaaattaatataggaatattagatttaatttgtattatagattaattggatttattagatatttataaaatatttaatttaatagttgtaaaatatatatttttttttttagtatatagattatttttaaggatatattagatgttaagttataaaataagttttaaaatatttaaaaaattgaaatagtattaagtatattttttgaatataatggaataaaattagaagttaataataagaggaattttggaaattttataaatatatggaatgtaaataatatgtttttgaataattggttggttaatgaagagattaaaagggaaattgaaaaattttttgaaataaattatgatggaaatataatatattaaaagttatgggttatagtaaaagtagttttaagaggttaatttatatagttttaagtgtttatattaaaaaagaagtaaatttttaaataaataatttgaaaataaacgtttgaagtaatggatattttatttattttgatgtagttattatatattatatgattgtattaaaatattttatgtaatttataaaaatatatatttattatgtatttataaaaattaaaaattaaaaaataagaagtttatagttaatgaagttgaaatgttagaaattttttggaatgataggaaggagtttagagatttagggaagtggatttgttggaatggatttagtttatttgttggatttgttggaatggatttagtttatgtgtaagttgttgggaggtttagggggatattttttttaatttaggtattaggaaatgttttgatgagttgtgggaggagggtaggatgtttaagagttttgtagtggttattttttatagattagtgatgatagtgggatatgatataattttatagtttttaaatttttgtgtattttaggattatttaatgggtttgttaaagtagtttgttatgttattattggtggtaattaaagtaattatgatatgttgatagattttatttttgtgtttttttttatggtgtatttaaaatatacgagtaatttaattttagaattttatttggaagttttattttatggggttaatttaatgttagtaagtgttttagtaagaaatagataatatttaaaatggaagatttggagaaaggtttagtaaagaagttatttataaagatgtaagtgggtgaaaagagattataggggtgtttggtattatgaggttattaagaatatggttagattgtaaaaaattttttcggttttgtaggatatttgtttattttgatgatagttttttttgttgtatagaagttttttagtttaattatattttatttgttaatttttgtttttgttgtaattgtttttgatatttttattatgaaatttttttttgtgtttatgttttgaatggtattgtttagagttttttttagggtttttatagttttgggttttatatttaagtttttaatttattttgattttatttttgtatgaggtgtaaggaaggggtttagttttagtgttttgtatacggttagttagtttttttagtattatttattaaatagggaattttttttttattgtttatttttgttaggtttgttaaagattagatggttgtagatgtgtagttttatttttgagatttttattttgttttattggtttgtgtgtttgtttttgtattagtattatattgttttggttattgtagttttgtagtatagtttgaagttaggtagtatgatatttttagttgtgttttttttgtttaagattgttttggttattttattgcggttttttagggagtgagggaaagggagagcgttaggataaatagttaatgtggatggagtttaatatttgggtgaggggttgataggtgtagtaaattattatggtatatgtttatttatgtaatagatttgtatattttgcgtatgtattttaaaatttaaaataaaataaaaattttttaaaaagaatatggttatatttttaaatttaaaaaggaaaaataggggatagtttagtaaatttggataggagagttatggagaaattattttgaaagaagttaaaattattagttgagggatgtatttaggttgaggaatatagggagataatagaggagaagaattttaatttaatttttttttttgttttaatgtttttagaagtttttttgtgtttaaatttagttagaagttagaaggttagtaattttattgatgtaatttattaagattggttttttagggtagagaatagaatggaaaagaatggaatgtgtgtttgaagggataagtttataatattttttttttaggtgagttttgatatatttttgtgttaaagttaggtaggttttaaaatgaattgagtggtgtataattttttgatattttttggaagagattgtataagattgaaatgattattttttttagtgtttggaggaattagttgtttgtgttttttgagtttagagaatgttttgtgggaagatttttaatttttgattttatttttttaatagttttagaatgattttttattttttatttatttgtgtattttggttagttagatttttaagaaatttatttattttttttaaattaaatttttggtataaggtttttattattttttttttggtgtttgtaggttttgtaattggttatatgtattttttttttttttttttttttttttttttttttttgggatagagttttattttgttatttagattggggtgtagtggtgtaattttggtttattgtaatttcggttttttaggtttaagtaatttttttgttttagttttttaagtagttgggattataggtatgtgttattatgtttgggtaatttttgtattttttttagtaaagatagggttttattatgttgtttaggttgttttagaatttttgattttaagtgattttttcgttttagttttttttttttttttttttttatttttagtttaggagagttttagtttaattataggttatagaattagttttgggttttatttattttttttaatatttattgttttttatttttttaattttagttttttattttttttttttatttttattgggtttattttgttatagtggaatgtagagggatgagtattttaggaaggtataaaaattgtgttaagttttggagttagggatgagtgggaaagggatatgtttaattattttaagttattttttttttattttttagtttttagatatgtgtttttcgtaggaggagtttaggaatgggttaaatattttatttttttgttttgagggttattttagtttttttattaatagttttagaaatttaatggttttttttggaaatacggggtttgtattaattagaggtgtttgaattatgtttttttgggtttgaggggtagaaggggatataatatgtaatgtaaggagtttttgttattagaaatttgatttaatttgttttagatattagatttttatataaaagttgatttggaaaaagatttttgttgttaaataaaagttgaaattgttttggtgataaaatataagtagattagtttttttttttagtttttttttttattttttataagattttggttaagttatttaatttttttgtattcgtttttttttttatgaaatgggtatgataataatggtatgtatttttttaaattaaatatataacgtgaatagagtttttagtatagtattttttttttataggagttaatttttattgttttttttttttttgttggagaaagtaagaagaaaatagtttttttatggttttttatggtgaatggttggggcgcgtttgtgttttttttttttttttggttttttgtggtttgaatagttagaaggaagttatgttatgttgttttagtttttagttttttttttgtattttttagaaaagtttttggtgtttagttttagtttagtagatttaggatttttttttattatgatttggttaacgttttgtttaggttaaggttttttgagagttttaagtttttttattttttataaaaggtcggcggaatagttagaggagtagagaggtaaagaaatattgtgaaatttttaatttttaatttttaatatgaaagtttttgtagtgtttttgtgtttgttgtttatgatagtagtttttaatttttagggatttgtttagttaggtaagttattttttttcgattttttttttttttttttttgtttttttatttaaggaagatttaagttcgagtgtttttttattttttttttagattgagttttattatgttgtttaggttgaagtgtaggggtgcgattttggtttattgtaatttttattttttaggtttaagcgatttttttgttttagttttttgagtagttgtgattataggtattcgttattacgtgtagttaatttttgtatttttagtagagaaggggttttattatgttggttaggttggttttaaatttttgattttaagtgattttttcgtttcggttttttaaagtgttgggattataggcgtgagttattaggtttagttaagtgttttatttttaagtttattagaatagtaaggttttttagaggtttattttaatatttaattttaaagatagaaagttgaagtttatgttggaggtagaagggattttagttatttatttttaggttattgtagagtaagaatgaaatttaagtttttgattttagatttagggttttttttttgattttatttgatcgttttaaattttgtagatttgggattatatttaggattttttttattggttttgttcgtggttttttttagatggttgtgatatgtttttattatgtagttgagtttttgagattttgaggtatatgttataggttttattttattttagggtttagggtgggagtgttgggtttgggggtgagtaagatttatttttttttttttgttttgtattttatatagatgttttttgttgtatttaagttgagaaaagtttaatatatttttaaagtttttttttttgtaattatttttaga

SEQ ID NO: 1620 - DNA, 6024 bp, Artificial Sequence
  chemically treated genomic DNA (Homo sapiens)
tttagaaatagttataaagaaaaagattttgaggatgtgttaggttttttttagtttgaatatagtagggagtatttgtatgggatgtaaagtaaagaggaagaagtagattttatttatttttaagtttagtatttttattttagattttgaggtgaggtgggatttgtgatatgtgttttaggattttaaaggtttagttgtatggtggagatatgttatagttatttaggggaggttacgggtaaggttagtgggaaaggttttgggtgtggttttagatttgtagagtttgggacgattagatgaggttaaagaaaaggttttaaatttggagttagaagtttaggttttatttttgttttgtaataatttggaggtggatggttagggttttttttgtttttaatatgggttttagttttttatttttaaaattagatgttaaagtgaatttttgaggagttttattattttggtgggtttagaagtggggtatttggttgggtttggtggtttacgtttgtaattttagtattttgggaggtcgagacgggaggattatttgaggttaagagtttgagattagtttggttaatatagtgaaattttttttttattaaaaatataaaaattagttgtacgtgatggcgggtgtttgtaattatagttatttagaaggttgaggtaagagaatcgtttgaatttgggaggtgaaggttgtaatgagttaagatcgtatttttgtattttagtttgggtaatataatgagatttaatttaaaaaaaaagtggaggagtattcgggtttaggttttttttgaatagagaaatagagggaaagagagggagagtcgaagggaggtgatttatttggttgagtaagtttttgggggttgaaagttgttgttatgagtagtaggtatagaagtattgtagagatttttatgttgaaggttaagagttggagattttataatgtttttttgtttttttgtttttttggttgtttcgtcggttttttatagggagtggagaagtttggaatttttagaggattttggtttgagtagggcgttgattaagttatgatgaagggggattttgaatttgttgagttggagttgggtattaaagatttttttaggaaatgtaagagggaagttgagggttgaaatagtatggtatggtttttttttggttgtttaggttataaggagttagagaggagaaagggatatagacgcgttttagttatttattatgggaagttataaaggagttgttttttttttattttttttaataggaaagagaaaaataatgaaaattaatttttgtagagaaagagtgttgtgttaaggattttgtttacgttatatatttagtttgaggaggtatatattattattattatgtttattttatagaagaggaaacggatgtagagagattaaataatttgattaaaattttatgggaaatgagagggaaagttagaagagaaagttggtttgtttatattttattattaaggtagttttaatttttgtttagtagtagaagtttttttttaagttaatttttatgtggaagtttaatatttgaaatagattaagttagatttttgatgataggggttttttatattatatattgtgtttttttttgttttttaggtttagagggatatggtttaaatatttttgattgatgtaggtttcgtgtttttaggaaggattattgggtttttagagttgttgatgggagggttggggtggtttttagagtaaagaagtgaggtgtttggtttatttttgggttttttttgcgaggggtatatatttgggagttgggaggtggggagggaatggtttaaaatggttgaatatgttttttttttatttatttttagttttaagatttggtatagtttttgtgtttttttggaatatttatttttttgtattttattatagtaaaataagtttagtgaaagtaaagggaagaaataaagagttaggattagagaaataggaaatagtaaatattagaaaggatagatgaagtttaaagttggttttgtagtttataattaagttaaaatttttttgaattgaaaatgaaaaaaaaaagaaaaaaggggttgaggcggggggattatttgaggttaagagttttagagtagtttggataatatggtaaaattttgtttttattaaaaaaaatataaaaattatttaggtatggtggtatatgtttgtaattttagttatttgggaggttgaggtaggagaattgtttgaatttgggaggtcgaggttatagtgagttaagattgtattattgtattttagtttgagtgatagagtaggattttgttttagaaaaaaaaaaaaagaaaagaaaaaaggaaaaaggtatatataattagttgtagagtttgtagatattaaaaagaaaatgataagaattttatgttaaaaatttagtttagaggaaatggatgaattttttaaaaatttaattgattagggtgtataaataaataaaaaatagaaagttattttaaagttattaaagaaatggaattaggaattgaaaatttttttataaaatattttttgggtttaaagggtataaatagttaatttttttaagtattgaaggaagtggttattttaattttgtgtaattttttttagagaatattaaaagattgtatattatttaatttattttgagatttatttaattttgatataaaaatgtgttaagatttatttgagaaaaggatattataagtttgtttttttagatatatattttatttttttttattttattttttgttttaggaagttaattttggtgggttatattagtgaggttgttgattttttagtttttgattgggtttaggtataagggagtttttgaggatattagagtagggagaagagttaagttgaggttttttttttttgttgtttttttgtgttttttaatttggatatattttttaattaatggttttaattttttttaaggtggtttttttatgatttttttatttaggtttgttgagttattttttgttttttttttttagatttaggaatataattatgttttttttaaaaaatttttattttattttaaattttgggatatatgcgtaggatgtgtaggtttgttatataggtaaatatgtgttatggtggtttgttgtatttattaattttttatttaagtattaagttttatttatattagttatttattttgacgtttttttttttttttattttttgagaggtcgtagtggaatagttaagataattttaaataaaaagaatatagttggaggtattatgttatttgattttaaattatattataaggttatagtaattaaaatagtatggtattggtataaaaatagatatatagattaatggaatagaatagagattttagaaataagattatatatttataattatttgatttttgataaatttgataaaaataagtaatggagaaaggattttttatttaataagtggtgttgggaaaattggttagtcgtatgtagaatattgaaattggattttttttttatattttatataaaaatgaaattaagatggattaaagatttaaatgtaaaatttaaaattataaaaattttagaagaaattttaggtaatattatttaaaatataggtataggaaaagattttatgatgaaaatgttaaaagtaattgtaataaaagtaaaaattggtaaatgggatataattaaattaaagagtttttgtatagtaaaagaaattattattagagtgaatagatattttatagaatcggagaaattttttgtagtttaattatgtttttaatagttttatggtattaaatatttttgtggtttttttttatttatttatatttttgtaaatagtttttttattaaatttttttttaagttttttattttaagtgttatttattttttgttgggatatttattgatattgaattggttttataaaatagaatttttaaatgggattttgggattggattgttcgtatgttttaggtgtattatggaaaggggtataggaataggatttgttaatatattatgattattttaattattattagtagtagtatggtagattgttttaataagtttattaggtgattttgaaatatataaaagtttgagaattatgggattatattatgttttattgttattattgatttataaagaatagttattatagagtttttaagtattttgttttttttttataatttattaaaatattttttaatatttggattgaagggagtgtttttttgggttttttagtagtttgtatatagattagatttattttaatagatttaatagatagattagatttattttaatagatttatttttttgagtttttggatttttttttgttattttagagaatttttggtattttaattttattaattgtaggttttttattttttaatttttaatttttgtgagtatataataggtgtgtatttttatgggttatatgagatattttgatgtagttatgtaatgtgtaataattatattaaagtaaatgggatatttattgttttaagcgtttatttttaggttgtttatttgaaggtttgttttttttttgatgtaggtatttagagttatataaattaattttttagaattgtttttgttgtaatttatagtttttggtatattgtgtttttattataatttgttttaagaaattttttagttttttttttaatttttttattgattaattagttgtttaggagtatattgtttatattttatgtgtttgtggagtttttaaaattttttttgttattgatttttagttttattttattgtgtttagagaatatatttgatattattttaattttttgaatgttttaagatttgttttgtggtttaatatttgatatatttttgagaatgatttatgtgttgaggagaaaaatgtgtattttgtagttgttggattaaatgttttgtaaatatttagtagatttaattggtttatagtgtagattaagtttgatgtttttatgttgattttttgtttggatgatttgttttagggtttgaaagtggggtgttaaattatttagttgttattttgttggagtttatttttttttttagttttaatgatattggttttatatatttgggtgttttagtgttgggtgtttatatatttataattgttatatttttttgttaaattgatttttttattattatataataattttttttgtttttttttttatggtttttgttttgaaatttattttgtttgatattagtatagttatttttgtttttttttggtttttatttgtttggagtatttttttgtattttttttgtttttagtttttgtgtgtttttataggtgaagtgtgttttttgtaggtaacggattattaggttttgtttttttatttttttagttacgttttacgttttttgattggagattttagtttgtttatatttaatgttattattaataagtaaggatttatttttgttattttgttatttgttttttggttgttttgtggttttttttttttttttttttttttttttttttattttttttttggtgaagattattttttttagtggtatgatttaattttttgttttttattttttgtgtatttgttgtgtgtttttagatttgaggttattatgagggttgtagatagtgttttataatttattttaaaaaaattgattataatttaatgttgattatataaataaagagaaaattgataaaatttttatattttaattttatttttttattttttaattttttgttgtttttgtttatattttattgtattatttatgtttttaaaagttgttgtagatatttggattagtttatttttttgtttttttacgtaa

SEQ ID NO: 1621 - DNA, 8234 bp, Artificial Sequence
  chemically treated genomic DNA (Homo sapiens)
gggaagattaggagtagggatttagaaaggagggttggtatttttttgaaattgtgtgtatagtaatattatataaatgaattatttattgagtattatagtattttattttatggtgtggtgagtaggatggagatgagatttaggattgtaggttttgtttaagagtttaagttgggattttttagttttgattaatgagatttgatttgggagattttaggttttattttattattttaaatgttttttagtttttaaataaatagattttgaatttttaggttttatatggttttgattttttattattgttttttaggattagtttttttttgtttttaaggatatggagtgagattagtttgtttttttatttttttaatttttttttttttgtcgttaagtaaaagagtggtttattttatttggggtatatttttttagggagattaggagtagtgttttgagttttttaagggtatttttttattggttttttgaggtttgggtttagtttgtttttagcgttatttgtgtttagtgagtgtagtattgtttgggtatgggttggggggaaatacgatagtgtggggtttattttaggttttttttttttagttgattttttagaataagttgtttttagagataattaaaattatttattatttttttattttatttatttttttttttagaaattggggggaaatcgaaggttgttaaaatatagttaaagttggtgggtatgtgtatagtttgatttgtttttttcgatgttatttgttagtttagaggaataaggtgggagagtataggagttttgattgggttttaggaaataggggttttttatgtcgttttttggatcgtgaggatgttgtttggaatggagttggaaaataggatgagatttttttatttagatatttggttatttttagtgatttttgaggttattgtgatgtatatttatgattttatgaagtagggttatataatatgtatatatttgatttttttattttataattataatatgtgtttgtttgtatagggtttttggtttataatgttttttttgttatttttataatttaagtttggggtggttgttgttattttgttttttttataaaagttatgaaattttttaattagaaaatagatgaaaaaattatttaatttagtgatttttaaaattttttagattataaaattttttttttaagtaatattttttatagaggtttaatatgtaaaatagaaaaaatgggttgagtagggtataagatattatttttaaatgtagtaaggtttttataatagtttttgaggtttttagagttttagggagtttagtgtaaaaattattgatgtagtttaagggttttatttatagaggagggaatagggggaaagtaaaatggttatagtatataggaagtataggtaaggttaggttaggatttgggtgttttgattttgtggtttttgtttttggggtttgttgtgggtattttgttttttttgtaggttgtcggtttaatggggatatgggtagggtggagtattaggaggggttgggtttgtatttttaaatggtatgtttttaaatttttattgggattttttttaaatattttttttatttggagtatttttttcgaataaggtatgaaggttgtatgatattggttaagtttttagttttttttgttagtcggtttttagagatggtgtaagaagatttgagtgtgttgttttttaattttggagttgaaagttatttattagtttttttaagaggggttgaagaaaaggaggaagggtgattgatgatgagggaggagaaaaagaagagtttaggagtattatggagaaggagaagagaagatgaggaaagtttatttttttttttaagttttgaggggttgtttttttttttttttttttttttatgtttttagtttgtaggagtagttaatggtatggtttttaataaggggtttttttttagtatttgatgttttttttttagggggattttattattttttagagtgttgttttatttatattatttataagatttcgcgttagcggattatggattattatgagattaatagttagtgttttaagttcggaattgtgtaggtggtatatatatattatattggggggagagggagttagtagggttttttggagggaagtagggagtggtggtggaatggggatttttagcgtattttttaggtgtgattatatggggagaggtagttgaggggtaatttgagcgttttttggttggagtttgtaggagttatggggaaattgattttatggatggggagatgatagagaagggagaagaaggtaagagggtatttttttagggggatatagagattagatgggtttaggggttttaggaatcgaagagtatgttttagagaggagattggttttaagttgtttttgtggaagaaaggaaaagtagtataggttaggtggggaatttaggagggagggaagatgggttgtttttttcggttattgggtttttcggtttgtgattttttttttttttgttttatagttttattattaaaaggggttatttcgtttgtattaattttagtgataagtgggtttaggattatattaaggatatgaaggagaattgagtgatttagaaggggtggcgaaggtatagtttagagatataaagagaagatgttaaggtttttttttttatttatcgttaatttttagttttagttatttttttggagtttttttgttttgaattaaagattatttatgtttttttttggttttatttttttttacgggatttatttattggttatgtattgaggatattagggtgtggtattttcggtattaagtttcgttttgtagaagttttgttggagtttggtataaaaaataggttaggtttgtaatgtaggtagtgagaagtagaaagtgagaaagaaaagtagtgtaaagatcgttttttttttagtaataatagtagtagatttcgtttttttaatgttttttatattttaagtattttgttaggtagtttgtatgtattattttatttaagttttatgataagtgtaaaagttataaattattatttgattttttaggtaatattttataaagggttttttatagtagttaaattttatagtttttttttttgtgttgtttttaaggtttttttttattgttgtttggaataggaatgatgtatgaagatattttatttaatttttttttttcgtttatatatattagattatattatattgttttattaatttttttattttttagaaggtttagtagaaagtttagtttatattaggtgtttaggaaatggatggatggatggatggatgaaggaagggaagaatgtgtggatggaaggatgaagggaaggaggaatggatggagggagggaagtagggagggatgaagggagggaggaagggaggaagggagggaggaagggagggagggatggatggatggatggagagaaagagggagggagggatagagggatagatggaataagatagaaattaagaggaggattatgttttaagaataagtttttaaatttatttttagggtttaaggaggagttttgtgtatttggaataagagtttgtttagagtagggattatgattatttttttttggtttttagttttttatagataaggaagggtttgtgggttatattaagggttatatgggggtttgtatgttaaagttataattaggttttttaggttttgttatttttataaatagaggttaagaggatgttttatatacgtattttttttgtttttataaaaagttatagttttattattaggtgaagttttgaatttattaggagtaattgtattatacggtttatttatttatgagtagttatgttaagtagaaagttttataaggatttgtatagtttttgtttttgtttttgttttttattgtttttaatatttgaaatatattatttatgtttttaaagtttgttgtttattaatagtaaaattttttatatttttgattttttttttaaatgtagtttttaatatggaaaagggttttgaggtatttgaagagagaggaagttgtgggataggtttagttagagtttaggttagaggggtagaagttggagttttggagtatagacgtaggttgttaggtgtatagagttggagggttttttgttggttatggttggttatgggggtatttaggagggattagcgagttggttatatttaaaaattagtttaaagttcgaggtttaaagagataaataaaaatattgataaataagttaaacggtttagtaataaatggggatttaaggattaggtatattgttttttttttttttggagtattagtatatattgtgatatgaaagagtgtgagtttaattatgtggttttggattgggagagggtattttttttttagaggtaattaagttttatttttgttttagtttgggttttgtaattttgttttgtgtttatttttttaagattgattatttgggggaagttggggtggtttaattttgtttgtttttttttaatatatagatggtggtaggtaatatggtgaaattaaatagatttggttttttattcgtttatttatttaggtgattttggataatttatttagtttttaggttttagtagttttagggaagtaataatcgttattttattattttaaggattatataagatagggtatgtaaggtagttgatatatattcgtttatttttttacgtgaatttagattttattgaatttagttttgtattaagttttattttttgttgttttttgttttagtaaatattgaggtttgttgtttttttttttttatcggttttgatgcggttaaggtttagagagttgagtagttggtaagcggattattagtaatagataatatttttattcggttttttttgaagttgtattgtttcgttgagaggatgaaggttttcgaggttgttttgtttttttttgtttttatttttattattatttcggtttttcgtagttagttaagtgagtttatttgtttttgtagggtaggaacgagaaagggggatggagtagttggtagggaggtagtgttaagggcgttgtcgggtttttggttttataagattttgtgggttttttttatttttatgtatagtttttgatttttaatttttttttttgtaagtagagttggggttggttcggatttttttggggtaagtagttttaggaaattgggttattatttttttaggagttttaagcgtggtgagtaggaatgattatttaggaggagaggttaagaaagtagtagaaaatgtaataagaagtgtatgtaatgaaagggagggggaggtacgcggatgagaaagaaaagtggtaggtgttttggaagaatgagtggcgagaggaaggaaggtttaaataattatgtgggtttaagtttaggaattgggagtttgaatcgagagagtttttttttaatatggttggtataggttgttgggattattagataattaaaatgagttttagtggaatggttgtttgggaatttatggtttttttttttattttttagtttatgattaaataaaatttgtagaaaagaggaaaggggttgaaaggttttggagttgtggggaaagggagaattggggtttatggaggagggggtttgttttgttttttcgtattttttttttttattattgtttacgaggatttggtgacgggggtggggaggataaagacgtgtatttgttttaggttgttttagttatttttttcgtttttgtttttttgtttgtttgtttgttgtgttttgttttgttttgttttgtttgtgatggagtttcgtttttgttgtttaggttggagcgtagtgtcgcgatttcggtttattataattttcgtttttcgagtttaagtgatttttttgttttagttttttgagtagttgggattataggtatatattattacgtttagttaatttttgtatttttagtagagacggggttttattatgttggttaggttggttttaaatttttgatttcgtgatttgtttatttcggttttttaaagtgttaggattataggtatgagttattatgtttggtttttttttttttttaaggttattttggtatgtagtttggtttgattttgtttgtgtaaatataaaggagtaagggttaagtgtattatgtaatttgtttatatatttttaggatgattttggtttttgtaaattttgttttgagaattagtgatatgagtattatttatagagggattgtgtgggaggggggaatagtgttttttgggagagttaattaggttagtgtagtgggtttaggttttaagaaagagaaaatggtttatttaaagtatggattagtaagatggtgtttttaagatgttttaagttttgttatttattggaggtaaaggggttaagttataaaaagatttgtattttgaaggtttgggggttgggagagatttttggattgattttttgtgtagtatttttaattgatgggtagttaggatagtttaaaggaaatatagtgataataattaattaagtttagtattttgtatatattaaagagatggggggaagcgttatttttaaggtaagaagagtagttattattattattggtttttaattataataagtattgattgagtttttttgtgtgttaggttttgagttaagggttttttaattatttttttatcgaattttaattatgattttaggatataagtaagtattatttatttttatttaatagatgaggaaattgaaatttagggagattaagaaatttgtttatgatttaagttaaaatttaaattaagttaaaattttaatttaagttgtttgattttaaagtttaaattatatattttttttttttgttttaatttttgtttttaaaggttttatttttttatttttttttttaattttcgtttttttaatatttttaagatagagtttaaattttttagtagtttagtaggtatgtgattagattttttttttttttttagttttatttttgtttatttatttttttttattttgtatgttagttatttaaattgtttagtatttttaagatatattgagttttttttatttttaggtttttttgtattttttttttttagattttataagttttttgtgtgtttaaattttttttttttttttttttgagatggagttattttttcgtttaggttggggtgtagtggcgtaattttggtttattgtaatttttgattttcgggtttaagtgatttttttgttttagtttttcgaatagttgggattataggtatgtgttattatgtttggttaatttttgttagtagagacggggttttattatgttggttaggttggttttaaatttttgattttaggtgattcgttcgtttcggttttttaaagtgttgggattataggtatgagttattatatttagtcgtgtgtttaaattttatttattttttacgaattaatgtaggttttatttgttttgagattttttttttaattattaaggatgggttaggggttttttattttgtttttatagtattttatgttaaagtttgttttattttggattatattttgtggtagtgtttgtttaattttttaattttttttttaattttgattagtttgtaagttatttaagggtagtgattgtattttttttatgtttttatttttatagagtttagtatataatattagtttaatatatgtttgttcgattaagttattaataaataaaagaatgagttagttttttttcggttttttggtaagtgtgaataattaagttatttgtagttgatatttagtttagaggttgagggttttaaatgtatgttttttaaagggatttattttatgtattttattattagttaagttattattggttttttttaatagacggttttgttattagaggagtgaaatataaatggtgggagatagaggtgggtagttgtggttttttttttgtttttttggtttagtttgtaatgtgatttttttaga

SEQ ID NO: 1622 - DNA, 8234 bp, Artificial Sequence
  chemically treated genomic DNA (Homo sapiens)
tttgaaggaattatattgtaagttgagttagggaagtagaggggagattatagttgtttatttttgttttttattatttgtgttttatttttttgatagtaaagtcgtttgttagaggagattaatgatagtttgattggtaatgaagtgtataagatgaatttttttgggggatatatatttagaatttttagtttttgagttgagtgttaattataaatgatttggttatttatatttgttaaggaatcgggaggaagttggtttatttttttgtttattggtgatttgatcgggtaaatatgtgttgagttagtattatatgttgggttttatgggggtaaaaatatgaggaagatatagttattatttttaagtaatttatagattagttagggttgaaagagaaattgaaaagttaaataaatattattatagaatgtggtttaggatagaatagattttggtataaggtgttatgggaatagaatgaagggtttttaatttatttttggtggttgaggaagaagttttaaagtaagtgaggtttgtattgattcgtaaaggatgagtaggatttagatatacggttgggtgtggtggtttatgtttgtaattttagtattttgggaggtcgaggcgggcggattatttgaggttagaagtttgagattagtttggttaatatggtgaaatttcgtttttattaataaaaattagttaggtatggtggtatatgtttgtaattttagttattcgggaggttgaggtaggagaattatttaaattcgggagttagaggttgtaatgagttaagattgcgttattgtattttagtttgggcgaaagagtgattttattttaaaagaaaaaaaaaaaaggatttagatatataaaggatttgtagaatttggaagaaagaaatgtaggaaagtttgaaggtaggggaagtttagtgtgttttgggagtgttgggtagtttgggtggttggtatgtaaggtaggaagaaatgaatgggtagagatgaaattggagagaggaggagggtttggttatatatttgttgagttattgaggaatttggattttattttagaggtattggagaggcggaggttagggggaagggtgagagagtagagtttttagagatagaagttagagtaggaggaaaaagtatatgatttaggttttggggttagatagtttgggttggaattttgatttgatttgaattttgatttgaattatgggtaaattttttaatttttttaggttttagtttttttatttattaagtgggggtaaatgatatttatttgtattttaggattatggttagaattcggtgagaaaatgattggaaagtttttaatttagagtttggtatatagaaaggtttaattagtgtttattataattaagagttaatggtagtaatgattgttttttttgttttggaaatggcgtttttttttatttttttgatgtatgtaggatattggatttgattggttattgttattgtgttttttttgagttgttttgattatttattaattggggatattatataagaggttagtttagagattttttttagtttttaaatttttagagtgtaaatttttttgtagtttgatttttttgtttttagtgagtggtaaagtttgggatattttgagagtattattttgttgatttatgttttgggtgggttatttttttttttttgaagtttgaatttattgtattggtttgattgatttttttaaagagtattgttttttttttttatatagtttttttgtaagtgatgtttatattattggtttttaaagtaaagtttataaagattagggttattttgagagtatgtgggtagattatatggtgtatttgatttttgtttttttgtgtttatataggtagagttaggttagattatatgttagggtgattttaagagagaaaagaggttaggtatggtggtttatatttgtaattttagtattttgggaggtcgaggtgggtagattacgaggttaggagtttgagattagtttgattaatatggtgaaatttcgtttttattaaaaatataaaaattagttgggcgtggtggtgtgtgtttgtgattttagttatttaggaggttgaggtaggagaattatttgaattcgggaggcggaggttgtggtgagtcgagatcgcgatattgcgttttaatttgggtaataagagcgaaattttattataaataaaataaaataaaataaaatataataagtaaataaataaaaaaataaaagcgaaaagaatggttggggtagtttagggtaggtatacgtttttgttttttttattttcgttattaggttttcgtaaataatgatagagggaggagatacggaggggtaaaataaatttttttttttataggttttaattttttttttttttatagttttaaaattttttaatttttttttttttttttgtagattttatttagttataggttgggggatggagaaggggattatagatttttaagtagttattttattgggatttattttggttgtttgatagttttagtaatttgtgttagttatgttgaggaagggttttttcggtttagatttttaatttttggatttagatttatatgattgtttgaatttttttttttttcgttatttatttttttagggtatttgttattttttttttttattcgcgtgttttttttttttttttattgtatgtattttttgttgtattttttgttgtttttttggtttttttttttgaatgattatttttgtttattacgtttgggatttttgaggaaatggtgatttagttttttggaattatttattttagaaagattcggattaattttagttttatttataaaggggagaattggaggttagaagttatgtatgaaggtggggagagtttatagggttttatgaggttagagattcgatagcgtttttggtattatttttttgttagttgttttatttttttttttcgtttttgttttatagagataagtggatttatttggttggttgcgagaagtcgaagtaatgataaggatgaggataaggagagatagggtagtttcggagatttttatttttttagcgaggtagtatagttttagggagagtcgaatgaagatgttgtttgttgttggtggttcgtttgttaattatttagttttttggattttgatcgtattagagtcggtagaggaggagaaataataggttttagtgtttgttgaaatagagggtagtagaggatgggatttggtgtagagttgaatttagtagaatttgaatttacgtgaagaaatgggcgaatgtgtgttagttattttatatgttttattttatataatttttaaaatagtgaagtagcgattattatttttttgggattattgaggtttagaggttaaataaattgtttaaggttatttgggtggataggcggatgaaaaattagatttgtttgattttattatgttatttgttattatttgtatgttggggaagggtaggtagggttgaattattttagttttttttaggtgattagttttggggagatgagtataaagtaggattatagagtttagattgaggtaaaggtagggtttagttgtttttgagaaggaaatgtttttttttagtttaaggttatatgattgagtttatatttttttatgttatagtgtatgttaatattttaaaaaaaaaaaaaataatgtgtttgatttttgggtttttatttgttgttggatcgtttgatttatttgttaatgtttttatttatttttttggatttcggattttggattgatttttaggtgtagttagttcgttgattttttttgggtgtttttatggttaattatgattagtaggggattttttaattttgtgtatttgataatttgcgtttgtgttttaggattttagtttttgtttttttggtttgggttttggttggatttgttttatagttttttttttttttaggtgttttaggatttttttttatgttgaaagttgtatttagagaagagattaaagatataagggattttgttgttgatggatagtaagttttagaggtataggtgatgtgttttaggtgttgagggtagtgggaggtaggggtagaaatagggattgtgtagatttttatggggttttttgtttggtatgattgtttatagataggtaaatcgtataatgtagttatttttggtgggtttaaggttttatttggtggtgaagttgtggttttttgtgagggtagggagggtacgtatgtggggtatttttttgatttttgtttatggaggtgataaggtttgagaagtttggttgtgattttggtatgtaggtttttatatggtttttaatgtggtttataagtttttttttatttgtggaaggttggaggttaggaaagggtggttataatttttattttgggtaagtttttattttaagtatatagagtttttttttgggttttgaagataggtttgagagtttatttttggagtatagttttttttttgatttttgttttattttatttgtttttttatttttttttttttttttttttttatttatttatttatttttttttttttttttttttttttttttttttttttttttttttttatttttttttgtttttttttttttatttatttttttttttttttatttttttatttatatatttttttttttttttatttatttatttatttatttattttttgaatatttggtatgggttaggttttttgttaagttttttaggggataaaaaagttagtaaaataatatagtataatttgatgtgtgtaagcgaaggggaggggttggataaaatgtttttatgtattatttttattttagatagtagtgaagaaaggttttgaaaatagtatagaaaaaaggattatggagtttgattgttatagagagttttttatgaagtgttatttaaaaaattaaatgatgatttgtagtttttatatttgttatgaagtttaaataagataatgtatatagattgtttagtagagtgtttggagtatagaaagtattaagaaaacggggtttgttattgttgttgttgaggaggagacggtttttatattgttttttttttttattttttgttttttattatttgtattgtaggtttgatttattttttgtattaggttttagtaaaatttttgtagagcgaggtttgatgtcgagggtgttatattttggtgtttttagtgtatggttaatgagtaaatttcgtagaaaggaatgaggttagggaagagtatgagtggtttttaatttaaagtagggaagttttaagagggtgattggggttgagagttagcggtgggtggaggagggggttttggtattttttttttatgtttttgagttgtgttttcgttattttttttgggttatttagtttttttttatgtttttgatatagttttggatttatttgttattggggttggtatagacggaatggttttttttggtgatgaagttgtggagtaagagggagaaggattataaatcgaggggtttagtggtcggaagagatagtttatttttttttttttttaaattttttatttgatttatattgtttttttttttttttatagaggtagtttagagttagttttttttttgagatatatttttcggtttttaggatttttagatttatttagtttttgtgtttttttgaggaagtgtttttttgttttttttttttttttttgttatttttttatttatggggttagtttttttatggtttttgtaggttttagttagaaagcgtttagattgttttttagttgtttttttttatgtagttatatttgggaggtacgttgggggtttttattttattattattttttgtttttttttaggaggttttgttggttttttttttttttagtgtgatgtgtgtgtattatttatataatttcgggtttggagtattggttgttggttttatagtaatttataattcgttgacgcgggattttgtaggtagtgtaggtgaagtagtattttgaggggtggtaaggtttttttgaggagagagtattagatgttgaggaggggttttttgttaaaggttatattattggttgtttttgtaagttgagggtatggaggagggaaggaaggaggagatagttttttagaatttggaggggagagtaggttttttttatttttttttttttttttttatggtatttttgggtttttttttttttttttttttattattaattattttttttttttttttttaattttttttggaaagattggtggatgatttttaattttaggattgaagagtagtatatttagatttttttatattatttttgggggtcgattggtagagaaggttagggatttggttaatattatgtagtttttatgttttattcgggaaaggtgttttaaataggaggaatatttggaagaaattttaatagggatttggagatatgttatttgggaatgtaaatttagttttttttagtgttttattttgtttatgtttttattgaatcgataatttgtagagagagtaggatgtttatagtaagttttaaggataaaggttatagagttagggtatttaaattttaatttaattttgtttgtgttttttgtgtattgtggttattttattttttttttgtttttttttttgtaaatgaggtttttggattgtattagtggtttttatattgagttttttggagttttgggggttttagggattattgtggaggttttgttgtatttgagagtggtgttttgtattttatttaatttattttttttgttttatatattgggtttttgtggaagatattgtttgaagaaaaggttttgtggtttaaaaagttttaaaaattattggattgggtgatttttttatttattttttgattgagaagttttatggtttttataggagaagtaaggtgatagtagttattttaagtttgaattatagaggtagtaggaaggatattgtaggttaagagttttgtataaataggtatatgttgtggttatggagtggagaaattaggtgtgtgtatgttatgtgattttgttttatagaattatggatgtgtattataatggttttagaggttattgagggtggttagatgtttgggtggaagggttttattttgttttttagttttattttaggtagtatttttacgatttaaagaacggtataaggggtttttgttttttgagatttagttagagtttttatatttttttattttgtttttttgagttgataaatgatatcggagagggtaagttaaattgtgtatatatttattaattttagttgtattttaataattttcggtttttttttagtttttgaaaaggagagtaggtaaaatggaagagtgataaatagttttggttatttttaaaggtagtttattttaagaaattagttgagaaaagggggtttaggatggattttatattgtcgtgtttttttttagtttatatttaagtaatgttgtatttattgggtataggtgacgttggaagtaggttgggtttaaattttaggaggttaatagaaaaatgtttttgaggggtttaagatattgtttttaatttttttgaggaaatatattttaaatggggtgggttatttttttgtttagcggtaaagagagagaaattgagggagtagagaggtaggttggttttattttatgtttttgagggtaaggggggattggttttggggggtaatgataagagattaaggttatgtgaggtttggagatttaggatttgtttatttggagattagagggtatttggggtagtggaatgaagtttggagttttttaagttaagttttattggttaaggttggaagattttaatttaaatttttaagtagaatttatagttttaagttttatttttattttgtttattatattatggggtgaagtgttgtggtgtttagtagataatttatttatataatgttgttatatatataattttaagaagatattagtttttttttttgagtttttgtttttggttttttt

SEQ ID NO: 1623 - DNA, 5936 bp, Artificial Sequence
  chemically treated genomic DNA (Homo sapiens)
gattttaagtgatttgttttttatagttttttaaaatgttgggattataggcgtgagttattgtgtttggtttaattttattttttttattggaattttattagtataattagaaatggttagtgaggttttggttttaatatagtattatagtaataatatagtaattattatttgtaattattatttgtgattatagtaagtaagtgttttaggtattttattttttaatgttttgatttttaatattttatttatgttttacgagtgatagtttaagtgattgtgatgtttttacgtgttttagattatttgtgttttttttttttaattatagagattatttatgtttttattaagggtaagttaattttagaattttattttgggaatttatgttttggtattgttaattatattagtgaggattttggtaggaaatagatagtatattttaaggatatagggaaaattatgtttttttattttttatttttttttattatttaatatttttgtgatttttgggtatttataagtgtgtggggatttttttttattaagaaattatttggtagatagttttttagtggatattagatgggtgttttttaatttagtttaattttgatattatttatttggaggtagtattagattttataagttgagggtttagttttataagattgtttttttattttagatattaattgtaagtatagagtgtggtttatgtttttgattgattagttataaataagggtttttataatttatttggggtttaattaatttgttatagcggtttatagaagttagagaaatatttatttatgtttatttatttattataaaggatattataaagaatagataaatagttagatgaaagggatgtatagagtgaggtatggggaaaaaaaggtgtggagtttttatgttttttttgggtatttttttttagaatttttatgtttttagttatttagaagtttttattttaatttagttttttcgggtttttaatggaagtattagtatttaggtataattgattatattattagttattggtttattaatttaagttttaatttttttttttttatttagaggtggggagtgggtgggattttttattattatagaatgttagagaatgttttaattttttaattatgtggttggtttttttgttgattagtttttatttagaggttgtttagaggtttttagttattagttattttattagtatataaaagatataattttttttaagattttaaggattttaggagttatatgttagaaaaggaagatgaagattagatatatattttataatattatatatatttaaaaaaaatttaattggaaagattttaataaagggataatttaagagattaggttaggattaaggaattaatatgggatgataggtagttggggtttagtaatggtgagaaattattattatataaaggtttgaaggggtaagaggagggaatagtgtttttaaagtttgttattttagtattttgggaggtcgaggcgggtggattatttgaggttaggaatttgagattagattggttaatatggtgaaattttatttgtattaaaagtataaaaattaggtcgggtatggtggtttacgtttgtaatttttgtattttgggaggttaaagtaggtggattatttgaggttaggagtttaagattagtttggttaatatgatgaaattttatttttattaaaaatataaaaaatttagttgggtgtggtggcgggtttttgtaattttagttatttaggaggttgaggtagtagaatcgtttgaatttaggaggcggaggttgtagtgagttgagattgtgttattgtattttagtttgggtgataagggtgaaattttattttaaaaaaaaaaattagttaagcgtggtggtgcgtgtttttaattttagttattcgggtggttgaggtaagagaattatttgaatataggaggtagaggttgtagttagttgagattgtgttattgtattagagtttgggtgatatattgagattttgtattaaaaaaaaaaaaaaaaaaaaaaaaaaaagaatagagatagattcgtggaagggaggtaatttaaaaggattattgtagattagtgggttttaatttgtagattattttgggaggttaaggtgagttttgggatttttttgttttagttttttgagtagttgagtagttaggagttgagatggggttttattatgttggttaggtttgttttaaatttttgttttggataaataaaatttaggaagtttattaatagtatatttgtttataagaaaagttaaagggagaaagaaaaaataaaaaataaataaagaaatgttaaagggagatttttagaatgaaataaaaggataaaaagtaataatttatagttatataaagaaataaagatttttgataaatataataatatagtaggttaggcgtaatgaattttttggatatgtatatatatattttttattagattttagatgttttgttattatttttttaatttttttaatgttttgttttttttattttttttttgagatttttgtgatgaggtatatttgatggtatttttgaggttcgtttggattttaaattttagtatatattagagttatttggagggtatgtgaaaatgtagtttgttggattttatttttagagttttagatgtggtaagtgggaagtaaaatttaagaattcgtgtttttaataagtttttaagtgatgttgttgttgttgtttaaaggttattttttgagaataattgttataggggaaattatttattgttagaattgtagtaagatgaaggatttggggaattaatatttttttttttttttattattgattagttgttgttttttatgggttagttttaaatagaagttagaaagtaggtgattttaagtaatgttatttgtagaggttagttttttagggagtagagtagggtcgtgaagagtggagaatggataggttggggtaaatagaataattagaattattatggatagaagaatggatagattaatggaaagaggggtggatggatgaattaatgaatagatatttgaataaaaggatagaaggttaggtacggtggtttacgtttgtaattttaatattttgggaagcggaggtaagtagattatttgaagttaggagttcgaaattaggagttcgaaattagtttagttaataaggtgaaattttatttttattaaaaatattaaatttagtcgggtatgatggtgggtgtttgtaattttagttatttaggaggttgaggtaggagaattttttgagtttaggaggtggaggttgttttgagttaagatcgtgttattgtattttagtttgggtgatagagtgagattttgttttaaaaaaaaaaaaaaaaaaaggataaaagaagaataatggttaatagagtttattgtgcgttagtttttaagttaagggttttatttagggttttttatttaattttaagaagtagattttttattatttttattttataaataaggatattaagatatagaaattggagaatttttattttgtcgtagttagtaagtggtggaatttgaattttaagttaggcgttttgtttgtagagttttttttttttgtatcgtgattattcgtgttgtgttatgattaagtggtagataggcggtgtggagtggaggtaaagattgtaaattttagagtatatttgggtttaaattatgttttagtatttattagttgtgtggttttgtgttttgagttttatgttttttatgtgtaaaataagaataataatgtgaaaataagaaaaattatattaatggtattgttttgggaaagttaagtaaggtaatagtggtaaagtttttgatatagagtttagtatatagtaaataattaaaaatattattattattattatgattaatgaatggaaagaagttaagttagaaatttaagagggaaatgttttttttttttttttttatttaaaagagggtttagggtttgggtgacgacgggtgattgggcgttttatatttagttttttttttaaggtttttttttttgattttttttataaggatgggaagttatttgtttttttttttatcggtcgattttttgaaattttaagatttgtttgaatatgagttggttagtttttttttttagaaatttttttttggtttttaggattgagaaaagggggaaaatgaagggggttattttaagttagtttttttttagttgtttttttgatttaggtgttggatataggaaaatagtaaatagaggaaggggagggtttgttgagttttagaggtttgagatgtgggatgggggttttgggtttttttttaaggtatttggttttttagttttgtttgttttaagggaaggattggtttttatatagtgggtaggtatagtgatgattttggaggttattttaggattttatggttgttttgagggtgttagggagttttttttattattagtttaagaaagaagtattagtgaggataagggataaatttaaggaagggagtatagttttttattgtgggttttatttttgattattatttttgaattttagttttatggttgatgatgtaaatgttattaatgggatgatagggtaatttttttttttggagaaatagtgtatagttttttttattgggttagattgtagatttaagtttttagagtaggagttaaggaaagtagaaggaaagggtaatcgtagggggaagaaggggggtagggtgcgattttgttagaaagaggggggtaataggggaattatagaatgggatatgaaggggaattttaggtagagaaagtgaagttttggttataaataggagttagttgtagggtttatatttttagttttatattatttatattttgtattttatttttgtattttagtcgttttgtagttttatatagattttgtatatatttagatagttggcgtttatatatttatcgttggtttgtttttgtttattttttatggttttgttattggtttttagtttgttggttttttggatttttttaggtaaggttgaagggagagttagggttagaggtagtggggggttggtagtgggtaatgtttagattttagattgtttggtattggacgtaagggatatggtgagtttaggtaaatgtttaggtttgtatatttcggtgagtttggtaggtttttgtatgtgtgtttgtaagtgtgggtgtttttgtgtttttgaattttaatgcgggtgtgttttttagtatattttggggtttatggttgtgattgtttttgtaagttttattttttgttgttttcgttttttaggtagaaggagatttgtttaaggtagggagaatggtagatattaagttaaggttgatatttaaaaattttagtaattaataaggtttttaatattagtttattttattttacgttttttttatattgtgatttgtattaattttttatttgttggattgttttgggagagaggttggggtgattagggtagtaggaagttatttgtggggtttagggtagtggttatttataaaatagtttagaagtatgataatatatttagtaattagtagagttagagttatattggtgtataatggttgaatattaggtttaattttttttcgattttattagatatatatatatatatatatatatatatatatatatatatatataggtgtttttaattcgagttagggttatggttatgttatttttaagggtttttgtgttttgttattttttttttttattttagt

SEQ ID NO: 1624 - DNA, 5936 bp, Artificial Sequence
  chemically treated genomic DNA (Homo sapiens)
gttgggatggggaaagaaggtgataggatatagggatttttgagggtggtatggttatggttttagttcggattgaggatatttgtgtgtgtgtgtgtgtgtgtgtgtgtgtgtgtgtgtgtgtgtgtttggtggggtcggggaggagttagatttggtatttagttattatgtattaatatggttttggttttattggttgttaaatatattgttatatttttaaattgttttgtaaataattattgttttgagttttataaatgattttttgttgttttgattattttaattttttttttaggataatttagtaagtaaagagttaatgtaggttatagtgtgggaggggcgtggggtagggtaggttggtgttaggagttttattaattgttaaaatttttgaatattagttttggtttagtgtttgttattttttttattttaagtaaatttttttttgtttgggaaacggaggtagtaggaaatagagtttgtagagatagttatagttataggttttaggatgtgttaaaagatatattcgtattgggatttaggggtatagggatatttatatttataggtatatatgtagggatttgttaggtttatcgaaatatatagatttaagtatttgtttgaatttattatgttttttacgtttagtgttaagtaatttgagatttagatattatttattgttagttttttattgtttttgattttgattttttttttagttttatttggggaagtttagagaattagtaggttgagggttagtagtagggttatggagggtgaatagaggtaggttaacggtgaatgtgtgagcgttagttgtttgggtgtgtgtaggatttgtgtgaggttgtagggcgattgggatgtaggggtgaaatgtaaggtgtgagtgatgtgaggttgggaatgtgagttttgtagttgatttttatttatggttagagttttattttttttgtttgaaatttttttttatgttttattttgtgatttttttgttgtttttttttttttggtagaatcgtattttgtttttttttttttttttgcggttgttttttttttttgttttttttggtttttgttttgagaatttaagtttgtagtttggtttagtaaagggggttgtgtattgtttttttagagagagggattgttttgttattttattgatggtatttgtattattaattatgaagttggggtttagaagtgatggttaaaggtggggtttatagtgaggaattgtgtttttttttttaggtttattttttgtttttattggtgttttttttttgggttggtggtgaagaaggttttttggtatttttaggataattatgagattttggggtggtttttaaggttattattgtgtttgtttattatgtgggaattagttttttttttggggtaagtagagttgaaaggttaggtattttgggaggaggtttaggatttttattttatattttaggtttttggggtttagtaaatttttttttttttttatttattgtttttttatgtttaatatttgggttaaaggaatagttggagggagattggtttggaatagttttttttattttttttttttttttagttttgggaattaagaggggatttttaaggagaggggttggttagtttatatttagataaattttaaaattttaaggaatcggtcgatgggggaggggataagtgattttttatttttatgagaaaggttagaagagaaggttttgaaagagaaattaaatgtgaaacgtttagttattcgtcgttatttaaattttagatttttttttggatggagagagggagggggaatattttttttttaaatttttgatttagtttttttttatttattaattataataatagtaatggtatttttgattgtttattatgtgttaggttttatgttaaggattttattattattattttgtttaatttttttaaaataatattattgatgtagttttttttatttttatattattatttttattttatatataaggaatatgaggtttagagtataaagttatatagttagtaagtattggagtatgatttggatttaggtgtgttttagggtttgtagtttttatttttattttatatcgtttgtttgttatttggttatggtatagtacgggtagttacggtgtagaggagggagattttgtagatagagcgtttagtttgggatttagattttattatttattaattgcgataaggtgaaaattttttagtttttgtgttttagtgtttttatttgtaaaatgggaatggtagaagatttattttttaggattaagtgaggaattttgagtaaagtttttagtttagaggttgacgtataataagttttgttagttattgttttttttttgttttttttttttttttttttttgagatagagttttattttgttatttaggttggagtataatggtacgattttggtttagagtaatttttattttttgggtttaagggatttttttgttttagttttttgagtagttgggattataggtatttattattatgttcggttaaatttggtatttttagtagaggtgaggttttattttgttggttaggttggtttcgaatttttggtttcgaatttttgattttaaatgatttgtttgttttcgttttttaaagtgttgggattataggcgtgagttatcgtgtttggttttttatttttttatttaggtatttgtttattaatttatttatttatttttttttttattgatttatttatttttttgtttatgatggttttggttattttgtttgttttagtttatttattttttattttttacggttttgttttgttttttggaaggttgatttttgtagatagtattatttagggttatttgttttttggtttttgtttggggttggtttatgggaagtagtaattgattagtggtggaaggagagaggggtattaattttttaaattttttattttgttgtagttttggtagtgaataattttttttgtggtagttgtttttaaagagtagtttttgggtagtagtagtagtattatttgggagtttgttagaaatacgaatttttagattttattttttatttattatatttgagattttgaggatggggtttagtaaattgtatttttatatattttttaagtgattttgatatgtgttaaagtttgagatttaaacgagttttagggatattattaaatatattttattataggagttttaggaggagaatagagagaatagggtattaaaaaaattgaagaaataatgataaaatatttgaaatttgatgaaaagtatgtatatatatatttaagaagtttattacgtttggtttgttatgttgttatgtttattagagatttttgtttttttgtgtggttgtaagttattattttttgtttttttgttttattttgaaggtttttttttagtatttttttgtttgttttttgttttttttttttttttttagttttttttatgggtagatgtattattaatgaattttttaagttttgtttatttagaataggagtttgagataagtttggttaatatggtgaaattttattttaatttttgattatttagttatttaggaggttgaggtaggagaattttaaggtttattttggttttttaaagtggtttatagattgaggtttattgatttatagtgatttttttgggttgttttttttttacgggtttatttttatttttttttttttttttttttttttttttttgatatagagttttaatatgttatttaggttttagtgtagtggtatagttttagttaattgtagtttttgttttttatgtttaagtaatttttttgttttagttattcgagtagttgggattagaggtacgtattattacgtttggttaatttttttttttgagatggagttttatttttgttatttaggttggagtgtaatggtataattttagtttattgtaattttcgttttttgggtttaagcgattttgttgttttagttttttgagtagttgggattatagggattcgttattatatttagttaagttttttgtatttttagtagagatggggttttattatgttggttaggttggttttgaatttttgattttaggtgatttatttgttttggttttttaaagtgtagggattataggcgtgagttattatgttcggtttaatttttgtatttttaatatagatgagattttattatgttggttagtttggttttaaatttttgattttaggtgatttattcgtttcggttttttaaagtgttgggatgataggttttggaaatattgttttttttttttgtttttttaagtttttgtatgataatggttttttattattgttagattttaattgtttattattttatgttagttttttaattttgatttaattttttaaattgtttttttattaaaatttttttagttaaattttttttgagtgtatgtgatattgtgaaatatatatttggtttttattttttttttttgatatatagtttttaaaatttttggaattttgggagagattgtgttttttgtatgttaatgagataattggtggttgggggtttttagatagtttttggatgggagttagttagtagaagaattagttatatggttagagagttggaatattttttaatattttgtagtggtggggagttttatttattttttatttttgggtaggggaagaggggttgaaatttgagttgataaattaatggttgatgatgtaattaattatatttaggtattgatatttttattaaaaattcgaaaggattaagttggggtgggggtttttggatagttgaaaatatggaggttttggaggagggtgtttagagagggtatgaaagttttatatttttttttttttatattttattttatgtattttttttatttggttgtttatttgttttttgtaatattttttataataaatgggtaagtataagtaagtgtttttttgatttttgtgagtcgttgtagtaaattaattgaattttaggtgggttgtggaaatttttatttatagttggttagttagaagtataggttatattttgtgtttgtaattggtatttgaagtaggggggtagttttgtggaattgaatttttaatttgtgggatttgatgttatttttaggtaaatgatgttagaattgaattgaattaggggatatttatttggtgtttattgaggaattgtttgttagataattttttggtggggagaaatttttatatatttatgggtatttagaggttatagaagtattgagtggtgagagggagtagagagtagggaaatatggttttttttgtatttttggagtgtgttatttgttttttgttagggtttttattgatataattggtagtattaggatatagatttttaaaatgggattttaggattggtttgtttttgatgagggtatggatggtttttgtggttggaaaaagaagatataagtaatttggagtacgtagaagtattatagttatttagattattattcgtgaggtatggatgaaatgttggaagttaagatattaggagataaagtatttgaggtatttatttattatggttataaatgatgattgtaaatggtgattattatattgttattatagtattatattgaggttagaattttattggttatttttgattgtgttagtaaaattttaataaaaaagataaggttaggttaggtatagtggtttacgtttgtaattttaatattttgggaggttgtggggggtagattatttgaggtt

SEQ ID NO: 1625 - DNA, 5926 bp, Artificial Sequence
  chemically treated genomic DNA (Homo sapiens)
aggttgaggtaggagaattttttgaatttaggaggcgtaggttgtagtgagtagagatagtgttattgtattttagtttgggtgatagagtgagattttgttttaaaaaaataaaataaaataaaaaatgtagattgtgatttagtaggtttgggttgaagtttagaattttttgataaatttaatggtatttaattatttggaggttatggatgtttttgttaatttaatagaagttattgattttttttttagaaaaatgtataaaaatataaatgtggaagataatttttgatggatttgggagtttatttaagggttatagataagagttttggtttggataaaatgagttgtttagtatttttttatttggttagtattttttatttaaagataaatgttaaagttgttttagtagagttatgtattagtagtagtattattatttgggaatcggttagtaatgtagaatcgtaggtttattttaaatttatagttagaatttttattttagtaagattttaaggagatgggtaagtatattataatttgtaatttttgtaagtttgtttaaaatgtgattttttttttatttatcgatcgttaaggtttaaaaatttgtttaatttttgagtttattttaaatgtattattacgagttttttttgggttttttagttgggatttttatcgttttgtatttttttggttaatgtaattattttgtttttttagatgattttagtataggtgttaaaggagttaataaaaggttattgttaaaaaagtgtttttgtttttattttatttgatttttgtttttttaagatttgtttattttttttttttagttcggtattttgatttttttattatattgtttaggttattttgtataatgtaagttttaaatgaggaaagtatttttttttttaatgtgtaatacgaaagtgttgtagagtggtttacgttgtttttagtttaagaatttatttaatttttatttttaatttatattagttttttttttttagggtttaggtgttaatttgtgagggttggtttagaagataatttaaagaataagttttttgtttttttaggtattattattttttattattattatttttatttattaatttaggttattattttttttgtttttatatgttatgtttatcgttatttttatttttatgtttaggagtatttttggttattgtatgtaattagatttggggtagatttaatttagaaagtaagaaattttagatgttggaagtttggggtaagtattgattagatttatttttaaatttagttttattttttatggatttttattttagtattttttttgaaaaggaagtattatgtttaatttatttttttttttttgtgtagttttttatttggtgttttgtatagggtatgtgttaattgtatgaatgttataataaagagatagtgtagtagatgataaagggtattatattgagagtttagaaataagtaaattagtataaatgtagttattcgttttttattttattttgagtttgttattaatttgtttatggttttagtttttttattagagaaataggtagatggtttttaaggtttcgtttattttttgatattttgtgaaaaattaaggaaagatttttatttttgataggaaagggattgtagagtagcggttttgggaaaatgggttttattttatttggagttagtttggaggagaggttttgagtgggggttgtttagaaaggatatggtgagtgtagagttacggtgtattttttttgaaggttgagtgaagggagtattagtaagggagtttgtattaggtggggagggataagtgaatcgtagaagttggtgggagtttaggtagtggttttagatttttttagagagtttatttttatttttttttttttttatttttgatattgagtgggagtttgtagcgatgattaaggtttatgtagaggattttagtggtggggttagatttcgggaggaatgaagaaagtattatttattaagaggagtttttttattttttatttatgagttgatagagaggaggtttcggggtaattgaggattttggatagtattagagtattgatttttattttttttatagtttttttgggggttttttttttgtgtgtttttaagcgagagtttaatttaggtttgtgttagagtttaatttaggtttgtgtcgagatgtttttagtatagttttatgtgagagttttttggtttcgggtttagtatttggaatgtaggttttagttaaatgtatttttttttacgggatttgggaatttttaaagttgtttttttagagtgggaatttttatttattttttttacgttagtattgattttttagcgggggagggtatttttttttgatagagtagaagtgggaggtagatagttattattttttagaagatttttttttttgatttatattttttattttttttgtgtttattgtttgatatatgtaaaggttaagttattttttagagatgataatttttttttgaagtagagatatgtttttaatatttagaagtttatgtgaatatttagttagtaaagttgggaagtttttttttgtgattatgggttaattggtttttttttttggattgtggttttattagataaaaataagtggttatgttataggatgtttataagtttattgattttgggattttatgagtgatgttgatatgattaagttaggagagatttatttaaagattttagtattttttagtttgttaatttagagaaaattcgaagtatgattggattataaagggaaattgaatgcggtttattaagtttatggtaaaggatgtattaattgattagagagaggttttttttgatatgaggaaaattttttggaagatgaggtgagatggtttaggaagaaatttttatataaagttgtatagtttttagttttggaaatattttatttattggataagaatggattgaggtatgagtagaggattgagataaatatagagaagttttaatattggttggggagaaaaggagtaattagtgagatttaggtagaataagaataaggttttttaagaggtataagtaaagtagggttcgagttgatttgttttttttttattttgttttttgtaattttattagagtttgaaatggttattttatagagtttttgttttgggattttttaggaaattaatatttattatgagatattaagtttagttttaggaagaagagattttggaatggaaatattttgggtgggagttttagtatatttattattttgtttgagttattggataaataattttagttttaatttaacgaaagttgggttggttggaggattgggtaggtagcgttggaaagtatgttagtattatatttgattttttgaatgtatttaataatgttattattgattatttattagaaataaaatagttatttgttgaatataattcgtttttttttataagtgtagtgaaaagtgtttttttttaagaaattttatgtatttatagatattgttttagtgattttttatgaaagaagttattagtttttgtatgtttattgggtaagggtatcgtaaggtttagaaggaggaggtagtgggttaggagaatcgagagattagaattttaaatttagtttagttattaatatgttttaagtatttttattatatttgtaagagataatagtttattgaaatgaattttaaggtttttgggtttttattagtgtgtttttgtagtttttgaggaaatttaaggtataattgaggaatgaagttaggttttttaattttcgaaatatttttttattgtttatttatgttttttggaaattaagaaggaagttaggagaatagttgttataattagggatgaattttttgtttattgttgtttgttatgttagtaatagttttttaatttataatgatttagttatgaggaatgtttttagatttttttttagttgtttgtttatttggaagatgttgaggatagagagaggatttaagtaggtaattagttggaggatttgtatacgtttttttttagtagtatgttagagaggtggtagtttattggggatagggttgtttgggttttgtgttcgaggggattttgagtaggttatttaatttttttgtgttttagttgtttgatttataatatgaaaattagtaatttttattagataaagttggggaatttatagagttaatatttgtaaaggtttgagaatatttttggtagagtaagtattttgtgagtatgatattggtattttttttgtagtattatatgttgtttatgtttttgtttaagtttgaaattttagaatttttagaatttagtttaatgtttatataattttatagttttgttaggtttttatgatgttattattttgtatttgaatgagtaaatggatttaatgtattgttagggagtcggttaaagtttgagagtttttttttggttgggaggttttttggaatgtggtttgaaggtaagttggtagcgagtttgatatgtttttatttagttttttcgtttttttttttttttgtagttttcgttttagagaaagtagaatttttaaaaataatttttttagtttatatttgtggttagtttgggtttaatggtattttattttttttatttgtttatttggttttagtagtgaatggaaaaagtgtttcgttttgattttttgttttttttttttattttttggaaatttataggatgttgtatttgtttagtagatttaatagtttatttattatttatggaagatttttttttttgtttgatttcgttttttttttttttgttcgtttttaataagaggtagagatagtagttagaggaatcgagaggttgagattaatttagaaatatttaatttttaaattgaagttcgtattttcgtttttagtatgaaagtttttgtcgtttttttgtgtttgttgtttatagtagttatttttattttttaagggttcgtttagttaggtaaggttttttttttttttttttgaattatattgttttttttttgagttattatggattatttaagtagacgtggtatttatagttttgttttaacgttatttttttaagataaggtgatttagaaaaggataaggggtgagtttaattatatagttgttgttcggtagagtttgaattagaattttagttgtgaattttaaatttagttttttttaggattttagttttgggaatatatttagcgtagttatttttttagttgtttttagtagagtttggggattagggtaattaaagagagggtgggtgtgtaggttgtttttagatacgttggagatttagaatttggtttgtgttttatttattttagtttttagagacggtgattttgtagaggtaatgagtattagggaaatttatgattaggtatagtttatttagagtttaaaaggaggtttatagtggggttttttagttgattttttttggtgttgattatttggattattggttcgttttaatgatatttgtaggtattatttagttttaatagtttttttttttttttgtttattattaatgttatatatttattttatagtataggaaattgagttattgggttaaagattatattttagttttgaggtataggtagaagtattgggatttaatgagttttttgtttttttttgtttgttttttgttttttttttatgatttttttttgtttttaagattagaataatttagtttattttaaaatgttttttttttgtggtttattttttaga

SEQ ID NO: 1626 - DNA, 5926 bp, Artificial Sequence
  chemically treated genomic DNA (Homo sapiens)
tttggaaaataaattataaagaaaaagtattttaggatgaattggattattttgattttaagagtagaaaagagttatgaggaaaaagtaaaaggtaggtaggagaagataaagagtttattaaattttagtgtttttgtttatattttagagttagaatgtgatttttgatttaatgatttagttttttatgttgtaaaatgggtatataatattgataatggatagagagaaggaggagttgttaaagttagataatgtttataagtgttattaagacggattaataatttagatgattagtattagggaagattagttggggagttttattatgagtttttttttagattttgaataggttatgtttggttatgagtttttttgatatttattatttttgtagagttatcgtttttggaagttaaggtgaatgaagtatagattagattttgggtttttagcgtgtttggaaatagtttatatatttattttttttttgattattttgatttttaaattttgttggaagtagttgggggagtaattgcgttgagtgtgtttttagagttggaattttggaaggagttggatttggggtttatagttggaattttagtttaggttttgtcgagtagtagttgtgtggttgggtttattttttgtttttttttgagttattttattttggaaaagtagcgttaaagtaagattgtgggtattacgtttgtttggatggtttatgataatttagagagaagataatgtggtttaaggagaagaagagggggttttatttggttgagcgagtttttggggaatgaaggtggttgttatgagtagtaggtatagaagggcggtagagatttttatgttggaggcgagagtgcgagttttagtttgagaattggatgtttttgggttagttttagtttttcggtttttttggttgttgtttttgttttttattgaaagcgggtagagggagagagggcggagttaagtaggaggagggattttttatgagtgataagtgggttgttaaatttgttgagtaaatgtagtattttgtggatttttaggaagtaggaaagggaagtagggggttaggacgagatattttttttatttattgttgagattaaatgagtaaatggggaggatggggtgttattaagtttagattgattatagatgtgaattaagagggttatttttaaggattttgttttttttgaagcgaaaattgtagaaaaggaaggaagcgaggaaattagatgaaagtatgttaggttcgttgttagtttatttttaggttatattttaaggggttttttagttaggaaggagtttttaagttttggtcggttttttgataatgtattaaatttatttgtttatttaaatgtagaatagtagtattatagaagtttagtagaattgtaggattgtgtaaatattgaattgaattttaagagttttagggttttagatttggataaaggtatagatagtatgtagtgttgtagaagaaatgttagtgttatatttatagagtgtttattttgttaggaatatttttagatttttataaatattaattttgtaaattttttaattttatttagtagggattgttaatttttatgttatagattaggtaattgaggtatagaagggttaaatagtttgtttaaggttttttcgagtatagaatttaggtagttttgtttttagtgggttgttatttttttgatatattgttggaaggaaacgtgtataagttttttaattagttgtttgtttgggttttttttttgtttttagtattttttaaatgggtagatagttaaaggagaatttagaaatattttttatggttaagttattatgagttaggaggttgttgttagtatagtaggtagtagtggataagaagtttatttttggttatggtagttatttttttggttttttttttaatttttaagggatatgagtaagtagtggaggagtatttcgggaattggaaagtttgattttattttttagttgtgttttagatttttttagaaattatagaagtatattgataaaaatttaaagattttagaatttattttagtgaattgttgttttttataaatatgataggagtatttgaggtatgttaatggttgggttgagtttaaaattttgatttttcgatttttttagtttattgttttttttttttgagttttgcggtgtttttgtttaatgggtatataaagattagtgattttttttataaagggttattgaggtaatgtttataaatgtatggggttttttgaaagaaaatattttttattatatttgtaaaaagaaacgggttgtatttaataaatgattgttttatttttagtaagtggttagtaatggtattgttgagtgtatttagggagttaggtatggtgttgatatattttttagcgttgtttgtttagttttttaattaatttagttttcgttaggttaaaattgaagttatttgtttagtaatttagatagaatagtagatgtgttgagatttttatttaggatgtttttattttagaattttttttttttgggattagatttgatgttttatgatggatattggttttttggagaattttagagtagagattttatggagtggttattttagattttggtggaattataaaaagtaggatgaagagagaataaattaattcgagttttgttttgtttgtgttttttgaggagttttatttttgttttgtttgaattttattagttattttttttttttttaattagtgttgaaatttttttgtgtttgttttagttttttgtttatgttttaatttatttttatttaatgaataaaatgtttttaggattagagattgtgtaattttgtgtaggaatttttttttaggttattttattttattttttaagaagttttttttatattaggggaaatttttttttaattagttagtgtattttttattatgaatttggtggatcgtatttaatttttttttataatttagttatgtttcgggttttttttaggttaataagttgaaagatgttgagatttttaaataagttttttttggtttagttatattagtattatttatagaattttagaattaatgggtttatagatattttgtggtatgattatttgtttttatttgataaagttataatttagagaaggagattaattagtttatggttatagagaaaaattttttagttttgttggttgagtgtttatataggtttttgagtgttggaagtatgtttttattttaggaaggagttgttatttttggaaagtgatttggtttttgtatatattagatagtaaatatagggaaggtgaagggtatgaattagaaaagaaagttttttggaaagtgatagttgtttgttttttatttttgttttgttaagaaaagatgttttttttcgttgggaggttagtgttggcgtgagagaagtgagtggaaatttttattttgaggaggtagttttggaagtttttagatttcgtagaagagaatgtatttggttggagtttgtattttagatattgggttcggagttagggagtttttatatggggttgtgttgggaatatttcggtataagtttgggttaggttttggtataaatttgggttggattttcgtttggggatatataagggaaaggtttttagaggggttatggggaaaatgagggttaatgttttgatgttgtttagaatttttagttatttcggggttttttttttattaatttatagataaagaatggaaaagttttttttggtgaataatgttttttttatttttttcggggtttgattttattattaagattttttgtatgaattttggttatcgttgtagatttttatttagtgttaggggtgaaaaaaagaggaagtaaaagtgagttttttggaaagatttgaagttattgtttgggtttttattaatttttgcggtttatttgtttttttttatttagtgtaggtttttttgttggtgttttttttatttagtttttaagagagatgtatcgtagttttgtatttattatgttttttttagataatttttatttaaggttttttttttaggttagttttaggtagaatagagtttatttttttagggtcgttattttgtaattttttttttgttaaggatgaaaatttttttttaattttttatagaatgttagaaaatgaacgagattttagagattatttatttgtttttttgatggggagattgaggttatgaataggttagtgataggtttaaggtgagatagaagacgaatggttatatttgtgttggtttgtttatttttgggtttttaatgtagtgttttttgttatttattgtattatttttttattataatatttatataattagtatatattttgtgtagagtattaggtagaggattgtatagggagggagaagtgaattagatatgatgttttttttttagaagagatgttaaagtaagaatttatggaaagtaggattgaatttaggaataaatttgattagtatttattttaagtttttagtatttaagattttttgttttttggattggatttgttttaggtttaattgtatgtagtagttaagaatatttttgagtatgggaataggggtggcgatgggtatagtatatgagaatagaaagagtagtggtttgagttggtgggtgggggtgatggtggtgaggagtagtgatgtttgaggaagtaagaggtttgttttttagattgttttttgagttagtttttatagattagtatttgagttttagagggaggagattgatgtgggttgggggtaagagttaaataaatttttaggttaaaggtagcgtgagttattttatagtattttcgtgttatatattgggggagaaaatgttttttttatttggggtttgtattgtataaggtggtttgagtagtgtgatgagggggttaaggtgtcgaattgggagagggggatgggtaggttttagggaaatagagattagatggagtggagatagaaatatttttttgataatagttttttgttgatttttttagtatttgtgttggggttatttaagggaatagaataattgtattaattagaaagatatagagcggtgagagttttagttgaggggtttagggaaggttcgtgatggtatatttaagatgggtttaagggttgggtagatttttgaattttggcgatcggtgggtgaaggaggggttatattttgggtaaatttataaaggttgtaaattgtaatgtgtttatttatttttttaggattttgttaaagtagagattttgattgtaggtttggggtgggtttgcggttttgtattgttaatcggtttttaggtgatgatattgttgttggtgtatggttttgttagaataattttaatatttgtttttggataggaaatgttggttaggtgggaaaatattgagtagtttattttgtttagattaggatttttgtttgtggtttttggataggtttttagatttattaggagttgttttttatatttatgtttttgtgtatttttttggagagagggttagtagtttttattagattagtaaaggtatttatgatttttaagtagttaagtgttattgaatttattagagagttttgggttttaatttagatttgttgaattatagtttgtattttttattttattttatttttttgagatagagttttattttgttatttaggttggagtgtagtggtattatttttgtttattgtaatttgcgttttttggatttaagaggtttttttgttttagttt

SEQ ID NO: 1627 - DNA, 5228 bp, Artificial Sequence
  chemically treated genomic DNA (Homo sapiens)
ttttttttattttttttagggtttttaattttgattttaagttttagtattaagtagatagattttaatatttttaggatgtaatatttttttgagattgttttattattgtaggtttaagtttataggtaggggtttagggttgatgtttaattaatttagatttttgtatttaggaagattaggtagagatgggatttagggggttgtgtatattatttgatataataagaagttttttttatggtatgaataagggtaagggagataggtaggtattttggagagaaagtaagtttaagtttttaggaaagaaaaaggtatagttttttttttttttttgttattttttttttttttttataatttgtgttaggcgagaaagtttttttttttaggggaggtagagggggtattattttagtttttttttttttagattaattttgtttttttttatcggttttgtgttaatttagagtgtgggatggggagtagaataggtttaagtggtttttttagttttattttattaaatgtttagaattatttgtagaatttggtaaaaatatatatttgttggttttattttgagattttatttaaggcggtttggcgtgttgtttttaattttgtttttaaaaagttatttaggtgattttgaagtgtagttaagtttggaagtaaattaatataatatgatttcggaattatttgtatgtttttttttaagtttatgttattttatttgtttgagaattttttagagataggttgtttattatttttttagttatttttattaggtaggtggggaaattagggagttgggaatttaaaattttttggttttaggatttgtttttagattaggtaaaagatttaagaaattttatttttttgtttttgtttagttttgttttaggaatattagttttttgttaatagagttattttttgttttgtttaaggttttagttttaaggttttttgagtttgaaaattttagatttaagagtttaattattttttttttaggttattaaattttagtttttttattttgtggattttagaatgaaatattatttttttattttttttttaatagtatttttatttttaattttatgttttttgtattttatttttttttaagagtaatttaatatttttgtttttggttatggttgttttgattatattttttttgatatttatttttttttttttttatggtttttttattttgttataagttattttttaaaaaataagatgtaaggagtttgttgttgagtttagtattttggaaattagatggattttttagttttgacgtgaggattataattttaaggttttaatttagtattaaatatagattttaagttatgatttaataatttttatatattatatattataataaattttaaatggataaaagattttaaaatgttaaaaattaaattatagaaaaatattatataaaatggtagagtaagaagttataggggttggtttttttattaaagtaattattgaggtggaaagagtaattggaatcgatttttttagaagtttggagttcgattggatatttataataagtagggggggtggtatttgatgaagggagaggttgttggttttttagaagagagtataatgtatgtattagttattaattaatatagtggggatagtagtttatatttttgaagtagttgggtggttattgagtgggtagggggaattttgttttttaaaaatgaggggttttgtatttgggtttgttttttggttttttaagggataggtttgttttgttttagtttttttgggttttaggatttttttgagttatatatattagaagatttaaagggatagaatttttttgcggggaaggaagagaattttttgttaggttataaatagaaattttagtaattttataaaataaagaatatatattttgtaaaaaatcgtttgaaaaagttattataaattgatggtagagtttttaataagtgtatattagtaatttttaaggagtgaaaaaattgaatttttagagatattatattgtaatatttagaatgtttagttattaataaaaaattattaatataaagaaataggaaagtatggtttatttataggaagaaaggaatttgatagagattatttttgaggaagtttagatattggatatagtagatgaagattttaattgttttattgtaaatgtttaataaatattgatgatgggaggtttgatgataagggtgagaagttgaaattttaaatattgttttgttgtttgttttattatgattttaaattaaattgggaaataatggtttttttggaaaaaaaaaataattgttttaaatatgtttaaagagttgaaggaaattatgggtaaagagttaagggaaatttgaaaaatggtgtatgaataaaatgaaattattaataaagagatggaaattagtaaaaagaaaaaaaggatttaagtagaaattttggaagtaaaaatataataattgaaatgtataatttattaggggtaattaataattaatttaagtagaaaaaaaaggattagtatttttgatgataagataattaaaattattaagtatgagaagaaaaataaacgagttttagggatattattaaatgtattttattataggagttttaggaggagaagagagggaatagggtattaaaaaaattgaagaaataatgataaaatatttgaaatttgatgaaaagtatgaatatatatatttaagaagtttataaattttaagaaggataaatttagagatttatattaagataaattatagttaaattgttgaaatttaaagattttaaaagtagtaagagagaagtaatttattatgtataagagatttttaataagattattagttgattttagaaattatgggaggttaaaagataatgggggatatatttaaagattgaagaaaaaaaaaagttaaataagaattttatatatttagtaaaattatgttgtaagaattaaggagaaataagatatttttagataaataaaatttaggaagtttattaatagtagatttgtttataagaaaagttaacgggagaaagaaaaaataaataaataaataaataaatgttaaaggaagatttttagaatgaaataaaaggataaaaaataataatttatagttatataaagaaataaagatttttgataaatataataatatagtaggttgggcgtagtggtttatgtttgtaattttagtattttgggaggttaaggtgagcggattatttgaggttaggagtttgagattaattaggttaatatggtgaaattttatttttataaaaaatagaaaaattagttggatgtggtgataggtgtttataattttagttattcgggaggttgaggtaggagaatggtttgaattcggagggtggaggttgtagtgagttaagattacgttattgtattttagtttgggcgaaagagtgagattttgttttaaaaaaaaaaaaaaaaaagtaataatattgttaggtatgttggtttatatttgtaattttattattttgggaggttaaggcgggtgaattgtttgaggttaggcgttcgagattagtttgggtaatatagtgagatttcgtgtttataaaaaatataaaaattagttaggtatggtggttttattatttaggagattgaggtggaaggattatttgagtttaggaggtcgaggttgttgtgagttgagattgtgttatcgtattttagtttgggtgataaagcgagattttgtgttaaaaaaaaaaaaaaagataaaagttagtattgtatttttagtttgtagttttatttttttttatataatttaaaaggaaaatgtattaaataataattataaatttatgttaatgggaatataatgtataaagatgtaatttgtgataataataatataaagaagggattaaaatgtatacgagtaaaatgtttatatattattgaaattaagttggtattatttaaattaggttgttattagtttagaatgttaattataattattaaggtatttattaggaaaataattataaaatatatagaaaaggaaagtaaaggggaattaaaatggttatgttatagattaggtgtagtcgtttatatttataattttagtattttgggtggttaaggtaggaggatcgtttgagtttaggagtttaagattagattgggtaatatagtaagattttatttttagaaaaaataaaaatgaaaaatgaaaatagtagtcggacgtagtggtatgtgtttgtggttttagttttttaagaggttgaggtaggtagattatttgagtttaggagtttaagattagtttgggttagatatcgtgaaatttcgtttttataaaaaaaaaatagaaaaattagttaggcgtagtggtgtttgtttgtagttttagtttttggggaggttgaggtaggaggattattcgagtttaggaggcggagattttagtgagttaagattaattattgtattttagtttgggtgatagagttagattttgttttaaaaaaaaaaaaaaaaaaaagaatttttataatttaataattagatttgttggaaggaggggaagggtatggattttggagcgtagtgaggagatagttatggtgttttaggggagaggtagtgaggtttgtatgaaagtagtagttgggaatagaaggaaggtttaggtttagatatatttaattaatgaggatataaaatttggtagttgaggattgtttatttagtttgagataagtggggttgggtgttagtaaatttagtttttaggaaggaaaaggagtggggataagttaagggaagtgaaagtgtttagttatataaatagtaggttaattttagtttacgtatagatttttaatttgtagttgtttattttatttttagttttggttttttatttattttttattatagatatggtttagttattggttttgagtttttttattttggttttggtttttggtatttttaggatttaaggtattaaggtagggaggggttttgtatggggttaaggggattaagaggtttggataggagtttgttagtagtttttggttttttgtgaattttattttgtagg

SEQ ID NO: 1628 - DNA, 5228 bp, Artificial Sequence
  chemically treated genomic DNA (Homo sapiens)
tttgtagggtgggatttatagggagttaggggttgttggtaagtttttatttaggttttttgatttttttagttttatgtaaggtttttttttgttttggtattttgggttttggggatgttaaaggttagaattaggataaggaggtttagagttagtgattgagttatgtttgtggtagagggtgagtaagaggttagagttgagggtgaggtgggtagttgtaagttgggggtttgtgcgtgggttgggattggtttgttatttatgtagttagatatttttattttttttaatttatttttatttttttttttttttgaaagttggatttgttggtatttagttttatttattttaaattaagtggatagtttttagttgttaaattttatgtttttattagttgaatatgtttgggtttgagttttttttttatttttagttattgtttttatgtaggttttattgttttttttttggaatattatgattgtttttttattacgttttaggatttatattttttttttttttttagtaaatttgattattaaattgtaagagtttttttttttttttttttttttgagatagggtttaattttgttatttaggttggagtgtagtggttgattttggtttattgaaattttcgttttttgggttcgagtgatttttttattttaatttttttaggagttgggattataggtaagtattattgcgtttggttgatttttttattttttttttgtagagacgaggttttacgatgtttagtttaggttagttttgagtttttgggtttaaatgatttgtttgttttagttttttgaggagttgggattataggtatatgttattacgttcggttattgtttttattttttatttttattttttttagagatgaggttttgttatgttgtttagtttggttttgaatttttgggtttaagcgatttttttgttttggttatttaaagtgttggaattataggtatgagcgattgtatttggtttgtagtataattattttgatttttttttgttttttttttttatatattttgtagttatttttttaatggatattttggtgattataattaatattttaaattgataataatttagtttgaataatattaatttagttttaatggtatataaatattttgttcgtatatattttagttttttttttatattgttattgttatagattatatttttatatattgtgtttttattgatatagatttataattattgtttaatgtattttttttttaaattatatagaaaaaagtggggttataaattaaaaatataatattagtttttatttttttttttttttttgatatagggtttcgttttgttatttaggttggagtgcggtggtataattttagtttatagtagtttcgattttttgggtttaagtgatttttttattttagttttttgagtagtggggttattatgtttggttaatttttgtattttttgtagatacgaggttttattatgttgtttaggttagtttcgaacgtttgattttaagtaatttattcgttttggttttttaaagtaatgggattataagtgtgaattagtatatttggtaatgttgttatttttttttttttttttttgagatagagttttattttttcgtttaggttggagtgtagtggcgtgattttggtttattgtaatttttatttttcgggtttaagttatttttttgttttagtttttcgagtaattgggattatgggtatttgttattatatttagttaatttttttattttttgtagagatggggttttattatgttggtttggttggttttaaatttttgattttaaatgattcgtttattttggttttttaaagtgttgggattatagatatgagttattgcgtttagtttgttatgttgttatgtttattagagatttttgtttttttgtgtggttgtgagttattattttttgtttttttgttttattttgaaggtttttttttagtatttgtttgtttgtttgtttgttttttttttttttcgttagttttttttgtgggtaggtttattattaatgaattttttaagttttgtttatttggaaatgttttatttttttttaatttttgtagtatagttttgttggatatatagaatttttgtttgatttttttttttttttagtttttaaatatattttttattgttttttggttttttatggtttttgaaattagttggtaattttattgagaattttttgtatataatgagttattttttttttgttgtttttaaaatttttgggttttaataatttgattataatttgttttggtgtggatttttgagtttattttttttagagtttgtgaattttttgggtatgtatatttatgttttttattagattttagatgttttgttattatttttttaatttttttaatgttttgtttttttttttttttttttgagatttttgtgatgaggtatatttgatggtatttttgaggttcgtttatttttttttttatatttgataattttaattgttttattattaagaatattgatttttttttttttgtttaaattagttgttgattgtttttagtgaattgtatattttagttattgtatttttgtttttagaatttttgtttgagttttttttttttttttattaatttttatttttttattgatagttttattttgtttatatattattttttagattttttttaattttttgtttatggttttttttagttttttgagtatatttaagatagttattttttttttttaaaagggttattgttttttaatttaatttgaggttataataaaataagtaataaagtagtatttgagattttagttttttatttttattattaaattttttattattaatatttattgagtatttatagtaagatagttaaagtttttatttattatgtttaatatttgggtttttttagggatagtttttgttaaatttttttttttttgtgaatgggttatatttttttatttttttgtattagtaattttttgttgataattgggtattttgaatattatagtgtggtatttttagaaatttaatttttttattttttagggattgttgatatatatttgttgagaattttgttattaatttgtggtgatttttttaaacggttttttgtaaagtgtgtattttttgttttgtggggttattgaaatttttgtttatgatttgataaagggttttttttttttttcgtaaaaagattttgtttttttaaattttttgatatatgtggtttaggaagattttgaagtttaagagggttgaaataaagtaagtttgttttttagggaattagaagataaatttaaatgtaaaattttttatttttggaggatagggttttttttgtttatttagtgattatttagttattttaggaatgtgggttgttatttttattgtgttggttggtagttagtgtatgtattatgtttttttttgaaagattagtaatttttttttttattaagtattattttttttgtttgttataagtgtttaatcgggttttagatttttgaaagagtcgattttaattgttttttttattttaatagttgttttggtggagggattaatttttataattttttattttgttattttgtatgatgtttttttgtagtttaatttttaatattttaaaattttttatttatttggagtttattatggtatatgatgtgtgagggttattgggttataatttagaatttatatttaatattggattgggattttagagttgtaatttttacgttagagttggagaatttatttggtttttagagtgttaaatttagtagtaagttttttatattttgttttttgaaggatggtttatgataggatagggaaattataggaagaggaggaaatgagtgttaggagagatgtagttaggatagttatggttagagatagaaatattgggttgtttttggggaaggatgggatgtagaaggtatggggttgaagatggaggtattgttgggagggggataaagaggtggtgttttattttaaggtttatagagtagaggggttggaatttggtggtttagaggagaaataattgagtttttgagtttgaggtttttagatttaagagattttaaggttgagattttaagtagggtagggagtgattttgttggtaagaagttggtgtttttggaataagattaggtaaaaataaggagataagattttttggattttttatttggtttagaggtagattttggaattagaaagttttaaatttttagttttttggtttttttatttgtttaatgggagtgattaagaaagtagtgagtagtttgtttttgaggaatttttagatagatagaatagtatgggtttgggagggggtatgtagataatttcgaagttatattatattagtttgtttttaaatttggttgtattttagaattatttgggtgattttttaaaaatagaattagaagtaatacgttagatcgttttaaatagaattttagaatagagttaataaatgtgtatttttattaagttttgtaggtaattttaagtatttggtggggtggggttgggagagttatttgggtttattttgttttttattttatattttagattgatatagagtcggtgaaagggaataaagttggtttggggaaaggaaagttggagtgatgttttttttattttttttggaggaggagattttttcgtttggtatagattgtagaaaaaaaggagagatggtagggaagaggagggggttgtattttttttttttttaaaagtttaggtttgttttttttttaagatatttgtttgttttttttatttttatttatgttatgaaagaagttttttgttgtgttagatggtgtgtataattttttaggttttatttttgtttggtttttttagatgtaggaatttaggttgattaggtattaattttaagtttttgtttgtgaatttgagtttgtagtggtagagtagttttagggagatgttatattttggagatattgaggtttgtttgtttggtgttggagtttagaattaaggttaggagttttaagggaaatgaaggaag

SEQ ID NO: 1629 - DNA, 6640 bp, Artificial Sequence
  chemically treated genomic DNA (Homo sapiens)
gaatgaggatatttttttatattatattgaagaaaattaataataaagtacgaatatttattataatatttagtttatatttatatttttatatgttttcgttggtttttaaaagatttttttagagttgtttttttttttttttttttttttttttttttttttttttttgagatggagttttgtattgtcgtttagattggagtgtaatggtgttatttcggtttatagtaatttttattttttgagtttaagtaattattttattttagttttttgagtagttgggattataggtgcgtattattacgttaggttaatttttgtatttttagtagagatggggttttattattttggttaggttggttttgaattttagattttaggtgatttatttgttttagttttttaaagtgttgggattataggcgtgagttattgtgtttggttttttgtttttttttttttttttttgagatagggttttattttattatttaggttggagtgtagtgttgtgattttggtttattgtaatttttattttttgggtttaagtgatttttttattttagttttttgagtagttggaattataggcgtatgttattatattcggttaattttttttgtattttttgtagagaggggtttttattatgttgtttagattggtattaaatttttggttttaagcgatttttagatttataaagtgttgggattataggcgtgagttatcgtgttttgattttttttaaaattaggatttaattaaggttcgtgtattgtatttggttgttatgttttttaagttttttttaattttaaatgttttatttattttattatttttttaaaataatattaatttttttaaaaattttggatatagagttttatttcgttgtttaggttggagtgtagtggcgcgatttcggtttattgtaattttttttttttaggtttaagtgatttttatgtttttgttatttaagttagttgggattataggtatatattattatatttagttaaatttttgtatttttagtagagatggggttttattatgtaggttaggttggttttaaatttttgattttaagtgattcgttttttagggttttttaaagtgtttataggttttagttattacgtcggattaatattaattttttgatgatttgaggattgttattttgaagagtatttggaaggttttattttttggggttgtttgattgtttttttatagggttatttattttttttttttagtttttgtattttttgttaattggtaattaatattagggatttgatttgattgtaggggagtattttttaaaaaatggtgaaattgtgaattatatatatttattattgtaattatttttaagtgtatagtttagtggaattaagtatatttatattgttgtgtaattattattattatttatttttagaatttttattttgtagaatggagattgtgtttttatgaaatattaacgtttatttttttatttttagtttttggtaattacgattttgttttttgtttttgtgaatgtgattattttaggttttttaaagtagtggaattatatagtgtttgtttttttgtgattggttttgggttatggtttttgaaaagaggtttttcgagatgatgtcgtgtattttagattgtattttagtaggagtttataggaattttgcggtttttgtttgttagtttttttatttagttgtgttttgtatttttatttattttgtttttatttatattgttttagttgtttagtttttttattttgtttgggtttttgtatttgttgtgttttttggtaggtttttttttatttttttttttttttttttttttgagatggagtttcgttttgttatttaggcgggagtatagtggtgcgatttcggtttattgtaatttttgtttgttttcggggtttaagtaatttttttgttttagttttttaagtagttgggattataggtgtatgttattatgtatggttaatttttgtatttttggtagagatgaggttttattacgtcggttaggttggttttgaatttttgattttaagagatttgtttgttttagttttttaaagtgttgggattataagtatgagttatcgtgtttggttttttttttatttttgaattttagttgaaatgttatttcgttttagaggtttttttcgattgtttattttaaagttgtttttttgttttattcgtttttcggtgttttttttagtttgatattattttgtttgttatgtttgtttgttgtggaagataaattttatgagagtaggggtttttgtttttttgtttaggttgtttttttaggttttggtagtgtatttggtatatagtaggtgtttgtatgagttttttttggttgttgtaataaatgattatgaatttggtggtttaaaatattataaatttattatttaatagtttgggaggttagaagttttaaattagttttagtggattaaaattaaggtgtggggagggataagttttttttggaggttttgggggagaatttgtttttttgttttttttagtttttttagttcgtttgtatttttgggtttatagttttacgttattgggatttttgttttgttatttattattttttttgattttgatttatagttttttttttgaaataattttgtgattgttttgggtttgtttagataatttaataaatttttttttttaaagattttaggttaggtatggtggtttatatttataattttagtattttaagaggttaagataggaggattgtttgaggttaggagtttaagattagttttggtaatatagtgagatttttatttttataagaaataaaaatgagtagggcgtggtggtatatatttgtagttttagttatttgagaggttgaggtagtaggatcgtttgagtttaggaggttaaggttgtagtgagttgtgattgtattattgtatttcggtttgtgtgatagagtgagattttgtttttaaaataacgataataataataaaaattttaaattttaaatagttatatttgtaaagttttttttattatgtaaggtaatatatttataggttttggggattagaatgtggatatttaggggggttattattttgtttattatagcgtttaataaatgtttgttgaatgaaggaattggatgaatggatgggtttttttatatatggagttttaagttttgagttttaggtttggcgtagtttttgtgtggttgtgtgaattgggtaagttttttttttttgaattttagtttttttttttattagatgtgttttttttttttttttttttttttttttttttttttttttttttttgagatggatttttatttttttatttaggttagagtgtagtggcgtaattttggtttattgtaatttttgttttttatcgtatttaagcgatttttttgttttttagttttttaagtagttgggattataggcgtatgttattatattcggttaatttttgtatttttggtagagatggggtttttttatgttggttaggttggttttgaatttttgattttaggtgatttatttgtttgggttttttaaagtgttgagattatagttatgaattattgtatttagtttatgtgttttgagtatttaatatgtgtttgatttttagagggttttgggaatgttaagaaaaatgaagggagattttagttttttagagtttggagtttgatttttagggaggggtttgagaaagagaaaatttgatttagtttgtttagggttatattttaggttttttagaaggttttgaagttttgagagggtgtgtttattaaggatatgatattttaaatagttttgacgtataagtaggagtttatgtggtagagatgtggaaagtgatattaaaggttagggataggtcgtagttttttttgaggaagtgtgaggagtgtggtgtgattttttaggggagggagattagtggggaaaggtttgttcggaaacggggttttgaaggttatagataggagttcgggatttgtttttaggtgaatggggagttacggtagggttttgaagtaggagagagagtgtgtagttttggattatttacgttggttgttgtagggtggggatggtattgaggaggttagtattttagtttgaggtggaggtggtttggattgggtaggaatagtggggttggagagaaggagtagatttgagagagatttaggaagtagaattaacgggatatggatatggtgagggattgagataggagtgggggagggagagttcggtagttattgggaaggaagattaggtaggatagaagtgtgggtagatgttttttataaatcgttgagaaatttacgatttggtttaaatgtggattttacgagaagttttagatgggttaatgggtttataggttttttttattgaagagagattagtaatgtcgttattaagggtataagataggttttaattttaggtgagggttggtttacgtttttatttgatttataattagtgaagttaatagagttgtgaaattattttttttatttttagatggggaaattaagttttagagatatttagatatggttaaggttatatagtgtagagattttggggagtataagtttttaagagggggattttataagtttgtttgaaattagaggcgaggatagagttgagggggggttttttttgagtggtttttcgttaaagagaatttttttattttggaggaagtgggaggtagttttttttttgagatgtgaatgttaagtgattttgggtatttcggtgattaagaggtaagtaagtgaggtttgtgggtggagttagtattttaaatagtaggtttttttatgtttttttgtagatatttgggttgagatatataggatagagtatggttcgtttatagattgtatttttggttgttttcgttttttttgttgtggcgttttaagtaattgaggtaggtgaggttggggagtaggaagattttttatagaggttagggtagacggtggggtgttttttttatgttttggataagtattggattaagagtagaagattttagtttgttgttggtttttgcggttttcggttagttgtagtgtttttttgggttttagtttataagtttgttgaatgggtagttttgaagatttggagtttaggatttgttttatttgggttgggggttgtggtgggtatagtttcgggattttttgttttagaaaatttaagtatagggttttaggggtgtgggtgaggagtttttaagggttaggtttgagtgggggaaggtagggttggggtaaggggtttttttttggaaagttggtgttgtttttttattatttattttttaaaatgttattattattattttttattttattttattttattttttgagatatagttttatttttgttgtttaggatggagtgtagtgaggtaattttggtttattgtaatttttattttttaggtttaagcgatttttttgttttagttttttgagtagttgggattataggtatgtattattatatttggttaatttttgtatttttagtggagatagggttttattatgttggttaggttggttttaaatttttgattttagatgatttttttattttagttttttaaagtgttgggattataggtatgagttattgcgtttagtttaaatttattttttattttattttatttatttattttttgagatggagtttttgttgtttaggttggagtgtagtggcgtaattttagtttattgtaatttttatttttggagttaaagtgatttttttgttttagttttttgagtagttgggattataggtatttgttattatgttcggttaatttttgtatttttagtaaagatggggttttattatgttgatcggttttgtttcgaatttttgattttaagtgaaatttttattttggtttttttaagtgttaggattataggcgtgagttattgttttgggtttattatttatttttgtttagaatttgtttttagtatggatttttgattttttttttttattttattttatatttttgttgtgttgggtggaggagtgagtattggagtggggttaggtagttataaataagaattgtttttagttgttgggttttttgagtgttttttatgtattaaagattttttgaagttggtattgttattatttttttggttagaggaggaaattgggttttaggttatagttgatgtttagttgttttgaattttcgtttttagagttgattgttttagagtgtagatattggattttaagtggttttttagaagttttaagggtagggttttggagggtttagaattttttggttattatttttttatatgagaatagaaaaattgtattttttttttggagtttggagaggtcgagattaggggttggggtcgagggtgatttttttgggttttagtttgtgaatttattggggattttttttttagg

SEQ ID NO: 1630 - DNA, 6640 bp, Artificial Sequence
  chemically treated genomic DNA (Homo sapiens)
tttaggggaggggtttttagtgaatttataagttggagtttagagaggttattttcggttttagtttttgatttcggtttttttaggttttaggaaagagatgtagtttttttgtttttatgtggaaggatggtgattagaggattttgagttttttaagattttatttttggagtttttgagaagttatttagggtttaatgtttatattttgggatagttagttttaggagcggggatttagaataattaagtattagttgtagtttgaggtttaatttttttttttgattaaaggggtaataatagtattagttttagagggtttttaatgtatgaaaagtatttagaaagtttagtagttgggagtaatttttgtttatagttgtttgattttattttagtgtttatttttttatttaatatagtaaaagtatagagtggggtggagaagaggagttaggaatttatgttgaggataggttttggataaaaatggatagtgagtttagagtagtggtttacgtttgtaattttaatatttagggaggttaagatgggagttttatttgaggttaggagttcgagataagatcggttagtatggtgaaattttatttttattaaaaatataaaaattagtcgggtatggtggtaggtgtttgtaattttagttatttaggaggttgaggtaggagaattattttaattttagaggtagaggttgtagtgagttgagattgcgttattgtattttagtttgggtaatagagattttattttaaaaaataaataaataaaatgaaataaaaaataaatttaggttagacgtagtggtttatgtttgtaattttagtattttgggaggttgaggtgggaggattatttgaggttaggagtttgagattagtttggttaatatggtgaaattttgtttttattaaaaatataaaaattagttaggtgtggtggtgtatgtttgtaattttagttatttaggaggttgaggtaggagaatcgtttgaatttgggaggtagaggttgtagtgggttaagattgttttattgtattttattttgggtaataagagtgaaattgtgttttaaaaaataaaataaaataaaataaaaaataataataataatattttaaaaaatggatggtgggagggtagtattagttttttaagggagaattttttgttttagttttgtttttttttatttagatttgatttttagaagttttttatttatatttttagggttttatgtttgagttttttggggtaggagatttcgaggttatgtttattataatttttaatttaggtgagatagattttagattttaagtttttaagattgtttatttaatagatttgtaaattgaggtttagagaagtattgtaattagtcgaaggtcgtaagagttaatagtagattgaggttttttgtttttggtttagtgtttgtttaagatatgaggaagatattttatcgtttgttttggtttttgtagggggtttttttgttttttagttttatttgttttagttgtttgaagcgttatagtaaggaggacgaggataattaggagtgtagtttgtaggcgagttatgttttgttttgtatgttttagtttaggtgtttgtaaagggatataggaagatttgttatttaaggtgttggttttatttataagttttatttatttattttttagttatcggggtgtttagagttatttgatatttatattttaaaagaagaattattttttattttttttaaagtggagaaattttttttggcggggaattatttagaggggatttttttttaattttgttttcgtttttggttttagatagatttgtaaaattttttttttagaggtttgtgttttttagggtttttgtattgtgtggttttggttatgtttgggtgtttttgggatttggtttttttatttggaaatgggggagatggttttatagttttgttgattttattggttgtaaattaagtgagaacgtggattaatttttatttagaattgaggtttgttttgtatttttaatgacggtattattggtttttttttagtgggagaggtttatggatttattgatttatttggggtttttcgtgaagtttatatttgggttaggtcgtggattttttaacggtttatggaaagtatttatttatatttttgttttgtttgatttttttttttagtggttgtcgggtttttttttttttatttttgttttagttttttattatgtttatgtttcgttgattttgttttttaaattttttttagatttgttttttttttttaattttattgtttttgtttagtttaggttatttttattttaggttgggatgttggtttttttaatgttatttttattttgtagtagttagcgtgagtggtttagagttatatatttttttttttgttttagaattttgtcgtggttttttatttatttaaaggtaggtttcgggtttttgtttgtggtttttaaggtttcgttttcggataggtttttttttattggttttttttttttgagggattatattatattttttatatttttttaaaagggattgcggtttgtttttggtttttaatgttattttttatatttttattatataaatttttatttatgcgttaaagttgtttgaaatgttatgtttttggtaagtatatttttttaggattttaaagttttttaggggatttggaatgtggttttgagtagattgggttaggtttttttttttttaagtttttttttagaagttagattttaagttttaggaggttggggtttttttttattttttttggtatttttagggttttttgaggattaggtatatgttgggtgtttagaatatatgggttgggtgtagtgatttatgattgtaattttagtattttggaaggtttaggtaggtggattatttgaggttaggagtttaagattagtttggttaatatggagaaattttatttttattaaaaatataaaaattggtcgggtgtgatggtatgcgtttgtaattttagttatttggggggttgagaggtaggagaatcgtttgaatacggtgagaggtagaggttgtagtgagttaagattgcgttattgtattttagtttgggtgagagaatgagagtttattttaaaaaaaaaaaaaaaaaaaaaagaaagaaagaaagaaaaaaaagaatatatttaatgaaggaggaaattgaggtttagagagagaggatttgtttagtttatatagttatatagaggttacgttaggtttggaatttagaatttgggattttatgtataaagggatttatttatttatttaatttttttatttagtaaatatttattgaacgttgtggtaaatagaataatggtttttttaaatgtttatattttaatttttaaaatttatgaatatgttattttatatggtaaaaaggattttgtagatgtgattgtttagggtttaggatttttgttgttgttgtcgttgttttagaggtaggattttattttgttatataggtcggagtgtagtggtgtaattatagtttattgtagttttgattttttgggtttaagcgattttattgttttagttttttaagtagttgggattataggtgtgtgttattacgttttgtttatttttattttttgtagagatggggattttattatgttgttagggttggttttgaatttttggttttaagtaatttttttattttggttttttgaagtgttaggattatgggtgtgagttattatatttgatttaggatttttaaagagggagatttattggattatttagataggtttaaggtaattatagagttattttaagagggaggttgtgggttagagttagaagagatgatggatgatagagtagaggttttagtgacgtggaattgtgaatttagggatgtaggcgggttggagaagttggaagaggtaaggaaatagatttttttttagagtttttagaaagaatttatttttttttatattttgattttagtttattgagattgatttaggatttttgattttttaggttattggataataaatttgtgatgttttaagttattaagtttatggttatttgttatagtagttagaggaagtttatataagtatttattatgtgttaagtgtattgttagagtttgggaaggtagtttgaataggagagtaggggtttttgtttttatggagtttgttttttataatagataaatatggtaaataaggtaatgttaggttgggaggaatatcgggaagcgaatgaaataaagaagtagttttgggataggtagtcgggaaaggtttttagaacggggtgatattttagttgaaatttaaagatagaaaggaggttaggtacggtggtttatgtttgtaattttagtattttgggaggttgaggtaggtagattttttgaggttaggagtttaagattagtttggtcgacgtggtgaaattttatttttattagaaatataaaaattagttatatatggtggtatgtatttgtaattttagttatttgggaggttgaggtaggagaattgtttgaatttcggaggtaggtagagattgtagtgagtcgagatcgtattattgtattttcgtttgggtggtagagcgagattttattttaaaaaaaaaaaaaaaaaagaagataggaaggagtttgttagggagtatagtaaatgtaaaggtttagatagagtgagagggttgaatagttgagatagtgtgggtagagatagaatgggtagagatgtagagtatagttgagtggagaggttggtaggtagggatcgtagggtttttgtgagtttttgttaggatgtaatttgaagtgtacggtattatttcggaggatttttttttaaaagttatgatttaggattagttataaaagaataaatattgtatgattttattgttttggggaatttggaatagttatatttatagagatagaaggtaaaatcgtggttgttaggggttggaggtgggggaatgggcgttagtgttttatggggatatagtttttattttgtaagatgaaagttttggaggtggatgatagtgatggttgtataataatgtgaatgtatttaattttattgaattgtatatttaaaaatggttataatggtaaatgtatgtgatttatagttttattattttttaaaaggtgtttttttataattaaattaagtttttagtattaattattagttgataagaaatataggggttagaggaaaaagataaatggttttgtgaggaagtaattagataattttagaaggtggaattttttagatgttttttaggataatagtttttagattattaaaaagttaatgttggttcggcgtggtggttaaagtttgtgagtattttgggaggttttggaaggcggattatttgaggttaggagtttgagattagtttggtttatatggtgaaattttatttttattaaaaatataaaaatttagttgggtgtggtggtgtgtgtttgtagttttagttaatttggatggtagaggtatgagaattatttgaatttgggaagaggaggttgtagtgagtcgagatcgcgttattgtattttagtttgggtaacgaagtgagattttgtatttaaaatttttaaaaaagttaatgttgttttaaaaaaataataaagtgaatagaatatttaagattaaaagaggtttaagagatataatagttaaatgtaatatacggattttgattgaattttagttttgaaaaaagttagggtacggtgatttacgtttgtaattttagtattttgtgggtttgaggatcgtttgaggttagaagtttaatattagtttgggtaatatggtgaaaatttttttttataaaaaatataaaaaaaattaatcgagtgtagtggtatgcgtttgtagttttagttatttaggaagttgagatgggaggattatttgagtttaggaggtggaggttatagtgagttaagattatagtattgtattttagtttgggtgatagagtgagattttattttagaaaagaaaaagaaaaaatagggggttaggtatagtggtttacgtttgtaattttagtattttgggaggttgaggtaggtggattatttgaggtttggagtttaaggttagtttggttaaaatggtgaaattttatttttattaaaaatataaaaattagtttggcgtggtggtgcgtatttgtaattttagttatttaggaagttgaggtaggataattgtttgaatttaggaggtggaggttgttgtgagtcgagatggtattattgtattttagtttgagcgatagtgtaagattttattttaaaaaaaaaaaaaaaaaaaaaaaaaaaggaaaagaaaaaaatagttttaaaaagattttttgggaattagcggggatatgtgaaaatgtgaatatgggttggatattatagtagatattcgtgttttattgttgattttttttagtgtaatgtgggaaaatgtttttattt

SEQ ID NO: 1631 - DNA, 5293 bp, Artificial Sequence
  chemically treated genomic DNA (Homo sapiens)
tttatttattttttagttttttttatatatgttgtttttgtttttgttaggtttttatttttattgtttttttttttttttttttaattttttttttttttttaaagagttcgggttttgttatgttgtttaggttggatttgaatttttgggtttaagtaatttttttatttcggttttttaaagtgttgggattatatgtgtgagttattgtatttggttttttttttttttatttaattattttttttttttttttttttttttttgagacggagttttattttgttatttaggttggagtgtagtggtgcgatttcggtttattgtaatttttgttttttaggtttaagcgatttttttgttttagtttttcgagtagttgggattataggtgcgtgttattacgtttagttaatttttgtatttgtagtagagatgggtttttatttcgggagttaagtggttttgtgatggtgtttgtttatttatttttgtaaggtattagtttttttttcgtaaaatagggttggtaatttttgttttaataatttttttgtatagagtataaagattaggagttttggttgggtgaggtggtttatgttggttattttagtattttgggaggtcgaggtgggcgaattatttgagattaagagtttgagattagtttagttaatatggtgaaatttcgtttttattaaaaatataaaaattagttaggtatggtggtgtgtatttgtaattttagttattcgggaggttgaggtaggagaattgtttgaatttggggggcggaggttgtagtgagttaagattatgttattgtattttagtttgggtgataaagagagattgtgtttgaaaataaaataaataataataatagtaataaaatattgggtgttttggtttagtgcggtggtttatgtttgtaattttagtattttgggaggtcgaggtgggtaaaatatttggggttaggagttggtgattagtttggttgatatggtgaaattttatttttattaaaaaaataaaaattagttgggtgtggtgatgggtgtttataattttagttatttaggaggttgaggtatgagaattgtttgaattcgggaggttgaggttttagtgagttgagattaggttattttattgtagtttgggtgataaagtgaaattttttttaaaaaaaaaaaaaaattggatattttgtgttttttaaggttttggaaaagtttttaatgggtattattaatttggggtgaagtattttattttatatatttttatttaatgattttttgttcgtttatttttgttgtaatatggggatggtaggtattttcgttttatttattttagttttattttttttttgagtgttgtttttgtttgattattttttttttttttaatttttttttttttatatattatattttcggtatttattgagtgagaaaatgtaggtagttaatcggtattttttttgaattattggggagtaaaaattagaagagttgttataagatattatgatgagttgggtatagtggtttatgtttgtaattttagcgttttgggaggtcgaggtgggaggattgtttgaagttaggagttggaaattagtttgggtaatataggggtattttatttttattaaaaatttaaaaaattagttgggtatggtggcgtgtatttgtagttttagttatttaggatgttgaggtaggaggatcgtttgagtttaggagttggaagttgtaatgagttatgattatattattgtattttagtttgggtaatagagtgagattttgttttaaattttttttttttttttttggttaggtgtagtggtttatatttgtaattttagtacgttggggggtcgaggtgggtggattatttgaggttaggagtttaagattagtttgattaatttagtgaaatttcgtttttattaaaaatataataattagtaagatacgatggtgggtgtttgtaattttagttattggggaggttgaggcgggagaatcgtttgaatttcggaggtggaggttgtagtgagttaagatcgcgttattgtattttagtttgggcgatagagagagatttcgtattaaaaataataaataaataaataaataaaattttaaagaaaaaaatttttgtatgtataaagggtttttttatgattttttttatttaattttttttaattgttttgttagtagaggataattattgttggttgatggggaggtgaaggtagataggggtaggtgttaggttaatgaagttttgagttgggtttttagtattttttattttgtaagtataggtagtgagattaggtgttattagttttttcgattttagttttgtttttattaggggattcgttttgttgatttattttgtgtatacgtaggttttagttgtgttttgtgggtaaaatttatataggagtttttggtttagaggaagttgttttagagttgatttattatttatttattttgtaaatgttggttatggtataggtgatttgttcggtatttggcgggtatataaatttattttaaggcgtttaggttaagtatgagattgagacgtagatatttagttggttattaagtgacgagtattattgtgtttttattatgttattgtgtgggttttatatcggtgtgtgttttggaattttagagtagggaggttggagaaggtaaatggagagaatcgtagggaggggttgggtatgggagtgttggagatagtataaattttttttatggttaggtataattgaagtttgttagtagtaatatgaatttgtgattaattaagtagttgattaattgttatttttttttttttgtttttgttatttaataattataaagggttgtagagttttcgtggtagttagttatatgggagtggtaggtgaagggagtttttgattatgaggttttgatttgggattttggaatcgggggtggagtgaggtgggagttatgttttattttgttttataaagttgttttagttttttataattgaattggacgttatgatttataggttttcgcgtagttgttagtgttttttgttttttaattttagtgtagttgttagttatgagttttttttgaattttttttttggtataattggttagttttttcgtggtttttttgttttttttttattttttttttaaagacggggttttgttatgttgagtaggttggttttgaatttttgggtttaaataatttttttattttagttttttaaagtgttgggatgataggtatgagttattttatttagtttttttttttttttttttttaagagataggattatgttttgttatttaggttggagtttagtggtgtttatttagtttattgtagttttaaatttttaggtttaagtgattttgtttttttagttttttaagtagttaggattataggcgtatattatcgtgtttggttaatttttttattttttttggagatagggttttgttatgttgtttttgttggttttaaatttttggttttagttaattttttcgttttagttttttaaagtattgggattataggtatgagttatcgttttcggtttttggttttttttatgttttttttttttttatttattatttttatattttgttttgggttagggtttttaaagtagatttttggtagggatttatgggtttgtggtttattaagagatgtttttacgagagattatcgggggattgggaatttggtcggcgcgggaaggggttaagtaaagttcggttgtatagagagttatagatttgatcgagttggaaatttaggaaatagggtaggttatgttggatttggagtcggtatttttttggtagatattggttattttagaggatgtgaatttttaggtattttttatttttttagaattttggtgattaagtggtttcggtaatttgagggtataggcgatggttgttgggattttaaggttatcgagagttgatggaaagcggttttgatagtatttgttttgttttgttaagatttgttatggattgattgattgattggttgattgattgattttaagatagggtgttgttttgttgtttagtttggagaggtagtggtgtgattatagtttattgtagttttgaatttttgggtttaagttatttttttattttagtttttttaagagttgagattataagtttgtattattacgtttggttaatttttttattttttatagagatagggttttgttttgttgtttaggttggttttaaagttttggttttaaatgatttttttatttgaaatttttaaagtatagggattataagtatgagttttcgtgtttagttgattttttattgtttgttatatatatttgattataaatttgtttttttattagagtttttttagtgtttggtatagattatatgtttaataaataattgggtgaatgaatgaatgaatgaatggaagggagaagatagggatgattttgtttatttttagttgaagtaattgaggtttagggaggtgagtgatttatttaggattttatagggagtggttaatatagttaggattttatgggttttttgataatgtatttaatatttttgaatttggtttaggtggggtgatgtttttttttttagttttttcgttcggagtttaagataatttttgatttagttgggtaataacgggataataattttttttttttagattataggttttaggatttttaaggaagcgtggagggggttcgggggcgtgtttttttttagttgttttataaagggtagagggagggagtttggggtattttgtaaggattcgagttatttatttttaggttttttttttttgtacgttagttttgagtttcgagttggtgtttttgttttttgagatatggtaggtttgatgattatagtaattagttttttgttttttggtgtttgtgtttattatattatttttacgggtaagattttcgataggatgtagttttaagggtatggttgggatggtatagtggggggtgtaggattgattagtttggggttggagggaagcgttggggaaagggtggtttagtgaatggattggcggtgtttggtgtagggtttaagttttagttttgaggtttagagttaaggggaggttgggaaaagacgtggtttttttttttttttttttttagg

SEQ ID NO: 1632 - DNA, 5293 bp, Artificial Sequence
  chemically treated genomic DNA (Homo sapiens)
tttagaagaggagagagagaagagttacgtttttttttagtttttttttggttttgggttttagagttggagtttgaattttgtattaaatatcgttagtttatttattgggttattttttttttagcgtttttttttagttttaggttggttagttttgtattttttattgtgttattttagttatgtttttggaattgtattttgtcggaggttttattcgtagggatgatgtggtgggtatagatattaaggaatagaaggttggttattatggttattaggtttgttatgttttagagagtagaagtattagttcggggtttaaagttgacgtgtaggaggaaaggatttagggataaatagttcgggtttttgtagagtattttaaattttttttttttgttttttatggggtaattagaaggaaatacgttttcgagttttttttacgtttttttgaaaattttgaggtttgtggtttggaaagaggaagttgttgtttcgttgttgtttagttgagttaagggttattttgggtttcgaacgaaagaattgggggaggggatattattttatttaggttaagtttaaaggtgttggatgtattgttagaaggtttatgggattttggttgtgttggttattttttgtgggattttggataagttatttatttttttgagttttagttattttagttgaaaatgggtagagttatttttatttttttttttttatttatttatttatttatttatttaattatttattaggtatgtggtttgtgttaggtattgggaggattttaatggggagatagatttgtgattaagtgtgtgtaatagataatgagaggttagttgggtacgggggtttatgtttgtaatttttgtgttttggaagttttaagtgggaggattatttgaggttaggattttgagattagtttaggtaataaagtaagattttatttttataaaaaataaaaaaattagttaggcgtggtggtgtaggtttgtagttttagtttttggggaggttgaggtggaaggatgatttgaatttaggagtttaaggttgtagtgagttgtgattatattattgtttttttaggttgggtaatagagtaatattttgttttaaaattaattaattaattaattaattaattagtttatgataagttttgatagagtaaagtagatgttgttaggatcgttttttattagttttcggtggttttgaagttttaatagttatcgtttgtatttttaagttgtcggagttatttagttattaagattttagggaagtgggaaatgtttggaaatttatattttttgaggtggttaatgtttgttagagggatgtcgattttagatttagtatgatttattttgttttttgagtttttaattcggttaaatttgtgattttttgtgtagtcggattttgtttggttttttttcgcgtcgattagatttttagtttttcgatggtttttcgtggaagtattttttaataaattataagtttatgaatttttgttaagggtttgttttggggattttgatttaggataaggtatgggggtggtgggtgggaggaagggaaatataggagaaattaggggtcgggagcggtggtttatgtttgtaattttaatgttttaggaggttgaggcgggaggattgattgaggttaggagtttgagattagtaggggtaatatagtaagattttgtttttaaaagaaatagaaaaattagttaggtacggtggtatgcgtttgtagttttagttatttgggaggttgagggggtaggattatttgagtttaggagtttgaggttatagtgagttaggtgagtattattgaattttagtttgggtgatagagtataattttgttttttaaaaaaaaaaaaaaagaaaggttgggtgaggtggtttatgtttgttattttagtattttgggaggttaaggtgggaggattatttgagtttaggagtttaagattagtttgtttaatatagtaaaatttcgtttttaaaaaaaaaataaaaagaaaataaaaaaattacgggaaaattggttaattgtgttaggaggaaagtttaggagggatttatagttgatagttgtattgaggttggaggatagaaggtattggtaattacgcggaagtttgtaagttataacgtttagtttagttgtaagggattgaggtaattttatgaggtagagtgggatatggtttttattttattttattttcgattttaggattttaggttaggattttatgattagagattttttttatttgttatttttatgtggttgattgttacggaggttttatagttttttgtaattattgggtaataagaataaggaggaggaggtaataattggttagttgtttaattgattataggtttatattgttattgataggttttaattatgtttaattataagaaagatttgtgttgtttttaatatttttatatttaatttttttttacggttttttttatttgttttttttaatttttttgttttgggattttagggtatatatcgatgtaagatttatatagtggtatagtgggagtatagtggtattcgttatttggtggttagttgggtgtttgcgttttagttttatgtttgatttgaacgttttgagataaatttatatattcgttaagtgtcgagtaaattatttgtgttatggttagtatttgtagaatgaatagatgatggattaattttgaaataattttttttggattagggatttttgtgtgggttttgtttatagagtataattggagtttgcgtgtatataaggtaagttagtaaggcgggttttttgatggaggtaagattgaagtcggggaggttggtagtatttgattttattgtttatgtttatagagtgaaaaatgttgagagtttaatttagggttttattagtttggtatttgtttttgtttgtttttatttttttattagttaatagtaattattttttgttggtagagtaattagggaggattaagtgagaaaagttatgggaaggttttttatatatgtagaggtttttttttttaaaattttatttatttatttatttattatttttgatacggagtttttttttgtcgtttaggttggagtgtagtggcgcgattttggtttattgtaatttttattttcgaggtttaagcgattttttcgttttagtttttttagtagttgagattataggtatttattatcgtgttttgttaattgttgtatttttagtagagacgggattttattaggttggttaggttggttttgaatttttgattttaggtaatttatttatttcggttttttaacgtgttgggattataggtgtgagttattgtatttggttaaaaaaaaaaaaaaaaaatttgagataaggttttattttgttgtttaggttggagtgtagtggtgtgattatagtttattgtagtttttaatttttggatttaggcgatttttttgttttagtattttgagtagttgggattataggtgtacgttattatgtttagttaattttttaaatttttagtagagatggggtatttttatgttgtttaggttagtttttaatttttggttttaagtaatttttttatttcgattttttaaagcgttgggattataggtatgagttattgtgtttagtttattatgatgttttatgatagtttttttaatttttgttttttagtgatttagaggggatgtcggttgattgtttgtatttttttatttagtgggtgtcgggagtgtggtgtgtggggaggaggaagttggggggagaaaggatggttagatagaggtagtatttaggagaagagtgaggttggggtaaatagggcggggatgtttgttatttttatgttgtaataggagtgggcgagtagaaggttattgggtgggagtgtgtggggtggggtgttttattttagattagtaatatttattaagggtttttttaaggttttaaaaaatataaaatatttaatttttttttttttttgagaagagttttattttgttatttaggttgtagtggaatggtttgattttagtttattggagttttaatttttcgggtttaagtaatttttatgttttagttttttgagtagttgggattataggtatttattattatatttagttagtttttgtttttttagtaaagatgggattttattatgttagttaggttggttattaatttttgattttaagtgttttatttatttcggttttttaaagtgttgggattataggtatgagttatcgtattgggttaaaatatttaatgttttgttgttgttgttgttgtttgttttgtttttagatatagtttttttttgttatttaggttggagtgtagtggtatgattttggtttattataattttcgttttttaggtttaagtaatttttttgttttagtttttcgagtagttgggattatagatgtatattattatgtttggttaatttttatatttttagtggaggcggggttttattatgttggttgggttagttttaaatttttaattttaagtgattcgtttatttcggttttttaaagtgttgggatgattagtatgagttattttatttaattaaaatttttaatttttatgttttatatagggaaattgttaaggtagggattattaattttgttttacgagggaagagttgatgttttgtaaggataagtgagtagatattattatagggttatttagttttcgaaatgggagtttatttttattataaatataaaaattagttgggcgtggtggtacgtatttgtagttttagttattcgggaggttgaagtaggagaatcgtttgaatttgggaggtagaggttgtagtgagtcgagatcgtattattgtattttagtttgggtgatagagtgagatttcgttttaaaaaaaaaaaaaaaaagaaagggagtggttaggtaaaaagagaaagagttaggtgtaatggtttatatatgtaattttagtattttgggaggtcgaggtgggaggattgtttgagtttaggagtttaagtttagtttgggtaatatggtaagattcggattttttaaaaaaaaaaaaaaaattagaaagaggaagagggaagtagtagaagtgggaatttggtaggggtagaaatagtatgtgtggaggaggttggagggtgggtggg

SEQ ID NO: 1633 - DNA, 8103 bp, Artificial Sequence
  chemically treated genomic DNA (Homo sapiens)
ttgtattaagtattttttttgattatagtgatacgaaattagagattaataataggaggaattttggaaaatttatacgtgagaatttaataatatttttttaaataattaatgtgttaaagaagaaattaaaacgaaattaaaaaatattttgaggttaggtgtagtggtttacgtttgtaattttaatattttggtggttgaggtaggaggattatttgaagttaggagtttaagattagtttgggtaatatagtgagacgttttttttatttttataaaaaataaaaataattagttaggtatggtgatgtttatttgtagttttagttatttgggaggttaaggtgggaggaatatttgagttggaggttgtagtgagttacgattgtgttattgtatttagtttgggtgatagagggagatgtttttaaaaataaaataaaataaatagaaataataataataaaaaatttgagataaattgaaatggatatataatatatttaaattaatgaatgtagtaaaagtggttttaagagggaagtttatagtaataaataaatgtttatataaaaaagaagaaagattttttaaataattaaattttttttaaaaagaggtaattggaggttgggtatggtggtttaagtttgtaattttagtattttgggaggttaaggttagtaggttatttgaggttaggagttcgagattagtttgggtaatatagtgaaatgtagttttttttaaaaatataaaaattagttagatatggtggtaggcgtttgtagttttagttattcgggaggttgaggtaggagaatcgttttaattcgggaggtggaggttgtagtaagttaagattttgttattgtattttagtttgggtaatagagtaagattttgtttcgaaaaaaaaaaaaaaaagaggtagttgtgggtataataggagtttaggtttggtagacggggtttttggggtgtggattgttttttataagattcgtgattatgtagggtagtgggggtttattagaagttaagagttttattagggatttggaggtattagagtttaggagagttgtaggtagttggggtttgatatgtaaaagtgattataggaggatttttatttttgtttatagtgtttttttagtgtttttgagtttttgtcgatgattttttagttatttgttttatggcgtttttttattgggggattgtttttttttttatagtatttaagaaataaaaattagatttttttggttaataaaaaaagtaagtaatttggtttttttgatttttaatttttttttttgtatagttgggttaatggtgagtatttaggagtattttttattttattagaggtgtttgttattgggtagggtagatgtggtggtggttggtgtaggttttttagaatattttatcgtttttgtttattatttggttattgtaattaattgggtttgtttagaaagatatttgtttatttatttaattttgtaggttttggggtattggtttttgaatttggttgagttataggatggagattatttttaattgtttttattattagaggtgtagaatagaagtcggtgtggggggtatttgttttttttagttgtgttgattttatattggcggagaagaggatttttgttgatagcggattgtttttttatttttttatgagatggagttttgtttttgttgtttaggttggagtgtaatggtaagattttggtttattgtaatttttattttttgggtttaagtaatttttttgttttagttttttaagtagttgggattataggtgcgtattattatgttcggttattttttttttttttttgtatttttagtagagatggggttttattatgttggttaggttgatttcgaatttttgattttaggtgattcgttcgtttcggttttttaaagtgttgggattataagtgtgaattattgttttcggtcgatagcggattatttttaatgtttttagttgttgtaggagtggaagaggttagtttagtttcgattgtgaaggtttggtttttatttaaagtaattgtggtttttagaatttcgggattatttcgttttttgttttaatttttgggttttaggtttttagcgcgtttattttagtgtttcgtgtttgttggtttttggagggtttttttattgggaatttttttttttcgtgaaggttgtcggcgggataaatagtgaggggtgaggtagggagggagatttacgttggggattttttttaagtttgggtaatatcgttttggtcgcggttcgcgggttgggaaggtagggggtagtgagtcgtagcggagaggttggttttagttcgttacgtcgtttttttacgttcgtagttacgcggagtcgcgttttggtttagttttatttatttagagtaagaggcggaggaattggaatagcgtttcggttcgtgggttgttattggtcgtagtaacgggacgggtgagagtatttgttttcgacgcgttttaattgttttggtgggggcggggttgatcgtgtaagtttcgttttagtttaagttttttttataaagttcggttttttattataagcgttatttgttaggtttcgtttattgttttaaattttatttattttgttttgtttttgattcggagttatatagtaagtttcgtttatagttataagttacgtttatttagttttgtttttgggttttaagtgttatttatttagttacgttttcggttagaagttatatttattaggttcggttttatttttaagttttatttattcggttatgtggtttgggatagggaagtaggttaggggtcgtcgtttttgggtttttagtggaaggggagaaatgagaaaggagtttaggatgtgataaatatttatagaggttagatgtagttatggatgtaggcgataaaaagtttaaagtaattagttgtgcggtttttgtagcgtttttttcgttttttttaatttttatttcgtgttttttttagtttttgtgttttggttgggttttgttgttttagggaaagaagatatgtttttttttattttggttaatatggtgaaatttcgtttttattaaaaatataaaaaattagttaggcgtggtggcgggagtttgtagttttagttattcgggaggttgaggtaggagaatggcgtgaattcgggagacggagtttgtagtgagtcgagatagcgttatcgtattttagtttgggtaaaagagtaagatttcgttttagaagaaaaaaaaaaaagatatgttttttcggtgaatgttgttttgttttttgagggtatggttattcggggtttttggttttttttttaaaaataaaatattttttttatttttttttttttttttgtttttttttttttttttttttttgagatagagttttatttttgtcgtttaggttggaatgtagtggtttaatttcggtttattgtaattttcgtttttcgggtttaagcgatttttttgttttagttttttgagtagttggaattataggtgtttttttattatattcggttaatttttgtaattttagtagagatggggttttgttatgttggttaggttggtttcgaatttttgattttagaggattcgtttgtttcggttttttaaagtgttggtattataggtgtgagttattgtgttcggttatcgtttttttttttattttttgagatagggttttgttttgttgtttaggttggagtgtagtggtatgattatagtttattgtagttttaatttttaaggtttaagtaatttttatattttagttttttgagtggttgggattataggtatgtattattacgttaggttaattttttaaaaaatttttgtagtgacgtaggtttttttatattgttcggggtggttttgagtttttgggtttaagtaattttttggtttcggttttttaaagtgttgggtttatagatatgagttattatgtttggtttagagagttttttttttgttggggttgtttatcggtgggaggtgtattattgtgtcgtgttgattatatttatagagttatgtaattattatttttatttaattttagaataaaaggaaatttatatttttttatagttagttttttatttttttttttttttattttgtggttatcgttaatttattttttgtttttatggatttgtttgtgattataattagaggatttttgtgatatgttaagttatttaattatggtgtggaaggagagggaaatggagtgaagttggggatttattagggaataggtggtttgagggcggggggagtatgaaggtaagggtttgtttgggggtttaaggtagtttgagttttgttcgtaggtagttagtgtttattaggtgtgtgtaggtgagggaaataggggaaaaggttttttttggagatagtaggggtgttggttgggaggtttgggatggggagtggggaggtaagggggtttgtgggtcgaggttggagtttgttgtagaagagggagaattttagaggttgagagtgtaggtggagaggaggaggaagggaggagggcgggtagggggtggttgggtggggttttgtttataaagagtgaagtttagcgtgttggttttgtagatgggatagtttggtttatagttcggcgggtattagtttttttgatttagtggatatcggtgagttttttttttgaatatgattgagatgaatagtttttttttttagtataatttgtttttattttatataattttttttttttgttatatgtttggggtttaagaggggggatgtttttagtatttatttttttttttttttttagtttttattatttttttttacgattttaggtggtttcgttattcgtttaggtgtttagggaggaggattcgtttgtagtatgaatttgtggtttttggtttgtttggtggtcggttttttgggagtttgggttttcgttgtttatatttaaggtattgtgttcggtaatgtttattattaagtgtttttttttttatgtttttattttattttttttgttttttatttttttcggaagtttttttaattttatttttattgaattttttcgtttttgatatgtaggaatttttggtgtttggttagtttttgggatggggtcggggagatggagagtttttagtttttttttcgagagttttatggagttttttgtaagatttttaaagatgtgagggagtagagggtggtttttagttgtgggtaaagttagttattgttagggatgtattgtagaattttaattttgtcgagttaggggtggggttggagattagggttttggagattgataagagtggatttttattttggtttttttatgtagtttagttgagagttagttgtttttaaattatttttttttttttttttttgagatagagttttattttgttattttggttggagtgtagtggcgcgattttggtttattgtaattttcgttttttgggtttaagcgatttttttgttttagttttttaagtagttgggattataggcgtgtgtattatgttcggttaatttttgtattttttagtagagatggggttttattatgttggttagagtagtttcgattttttgattttaggcgattcgtttgttttagttttttaaagtgttaggattataggtttgagttattgtgttcggttttttaaatttttaggagttttcgtttttttagttgtaaagtgggaatttaaaatttttattgtatggttttgatttgagggtttagtgagtttatgtttgtaaaagattaggttttatgtttggcggcggtaatagtaattgtttttgttattaatagggaatttttttttttttttttattttttatcgtagagtaagtatttgaggattttagtcgttaaaggataatttttgggtttggggtgtttttacgggagttttgatattgggttttatattttttgagttttagtagttggttaaagtagggtttttggttgggcggtagatttagggttttattttttttttttgtttgtttttatttgatttatttgtttttcggttgggtttgatgggtttaagtttttggtttttgtttgggaagggggttgggttgtggtttgattgttttgttattagagttaggtttagtttagtttttcgattttggtttttagttttgggaattatttgtttggtattgtagttcgaggttttaatagaatgcgttgttttttgtttttagaggtcgcggttgggagatatttggagggttcgagttttttttttttttgtttttgttgggttgggttttgtagggatttagattcggtttttggaggttagttttggtagaggtgagattgtagagaattttaaaggttatttaggtagagaattgtattttagttttttttattattttattagtttattttcggtttatttattttatttgtttatttttttagaattttttggtattattttttttttttttgggtattttttatagtgtttgtgtttttttttttttgtagagattagtttttcgggagttttttgaagataatattaggtttaatttatttgtgtgttttatttttgtttgtttagatattgatatttattgagagttttttattttgtattaaaataattttttgtttgtttggttggtgttttgttttgttttattgagatagagttttgttattgtcgtttaggttggagtgtaatggcgtgatttcggtttattgtaatttttattttttgggtttaagtgatttttttgttttagtttttagagtagttgggattaaaagcgtttattattagttaggtatagtggtttacgtttgtaattttagtattttgagaggttaaggcgggtggattataaggttaagagattaagattattttggttaatatggtgaaatttcgtttttattaaaaatataaaaattagttggtcgtggtggcgggcgtttgtaattttagttattcgggaggttgaggtaggagaatcgtttgaattcgggaggtagaggttgtagtgagttgaaattgagttattgtattttagtttgggtgatagagtgagattttggaaaaaaaaaaaaaaaaggcgtttattattatgtttggttaatttttgttttttgttttgttttgttttgagacggtgttttattttgtcgtttaggttggagtgtagtggcgcgatttcggtttattgtaagttttgtttttcgggtttacgttatttttttgttttagtttttcgagtagttgggattttaggcgtttattattatattcggttaatttttatatttttagtagagacggggttttatcgtgttagttaggatggttttaattttttgatttcgtgattcgtttattttggttttttaaagtgttgggattaaaggtatgagttatcgcgttcggtttaatttttatattttttagtagagacggggttttattatattggttaggttagttttaaatttttgattttaggtgatttatttattttagttttttaaagtgttgggtttataggtatgagttattgtgttgagttgttaattagtttatttttaggagggaagaatttggttggggaggggtggtgttggtttttttttatagtgtatttgtatttcgagttatttttttttttagagtaggagtagaggtggttttggttcgtttatttgttggttttatattttttttagtcgggatttaagggttttttttaatttttggttgttttaatatttagggataaggggtgagttaggaggtttttttttttttaaggttgttttttagtttttgtcgggtttggaagggttgtggtatgagtagataggtatgtagataggtgtttttgtttgtggttggttttgttaagttaatatgtaagggtgcgagtatttgggcggttgtgtggttgtagg

SEQ ID NO: 1634 - DNA, 8103 bp, Artificial Sequence
  chemically treated genomic DNA (Homo sapiens)
tttgtaattatatagtcgtttagatattcgtatttttgtatgttaatttggtagggttagttataggtaagggtatttgtttgtatatttgtttgtttatattataatttttttaggttcggtagaggttgaggaatagttttaggaaagaaaaagttttttggtttattttttatttttggatattgggatagttagaggttggagaggatttttgggtttcggttgggaagggtgtggaattagtaaatgaacggattaaggttatttttatttttgttttggggaaaagggtgattcggagtgtaggtgtattgtgaggaggggttaatattatttttttttagttaagttttttttttttaaaaatgagttgattggtagtttagtatagtggtttatgtttgtaaatttagtattttgggaggttgaggtgggtggattatttgaggttaggagtttgagattagtttggttaatatggtgaaatttcgtttttattaaaaaatataaaaattaggtcgggcgcggtggtttatgtttttaattttagtattttgggaggttaaggtgggcggattacgaggttaggagattgagattattttggttaatacggtgaaatttcgtttttattaaaaatataaaaattagtcgggtgtggtggtgggcgtttggagttttagttattcgggaggttgaggtaggagaatggcgtgaattcgggaggtagagtttgtagtgagtcgagatcgcgttattgtattttagtttgggcgatagagtgagatatcgttttaaaataaaataaaataaaaaataaaaattagttaggtatggtggtgggcgttttttttttttttttttttagagttttattttgttatttaggttggagtgtagtggtttaattttagtttattgtaatttttgtttttcgggtttaagcgatttttttgttttagtttttcgagtagttgggattataggcgttcgttattacgattagttaatttttgtatttttagtagagacggggttttattatgttggttaggatggttttgattttttgattttgtgatttattcgttttggttttttaaagtgttgggattataggcgtgagttattgtgtttggttgatagtgggcgtttttaattttagttattttggaggttgaggtaggagaattatttgaatttaggaggtggaggttgtagtgagtcgagattacgttattgtattttagtttgggcgataatagtaaaattttgttttaatgaaataaaataaaatattaattaaataaataaaaaattgttttaatataaagtaaagagtttttagtaaatgttaatgtttagataagtagagatgaaatatatagatgaattagatttagtgttgtttttagggagttttcgggaaattgatttttgtagaaagggggaagtataggtattgtggggggtgtttagaggaggaggaggtgatgttagaaagttttggggggatgagtaggtggaatgaatgagtcgaggatgagttgatgagatagtggaggaagttggggtgtaattttttgtttaaatggtttttggagttttttgtaattttatttttgttagaattaatttttagaggtcgagtttgagtttttgtagagtttagtttagtaggagtagggaaagggaggattcgagttttttaggtgttttttaatcgcggtttttgagggtaaggggtagcgtattttgttggaatttcggattgtagtgttaggtaggtagtttttaaggttggaggttaggatcgaagggttgggttgggtttggttttgatagtaaaataattagattatagtttaattttttttttaggtaaaggttaaggatttggatttattagatttagtcgaggggtaggtgggttaggtgggggtagatagggaaggagggtgggattttgggtttgtcgtttagttagggattttgttttggttagttgttgaaatttagaggatgtaggatttagtgttagggttttcgtggggatattttaggtttaggaattgttttttggcgattgaaatttttaagtgtttgttttgcggtagggagtggggaagaaggaaagagttttttattaataataggaatagttattattgtcgtcgttagatatgaggtttagttttttgtaggtatgagtttattggatttttaagttagagttatgtagtgggaattttagatttttattttgtagttgaggaaacggaggtttttaaaggtttaggaagtcgggtatagtggtttaaatttgtaattttagtattttgggaggttgaggtaggcggatcgtttgagattaggagatcgagattattttggttaatatagtgaaattttatttttattaaaaaatataaaaattagtcgggtatggtatatacgtttgtagttttagttatttgggaggttgaggtagaaggatcgtttgagtttaggaggcggaggttgtagtgagttaagatcgcgttattgtattttagttagggtgatagagtgagattttgttttaaaaaaaaaaaaaaaaaaatggtttaggagtaattaatttttagttggattgtatggagggattaggatgggaatttatttttgttagtttttagggttttgatttttaattttatttttggttcggtaggattaggattttataatatatttttggtagtaattggttttgtttatagttggaagttattttttgtttttttatatttttaggagttttgtaaaagattttatggggttttcgaagaaggaattggggattttttattttttcgattttattttaagagttaattaaatattaggagtttttgtatgttaggagcgggagaatttagtggagatgggattggggagattttcggaggagataagagataaaaggggtggggtgggggtatggggagaggggtatttggtggtaggtattgtcgaatatagtattttgggtgtggatagcgggggtttaggtttttaggaagtcggttattaggtaggttaggagttataggtttatgttgtaggcgggtttttttttttgggtatttggacgaataacggggttatttggggtcgtggagggaagtggtaaggattgaggaagaggaggggagtgggtattgggaatatttttttttttaagttttaggtatatggtaagggaaggaggttgtataaagtaggaataagttgtgttggagggaaaagttgtttattttagttatgtttaaggaaaagatttatcgatatttattgggttaagggagttgatgttcgtcgggttgtaggttaagttgttttatttgtaggattaatacgttgagttttattttttatagatagagttttatttagttattttttgttcgtttttttttttttttttttttttttatttgtatttttagtttttggaatttttttttttttatagtaagttttaatttcgatttataggtttttttgtttttttattttttattttaggttttttagttagtatttttattgtttttagaaagggtttttttttttgttttttttatttgtatatatttggtggatattggttgtttgcgaataaggtttagattgttttgagtttttaaataagtttttatttttatgtttttttcgtttttaagttatttgttttttggtgggtttttaattttattttatttttttttttttttatattatggttaggtaatttagtatgttatagaaattttttggttgtgattataggtaaatttatagaaatagaaagtaaattagcggtggttataggatggggggaggggagaatgaaggattgattgtgagagggtatgggtttttttttgttttgaaattagatgagagtgatggttatataattttatgaatatagttagtacggtataatggtgtattttttatcggtgaataattttaataagaaagaaattttttaggttaggtatggtggtttatgtttgtaagtttaatattttgggaggtcgaggttagaggattgtttgagtttaggagtttaagattatttcgggtaatatagagagatttgcgttattataaaaattttttaaaaaattagtttgacgtagtagtgtatatttgtagttttagttatttaggaggttgaggtgtgaggattgtttgagttttggaggttgaggttgtagtgagttgtgattatgttattgtattttagtttgggtaatagagtaagattttgttttaaaaaatggaaaaaaaaacggtggtcggatatagtggtttatatttgtaatattagtattttgggaggtcgaggtaggcggattttttgaggttaggagttcgagattagtttggttaatatggtaaaattttatttttattaaaattataaaaattagtcgagtgtggtgggggggtatttgtaattttagttatttaggaggttgaggtaggagaatcgtttgaattcgggaggcggaggttgtagtgagtcgagattgggttattgtattttagtttgggcgataagagtgaaattttgttttaaaaaaaaaaaaaaaaaaaaaaataaaagaaaaagaaaaaatggaagaaatgttttgtttttggaagaaaagttaggagtttcgggtagttatgtttttaggaagtaaagtaatatttatcgagaaggtatgtttttttttttttttttttgagacggagttttgtttttttgtttaggttggagtgcggtggcgttgtttcggtttattgtaagtttcgtttttcgggtttacgttatttttttgttttagtttttcgagtagttgggattataggttttcgttattacgtttggttaattttttgtatttttagtagagacggggttttattatgttagttaggatgggagaaggtatgttttttttttttggggtagtaggatttagttaggatatagggattgggggagatacgaggtgaagattagggagggcgaaaggagcgttgtagaggtcgtatagttgattgttttaaattttttatcgtttgtatttatagttatatttgatttttgtgggtatttattatattttaaattttttttttatttttttttttttattgggagtttagaggcggcggtttttagtttatttttttgttttaaattatatggtcgggtgagtggggtttagaggtggggtcgggtttggtgggtgtggtttttagtcggggacgtgattagataaatgatatttagagtttaggggtagggttgggtgggcgtggtttatggttatgggcggggtttgttatatggtttcgagttaggggtagggtagagtgagtgggatttaagatagtgggcggagtttgatagatggcgtttatggtaaggggtcgggttttgtaggaggggtttagattggggcggggtttgtacggttagtttcgtttttattagagtagttaagacgcgtcgggggtaggtgtttttattcgtttcgttgttgcggttagtggtagtttacgggtcggggcgttgttttagttttttcgttttttgttttgggtgggtgaggttggattaggacgcggtttcgcgtggttgcgagcgtggggaagcggcgtggcgggttggggttagttttttcgttacggtttattgttttttatttttttaattcgcgggtcgcggttaagacggtgttatttagatttgggggaggtttttaacgtgagtttttttttttgttttattttttattgtttgtttcgtcggtagtttttacggggaggaagggtttttagtaagggggttttttagggattagtaagtacggagtattggggtgggcgcgttggggatttgggatttaggggttggagtaagaaacgggatgatttcggagttttgaggattatagttgttttgagtaaaggttagatttttatagtcggggttggattggttttttttatttttgtagtagttgggggtattaagagtaattcgttatcggtcgggagtagtggtttatatttgtaattttagtattttgggaggtcgaggcgggcggattatttgaggttaggagttcgagattagtttggttaatatggtgaaattttatttttattaaaaatataaaaaaaaaaaaaaaatagtcgggtatggtggtgcgtatttgtaattttagttatttgggaggttgaggtaggagaattgtttgaatttaggaagtggaagttgtagtgagttaagattttgttattgtattttagtttgggtaataagagtaaaattttattttataaaaaaataaaagagtagttcgttattagtaagggttttttttttcgttagtgtgaaattagtatagttggggggaataagtgttttttatatcgatttttgttttgtatttttgatgatgggagtagttgagggtggtttttattttgtagtttagttaaatttagagattaatattttagagtttgtagggttgggtgggtaggtaggtgtttttttagataagtttagttggttgtagtggttaggtggtgggtaggggcgatgagatgttttgggaagtttgtattagttattattatatttgttttatttagtggtaggtatttttagtgggatgaaggatgtttttgggtgtttattattggtttaattgtgtaaaggaggagattgagggttagagaagttaagttatttattttttttgttggttaggaaaatttaatttttattttttaaatattgtgaagaaaaggatagttttttaatggggaagcgttatagagtagatgattgggaggttatcggtaaaggtttaggggtattgggagaatattatgggtagaagtgggggtttttttgtagttatttttgtatattagattttagttgtttgtagtttttttgaattttggtgtttttaggtttttgatgagatttttggtttttgatgggtttttattgttttgtatggttacgagttttgtagggagtaatttatattttaggagtttcgtttgttaggtttggatttttgttgtatttatagttgttttttttttttttttttttcgagatagagttttgttttgttgtttaggttggagtgtagtggtaggattttggtttattgtaatttttatttttcgggttgaagcgatttttttgttttagtttttcgagtagttgggattataggcgtttattattatgtttggttaatttttgtatttttaggagagattatattttattatgttgtttaggttggtttcgaatttttgattttaagtgatttgttggttttggttttttaaagtgttgggattataggtttgagttattatgtttagtttttagttatttttttttaaagagaatttggttatttgaaagatttttttttttttttatgtaggtatttatttattgttataaattttttttttagaattatttttgttgtatttattggtttaggtatattgtatgtttattttagtttgttttaagttttttgttgttgttgtttttgtttgttttattttgtttttagaaatatttttttttattatttaggttgagtgtagtggtataatcgtagtttattgtagtttttaatttaagtgttttttttattttagttttttaaataattgggattataggtgagtattattatgtttggttaattatttttattttttgtagagatggggggagcgttttattatgttgtttaggttggttttgaatttttggttttaggtgatttttttgttttagttattaaagtgttgggattataggcgtgagttattgtatttggttttaagatattttttaatttcgttttaattttttttttgatatattggttgtttaggagagtgttgttgaatttttacgtgtgaattttttagaattttttttgttattgatttttagtttcgtattattgtggttagaaaagatatttgatataa

SEQ ID NO: 1635 - DNA, 5845 bp, Artificial Sequence
  chemically treated genomic DNA (Homo sapiens)
taagaaatggttagagaaaataataaggatttaggataggaaataaagggttggttgtagaaagaaggggttgtgttaatgagatattgtttgtttaagatattagataggggattttaggttgttgtttttgtttgtatgaaaggtggggtttatatttgttgtaatttgattacgtagattatatatgaggaaaggaggttaaagttgggttaaagagggtgttattattagtgaacgtatttttggggtgtttgttgttaaaggagatagtagagggtgatatttggggaagtggggtttcggggttagaatttgaaggaaagtaatgcgtcgtattagagagtacgagtagtagtacgtagtggggaggtaagttgagtagtgtaaggtaaagacgtcgtagaggataaattgtttagttaggatttttcgtattgcggattgggacgttttgttggattgaggtggggtttcgtagaggttgaaatgagttagaacgttgggatataaattaaatttttttatgttgaagggtttatggtgttgattgttggttattttttgttattattatttaaggaattttgggtggttagttttttaaagattaagattgtgatattatggtttttttttttttttttttttttttttttttttttttttttttttttttttttgtttttttttttttttttttttttttttttttttttttttttttttttttttttttttttttttttttttttttttttttttttttttttttttttttttttttttttttttttttttaaagtaaattataattttttagattaagttattgaaaatttttttatataagtttatatttttttttttaattgtatttttattacgatatttaattttattttttttttttttttttttttttttgagatagagtttcgttttattatttaggttggtcgtagtggtgcgattttggtttattataattttttaggttttggtgatttttttgttttagttttttaagtatttgggattataagtatgtgttaatacgtttggttaattttttgtatttttagtagagatgggttttattacgttggttaggttggttttaaatttttggttttaggtgatttatttatttcggtttttaaaagtgttgggattgtaggcgtgaattattatgttttattttaatttttattttatttaaagatttttttttggttatggagatttattatatttttgatttttttttttgattttgtgtgtgtgtgtgtgtgtgtatgtgtgtgtttgttttattttaagtttagggatgtatatgtaggtttgttatatatgtaaatttgtgttatgggggtttggtgtataagtgattttattatttaggtattaagtttagtatttattagttattttttttgatttttttttcgtttttatttattatggttttttttattttattttttttattagtattttaattttatagtgagagtttaggtataatatatattgttagttaaattagtgatttatttatttattaaatagttattatgttttattatatgttaagtattgtgattattattggagatatattggtagttaatatagatagtggaatataaaattgattaattttatttatatgattatgggtacgttattttaattgggaatattaatttattatttaggaaatgtttaagatttttttaatttaatttcgttttatattttttttatattatttatttaatgtatataaattaagtatatgttgtgtatgtaattatattttaatttaagtaaaatatatggtaaagggatagtttttggtttggggattgatagagaaagttttataaatatataaatattgagatagaattatatatttaataaattatttttattataaagaatataataataagagatagagattaggttacgaggtttattatgttataattattatgtgttaggatttggtttaaattaattaataagatatggtttggagttggtttataatttgagaagatattttaaaaaatttattattataggagtgttgtgaggattaaatataataagttgtggtataggatgtgtagcgtgtggtatttagagttagattatttggatttgaatttttgttttgttagttattagttttacggttttcggaaaattgtttaatttttatttattttggtttttttatttatttaattgagaaagtatattggtaattaaattatagggttgttttgaagatagtttaaacgtgaatttttattatggaaattagtatatggtgattatttaataaaaattatatattgtgaattaaaatttgtgtagttgttaatttattattagcgcgaaataaaaatttgtttttaaatttttatattgtttttattaaattataaattttttgagaaaaagaaattaaaataaaattaatagggtatggtttagatttttgaagagtaaattatatagataattaattataatatacggtgttgtaattatagagatagaagatgttttttattagaatattgattgatttagtagtttttattttttttttttattttttataatttatagaagttagtttttagaaatggaattacgagtatggagggggtttttttaagaagtgagtgagggaatgtaattttgggtattattgagagttgggaggtagagggtggggtgagaaggaggtattgtttgtgatgtaggtttttaatgatataagtggtagagatatttttatttggaattggtagtaataggggaagatatatggatgttaaagtttcggtgaaatttattacggtttttgattttgtttttgtttttttttttttaagattggtattagttattattggggtgggaaggaaatagagtttatgtgtattaaaagatttaagtttatagatatttagaaaggatagaattttaaaggtatggtcgtatttggtttttgttttttgttattttttagtattaaatgtattaattttaatttttttggggggaatataaggtttgttttggtttggttttaatttagttttattatttatatttatttttattgttttgtagttttattgaagtatttttttttttttttgaatttataatgttatatttaggattttgttttagttgggtatttatttatagatgtttaaatttcgggtagttatttagatataattaaagttttattttttttatgaagttttttttaattttttggtggaaggttatttttttttttcgtgggattttgagtttttatttttttttttattaggagttttagtattttcggttaaatgttataattatttgtttatatattttatttgtttttacgagattaggggtattttagaaataaagattattaaaattaattaaatttattttttattataaaatgaggtatgttgattgattgtgaaagaataaaataataaagtacggaaaagaaaaaaaagtatataatttggttgagaaggtagagatttttttatattattgaaattatgtattgaaaagaataagtaaaaaattgttttaatttggtatgatttatgtaagtatagtataggatttttaaaatggtttaaagaaatgggaaattaagattttattttggttaaaattattgaatagaaattttagtatatttattaataattttttttagattaaataattgataataatttattttttaattagtgatgttggaaatgtttttttaaaaattagtttataaatttgtgggttgattaagaaggtaataaagtttaattaagtaaaatgagaaaaatttagaaaaagaaaaaaataagaaaataaattatttagggatttattatataaatataagaattatttattttttaaggtatgtatttttaagtttttgtatttttttttatgtttagggttggtaaggaatatatatatatttgtataaatatatatgtgtatatgtataaatatatgtatatatagtataaatatatatatttgtataattttttagattttgtagaatttgtataatgtcgtattttgttttttttaattattgatgttataagtatatttatgttattttatttattttagagatttaataataaatgatttagtggataatttattattttttgatggagaaaaatttagttttgtttattttagagttataaacgatgttgggttaggtatttttatgtttgaagatggttttatatttgggttgtttttatagaatttttttttagaaatgttttttttaggttaatggttatagatatttttaggtatttgatatattgatatttatttttaaagtatttttatgatttataattagcgtttaatatagcgttttagttattatatgattaataaatagataaatgattgaaatatgattttatgttttttatttttttagtttttatttagttttttgtttttgggaggaggaagggttgtgtagttttttatagtattagtttattaattttatttttgtggttatagtagttgaggaagtagaattgtagttttgtgggaaggaatggggttggagagtttatgtatagattagtttttatgagaagggattgattaagaatagttttgggttgatatatatttttttttatatttataggagaaattatttttttatgaaattataataagttatgagttgagagttgagagttagagaatagtttaaagatgttatttttggatattttgagtttttgtggttattagggattttgagttgtgtaatttagtatgatagtattattacgtttaaaaatttttttttttatttttagattttatttttttattcgttagggttgtttataaagaggagagttggttttagattttagaaggatacgggtagtagatagtggttagtttttttttggttttgttgatattcgagtttatatttcgttatttgtttagaattatgtaggtttttattgttgtttttgttgtttttttttgtattatggttttttgtaattagttttttgtattacgtgagtttgagtttcgttgtgggtattattattttttggttatggttagattatattaatttttttttgtggtttaaaagtttttaagagaaaagagaattttttaaagggttgttaaatattttggtttttttttttaagatttttatttttatttttagaaggggttttagttttttagtttttaggtatgagaatttaggtaggggtaggggagttatagttttttttatagatagaaaaatagggttcgaaacgaattagttagtaagaggtagaatttagggttgtttattttttagtggggtatgttgtttattttttagtttattttaggttttttaggagttttgttttttggatgttttatgagagatgtttaaggttttttttgggttggggtatgattttttgaattagataaaattttttgaagagaattgagataagagaatagttcgtttaggtatttggattatatagagaaatagagaatttattatgaagagttaaggagaaagaaggatatagatagaaataaagagatattttttagtaaaaatgtttaaatgttttttagttatttggtttgagtaagtttgttttttttaattgttcggggattagaagttgtttggtttttttttttgagttgtgattcgggtttattttttttttttttttatagt

SEQ ID NO: 1636 - DNA, 5845 bp, Artificial Sequence
  chemically treated genomic DNA (Homo sapiens)
attgtggagaaaggaagagaatgagttcgagttatagtttagaagaaaaggttaggtagtttttgattttcgagtagttgaggaaggtaggtttgtttagattaagtgattggaaggtatttgggtatttttgttgagaaatgtttttttgtttttgtttgtatttttttttttttttgattttttatagtgggttttttgtttttttgtgtgatttagatatttgaacggattgtttttttattttagttttttttagggaattttgtttggtttaagaagttatattttaatttaagagaaattttggatattttttataagatatttaagggatagagtttttgggagatttagagtgagttggagagtgaataatatattttattgggaagtaagtagttttggattttgttttttgttaattgattcgtttcgaattttgtttttttatttgtaaaagggattgtaatttttttgtttttgtttagatttttatatttggagattagggggttaagattttttttagagataaaaataaaagttttaaagagaaagattaagatgtttggtagttttttaagaagttttttttttttttgggggtttttaggttataagaaaagattgatgtggtttaattatggttagagagtggtgatatttataacgaaatttagatttacgtgatgtagagaattggttgtagagagttatggtgtagaggaggatagtaagggtagtagtggagatttgtatgattttgagtaggtgacggaatgtgggttcgagtgttagtagagttaagaaaggattgattattgtttgttgttcgtgtttttttgaagtttgaaattagtttttttttttataggtagttttggcggatggggaaatggaatttgggggtgaggagggaaatttttaagcgtagtgatgttgttatgttaagttgtataatttagggtttttggtgattataggggtttaggatatttaagaatagtatttttgagttattttttaatttttagtttttaatttatgatttgttatagttttatagggaaatggttttttttgtgagtgtgaagaggggtatatgttaatttaaggttatttttagttagtttttttttataagaattggtttgtgtatgaattttttagttttatttttttttatagagttgtaattttgtttttttagttgttataattatagggatagggttgatgggttgatgttgtggagggttgtataattttttttttttttagaggtaaagaattgaatgaaagttggaggaatagaaagtatgaggttatgttttagttatttgtttatttattagttatgtagtgattagggcgttgtgttaaacgttagttgtggattataaaaatattttagaggtgggtgttaatatgttaggtgtttagaaatatttgtagttattaatttagaaaaagtatttttaggaaagagttttgtggaaataatttaaatatggagttatttttaaatataaagatatttgatttagtatcgtttataattttaaaataaataaagttaaatttttttttattagggaatgataaattatttattagattatttattattaagtttttaaaatgaatgaagtggtataaatatgtttataatattagtggttaaaaaaagtaagatacgatattatataaattttataaagtttgaagaattgtataaatatatatatttgtattatatatatatgtatttgtatatatatatatatatatttgtataaatatatatatattttttgttaattttaagtatggaaaaaaatataaaggtttggaaatatatgttttaaagaatgaatagtttttatatttgtgtgataggtttttgggtgatttatttttttatttttttttttttttgaattttttttattttatttagttagattttattatttttttggttagtttataaatttataaattaatttttaaaaaaatatttttaatattattggttgaaaaataggttgttgttagttgtttaatttgaaagaaattattgataaatatgttgaagtttttgtttaatggttttggttaaaatgaagttttgattttttatttttttgaattattttaaggattttatattatatttatataaattatgttaaattgaagtagttttttatttattttttttaatatataattttagtggtgtggaagggtttttatttttttagttagattatatgtttttttttttttttcgtattttgttattttatttttttataattaattagtatattttattttataatgagaaatagatttagttggttttaatgatttttgtttttgagatgtttttgatttcgtgggggtaggtagagtgtatgaataggtaattgtagtatttagtcgaaagtgttaggatttttagtagaaaaagaaatgaaagtttagaattttacgaggggaagaagtgattttttattagagggttggggaaggttttatggaagggatggaattttagttgtgtttggataattgttcgggatttaggtatttatagatgagtgtttagttgaggtagagttttgagtgtgatattgtgggtttagaggaaagagggggtgttttagtggagttgtagagtagtgggggtgaatatggatgataaagttaaattgggattaaattaggataggttttgtattttttttaaaggggttagagttgatatatttgatgttggagaataatagaggatagaagttaagtgcgattatgtttttggaattttgttttttttaagtgtttgtagatttaggttttttaatatatatgggttttgttttttttttattttaatgatggttagtgttagttttgagggaggagaagtagaagtaagattaggggtcgtggtaggttttatcggagttttggtatttatgtatttttttttattgttattaattttaaataaaggtatttttgttatttgtattattagaaatttatattataggtaatgttttttttttattttattttttgttttttagtttttagtgatatttagaattgtatttttttatttattttttaggggaattttttttatattcgtgattttatttttgagagttggtttttgtgagttgtggagagtgagaaaaggaaatggaaattgttgaattagttagtgttttgataagggatattttttatttttgtgattatagtatcgtgtgttataattagttatttatgtaatttgttttttaaaaatttagattatgttttgttgattttattttagttttttttttttaagaaatttatagtttaataaaggtaatgtgggagtttggaaataaatttttatttcgcgttaatgatagattagtaattatataaattttagtttataatatgtaatttttattgagtgattattatgtgttgatttttataatagggatttacgtttgaattgtttttaaaataattttatgatttagttattagtatatttttttagttgaataggtgaagaaattaaagtaaatagaggttaagtaatttttcgaaggtcgtaaagttgatgattagtagagtagggatttaaatttaggtagtttgattttaggtattatacgttatatattttgtattataatttattatatttgatttttataatatttttataatggtagattttttagagtgtttttttagattgtaaattaattttagattatgttttgttggttgatttaaattaaattttagtatatgatgattataatatgatgagtttcgtgatttagtttttattttttattattgtgttttttataataaagatgatttattgaatatataattttattttagtgtttatatatttgtaagattttttttattaatttttaaattaggaattatttttttgttatgtgttttgtttggattgaaatatagttatatgtatagtatgtgtttaatttatatatattgaatgaataatataagggagatgtaggacggggttgagttgggagggttttagatattttttaggtggtaaattgatgtttttagttgaaatgacgtatttatggttatgtggatggaattggttagttttatattttattatttgtgttagttattagtgtatttttagtgataattataatgtttgatatatagtgaagtataatagttatttgatgaataaataaattattgatttgattaataatatgtgttatgtttgaatttttattatggagttgaaatattaatgggaaaggtaggataagaaaggttatggtgagtggaaacggggagagaattaggaaaaataattaatgggtattagatttaatatttgggtgatgaaattatttgtatattaaatttttatgatataagtttatatatgtaataaatttgtatgtgtatttttgaatttaaaataaaataaatatatatatatatatatatatatatatatagaattaggagagagagttagaagtgtgatgggtttttatagttaaggaagaatttttaaataaaatgagaattgaagtggggtatggtggtttacgtttgtaattttagtatttttggaggtcgaggtgggtggattatttgaggttaggagtttgagattagtttggttaacgtggtgaaatttatttttattaaaaatataaaaaattagttaggcgtgttggtatatgtttgtagttttaggtatttgggaggttgaggtaggagaattattagaatttgggaggttgtagtgagttaagatcgtattattgcgattagtttgggtgatagagcgagattttgttttaaaaaaaaaaaaaaaaaaaaaaaaaatagaattgagtgtcgtgataaagatgtaattagaaagagaaatgtaaatttatataaagaagtttttagtaatttgatttaaaaggttatgatttgttttaaaaagaaaggaaggaaggaaagaaagaaagagaaagaaaggagaaagagaaagaaagaagaaagaaagagagagaaagaaagaagaaagagagaaaggaagaaaaaagaaagaaagtaaaagaaagaaagagagagaaaaagaaaaaagaaagaaagagagaaagaaagattatggtgttatagttttgatttttgggaaattgattatttaagattttttaggtggtggtgatagaaagtagttagtagttaatattatggattttttagtatggagggatttgatttgtgttttagcgttttggtttattttagtttttgcgaggttttattttagtttagtagagcgttttagttcgtagtgcggggaattttggttgggtagtttgttttttgcggcgtttttgttttgtattgtttagtttgtttttttattgcgtgttgttgttcgtgttttttagtgcggcgtattgtttttttttagattttggtttcgaggttttatttttttaagtgttattttttgttattttttttggtagtaggtattttagggatgcgtttattgatgatgatattttttttggtttagttttggttttttttttttatatgtggtttgcgtggttaggttgtagtaggtgtgggttttattttttatgtaggtagaagtagtagtttggagttttttgtttagtattttagatagataatgttttattgatatagttttttttttttgtagttagttttttgttttttgttttgagtttttgttattttttttagttattttttg

SEQ ID NO: 1637 - DNA, 6694 bp, Artificial Sequence
  chemically treated genomic DNA (Homo sapiens)
gtagatatgaaataaaaattagattttttttttttttgtgttttttataatttattagaattattgaaagggaagaaaaatatttttatggttgggtgtggcggtttatgtttataattttagtattttgggaggttaaggtgggaggattgtttgaagttaggagttcgagattagtttgggtaatatagtaagattttatttatacgataaatttaaaaattagtttagtatggtgtagtggtttacgtttgtaattttagtattttgggaggtcgaggtgggtagattatgaggttaggagatcgagattattttggttaatatagtgaaattttatttttattataaatataaaaaattagtcgggtatggtggtgggagattgtagttttagttatttgggaagttgagataggagaatggcgtgaattcgggaggcgaagtttgtagtgagtcgagatcgcgttattgtattttagtttgggtgatagagttagattttattttaaaaaaaaaaaaaaaaaaattagtttagtatggtggtgtatatttgtagtttttagttgtttaggaggttgaagtaggaggatcgtttgaattttggagtttaagtttgtaggtgattagttaattgtattttagtttggggaatagagtgagattttgttttaaataataataataaaaatatttttgatatttttattgtttatttttatttagtaattttaatattttattattttatttatttaatttttgttttattattatttatatatagatatacgtatatatatatatagtggaaaggttcgttgggatttaaagatgaggagtatgtcgttgttgtttgcgggtttttttatttttatttttagtttttgttttaatttagtatatttagtatttaggaaaatattttttttttttttttaaagagggaaattgaaattaaggaaagaaaatagaaattgagtttatagaagaaaattgagttttggtaatagttttatgattttttttagaaataatgaagtgtggtagaaagtttatgaatttagattataagttatttaattattttaagttttaattatttatttgttttaaaaaagattttttgtggtcgggcgcggtggtttacgtttgtaattttagtattttgggaggttaaggcgggtagattacgaggttaggagattgagaatattttggttaatatggtgaaattttgtttttattaaaaatagaaaaatttagttgggcgaggtggtgggcgtttgtagttttagttacgcgggcggttgaggtaggagaatggcgtgaattcgggaggtagagtttgtagtgagtcgagattgtgttattgtattttagtttgggcgaaagtgagagatttcgttttaaaaaaaaaaaaaaaaaggttttttgtaataaataaatatttttttgtaataaatacgaatatatattgattgggggtttagtttagattgttgaaaagtataaattatagaatatttttaaaggtattgatattttatttttaatgataatatgataataataggtaatgttattaagtatttaatatgcgttagacgttgtattaagagttttgtaagtatgagaatatttatagggatttaattgtttcgatagttgtgtgaggaattattattattattattattgatttataggtaaggaaattgagattagagagattattaataatttatttgaggttatttggataataaataggagaaattgtcgagtttttgtttttaatttatcgttttttttagaattttttatatgtttggtaatttattttagatttaacggggttttgtgaaggaaataattggtagaatatttttgtgtggttggatgaatgtttttaaagtgtttgtaatttgtttttttaaatgagatggttatattttttaaaattacgtttttattgttaattgattgagttgtaaggagggtatgagaggattgttgtaaagagtttggaataaggttaggcgtagtggttcgtatttgtaattttagtattttgggaggtcgaggtgggcggatcgtttgaggttaggagttcgagattagtttggttaatatggcgaaattttgtttttattaaaaatataaaaattagttaggtatggtggcggacgtttgtaattttagttatttaggaggtagaagaattgtttgaatttgggaggtggagggtatagtgagtcgagatcgtgttattgtattttagtttgattaaaaaagtgatattttgttttaaaaaaaaaaaaaaaaaaaaagtttggaatggtatttgtaatttagaaaggttttttttttttttttttttttttttgagacggagttttgttttttcgtttaggttggagtgtagtggcgcgattttagtttattgtaagtttcgttttttgggtttacgttatttttttgttttaatttttcgagtagttgggattataggcgttcgttattacgttcggttaattttttttatttttagtagagacggggttttatcgtgttagttaggatggtttcgattttttgatttcgtgattcgttcgtttcggttttttaaagttttgggattataggtgtgagttatcgcgtttggtcgaaaggttttgataattgttaattgatttattgatgtgatttattggatagagtttgagtatggttattagaaatatttgtttttaaattttatttattagttgcgtgattttgaagatgttaattatttgttttgaggtttatttttttttttggttaaatgagaagaataattattttgttttaaagttatcgtgaggaagaaatgtggtaaagtttttttattttgggtgatttagttatcgttaattattatgttataagtgtgagagtagttaatagaaaatgattttagtagggggttatattttgtttattttgtttttgttattttttttttttttttttttttttttgagacggagtttcgttttgtcgtttaggttggagtgtagtggcgcgatttcggtttattgtaagttttatttttcgggtttacgttatttttttgttttagttttttgagtagttgggattataggcgttcgttattacgttcggttaattttttgtatttttagtagaggcggggttttattgtgttagttaggatggtttcgattttttgattttatgattcgttcgtttcggttttttaaagtgttgggattataggcgtgaattatcgcgttcggtcgtttttgttatttttaataaatattttttttttaaataatttagatgtcggtcgggtacggtttgtaattttagtattttgggaagttaaggcgggcggattacgagggtaggagatagagattattttggttaatatggtgaaattttatttttattaaaaatataaaaaaattagttaggtattttggttagtttttgtagttttagttatttgggaggttgaggtaggagaatggcgtgaatttgggaggtatagtttgtaatgagtcgagattgtgttattgtagtttaatttgggcgatatagtaagattgttttaataataataataataataataatattattattattatttagatgttaattttagtttagttcggattaaattgttgttaattttgaattattaaaataggaattgatgaagatttattgtatttagttttttggaatgtagtaaggattttagttttaatttagaagttttatatgggtttagttttgaggatatttttaattacgaattttttaatgttgggtagtatttaatggatagagtattgaagtgggagtgagggtaattgggttttgattttaattttgttatttatttgttgtgtgtttttagtaagttatttttgtttattgggttttggtttttttttgtgtaattgaagaatatggaaaaaatgatttttaaagttttttgaagtttttatattttgtaatttttgtgtttaagaaggttttatagtgagatgggattttagtatttattgagtttttttatttataaaatggggataataatagtaaatgagttgatacgcgttaagatagtggaatagtggttggtatagataagttttcggtaaatggtagttaataatgatagagtatgttgtaagatatttttttttttttttgttttttaataagtttttaattaattattttattttataaataaggaaatagaatttaaagatattaagtattttttttaaaggtcgtttagtaagtaaatgggagagattttatgattaggatgaaagtaagaaatttttataagaggatttattttaatttatattttgtgaaaaggtttttaatgtttagtttagattaattgttttaatttatagtgtgagtgtgtttattttttttggggattgtatatttagaggattttttttaataaaatattttataaataatatttttttatggatgagggaaaggaggtaagatttgtaatgaataagtaggaattttgaagatttagtgatttagtgagtaataaagatttagtgatttttgattttgttttaattgttattttttgttgtttttaagaaagcggttttttgttttttgaggaggattttttttttggaaggtaaaattaaggatgttagtagagaaatttttttattattggtgtttggttaaagaggaaattgatgagtttattttagatgagagagtagtgagggagagatagagattcgaattttcggaggttattttagttttttttttcgttttgtgtaattttatttatgatatcggttaatgtttggttgttattttggaaattttttttaggggatgttttttaattggttttataaagggttagtttgagttgtagaggatttttgtagaggattaagatagtacgtggatttcgtatagttttttttataggtattatgaaggttttcgcggtagttttcgttgttatttttattgttattgttttttgcgtttttgtatttgtttttttatgtaagttttggttttgattattatagtttttggagttagattttgtttagaatgtttattttattttaatgattgttttatattttgttttttttttaattgtagtatgaatattgtttgaattttattatttatatttttatgaattgttttatttatatgttttgttgtttttgagagatttttatgttgttttatggtagggattttttgattagtttttttgtttttaaggtttatatttttaaggtttataggtgtttattgagtgtggatttatgttggggagattagtagttatgagtagtttatattgattttgaaatacgtttgatttatgtttgttagtagtagggtttttaagaaatttaattaaattaaaattttttgagattttgagatagttatatttttttttattttataaatgtaaaaaaaattggtttatgagagggtatgtggttttattagagtgaatatatttaaaaaataaataaaaataaggagaggataataaaagttaattaaatggttattatggattaggtattgtgttgattttggtatattttttttttttttttttttttttttgagatggagttttcgttttgtcgtttaggttggagtgtagcggtacgatttcggtttattgtaagtttcgtttttcgggtttatgttatttttttgttttagttttcggagtagcggggattataggtattcgttattatattttgttaatgttttgtattttttagtagagacggggttttattatgttagttaggatggtttcgattttttgatttcgtgattcgttcgtttcggttttttaaagtgttgggattataggcgtgagttatcgtgtttagtcgatttttgtatattttatttaatatttataatttttttttgagtagttgtttttgatgtatagatgggaaaatagagaggttaagtaatttgtttatggaggtatatagttaggaaatggggagattggtatttaaatttggttttattttgttgggaaaataaaaattatttttttgttgggaagtggtaattgatgttttttaacgttattttgaattaattgattaataagaagttttttgttgagagttttttttattgaagtttaattagagtttttaagatataatatgtatttttaggttttttttaggattttggttgagttatggagtttgagttttggaagtttttttataatttgttttaggttttaaagaaattaagttttaaatttattgaggatgttggaagggtaagaatgaagttagaggatttaggataagttaggaggaggttttgaaagtttagggtagaaggttatggtgtagagggatggatataagtttggtttaaggattagatgaggtattggaatttttattttgttattgtttatttatggttaagtgattttatttttttgagttttagtttttgttaaggaagataatagttttttttaaataaattatataaagtgtttagtataatgttaagtgtgtagtagtaatgaataaaagggttttttttttttttttttttttttaga

SEQ ID NO: 1638 - DNA, 6694 bp, Artificial Sequence
  chemically treated genomic DNA (Homo sapiens)
tttggaagaggaaaggaaggagggagatttttttatttattgttattgtatatttgatattgtgttggatattttatatgatttatttagaaagaattgttattttttttgatagaaattgaggtttagagaggtaaagttatttggttatggataaatagtggtagagtggggattttaatgttttatttaatttttgagttaagtttgtatttatttttttatattataattttttgttttgggtttttagggtttttttttggtttgttttgggttttttggttttatttttgtttttttagtatttttaatggatttggaatttggtttttttgagatttagggtaggttgtggggaggtttttaaagtttaggttttatgatttagttaggattttaagaagggtttggagatgtatattgtattttgggagttttggttgagttttagtgagaagggtttttaatagagaattttttgttggttagttaatttaagatgacgttgggaagtattagttgttattttttagtagaggagtagtttttatttttttagtaagatggaattaggtttgaatattagtttttttattttttagttgtgtgtttttatggataagttatttaatttttttgtttttttatttgtatattaaggatagttatttaaagaagggttgtgggtattaaataagatgtataaaaatcggttgggtacggtggtttacgtttgtaattttagtattttgggaggtcgaggcgggcggattacgaggttaagagatcgagattattttggttaatatggtgaaatttcgtttttattaaaaaatataaaatattagtagggtgtggtggcgggtgtttgtagttttcgttatttcggaggttgaggtaggagaatggtatgaattcgggagacggagtttgtagtaagtcgagatcgtgtcgttgtattttagtttgggcgatagagcgaagattttattttaaaaaaaaaaaaaaaaaaaaaaaagatgtgttaaaattagtataatgtttgatttatagtaattatttaattagtttttattattttttttttgtttttatttgttttttaaatgtatttattttaataaagttatatatttttttataagttaattttttttatatttatgaaatgagagagaatatggttgttttagggttttaggaagttttagtttagttaaattttttagaaattttgttgttgataggtatgagttagacgtgttttaaagttagtgtgagttatttatgattattaatttttttaatatgagtttatatttagtgaatatttgtaggttttgagggtgtagattttaaagatagaaaaattgattaggagatttttgttatgaagtagtatagagattttttaaggataataggatatatgggtaagataatttataagaatgtaaataatggggtttagatagtatttatgttatagttgaaaagagggtaaggtgtgggatagttattgggatggggtaggtattttaggtagagtttgattttaggggttgtggtggttaagattaggatttatatggggaggtagatgtaggagcgtagagggtagtagtaatgaggatgatagcgagggttgtcgcggagatttttatggtatttgtgggagaggttgtgcgaggtttacgtgttgttttgattttttgtaggaattttttgtagtttaggttggttttttatagggttagttgaggggtattttttaaggggagtttttaaaatagtaattaagtattggtcggtattataagtgaaattgtataaaacggaaaagaaaattgaaatagttttcggaaattcgagtttttgttttttttttattgtttttttatttagagtgagtttattagttttttttttgattaagtattaatggtggaaaaatttttttgttgatatttttagttttattttttagggaaggggttttttttagagagtaggaagtcgtttttttggggataataaggagtggtagttaggataggattagaagttattgagtttttattatttattgagttattgagtttttaaagtttttgtttatttattatagattttatttttttttttttatttatggaaggatgttatttataaagtgttttattgaggagggttttttggatatatagtttttaaaggaggtgagtatatttatattgtaaattgaggtagttgatttgagttgggtattgggaatttttttataagatatgagttggaatgagtttttttgtgggaattttttgtttttattttggttatagggttttttttatttatttgttaagcgatttttgggaaaagtgtttaatgtttttgagttttatttttttgtttataaagtggaataattgattagagatttgttgagaagtagagggagagaaagatattttatagtatattttattattattggttattatttatcgagggtttatttgtgttagttattattttattgttttagcgcgtgttaatttatttattattattatttttattttatgaatgaggaaatttaataaatattgggattttattttattgtaaggtttttttgggtataaaagttatagaatatgaaagttttaaaggattttagggattattttttttatgttttttagttgtataagaggaaattaaggtttagtgagtaggagtgatttgttaagaatatatagtaaatgaatgatagagttgggattagaatttagttgtttttatttttattttagtgttttgtttattaagtattgtttaatattaaagggttcgtggttaggagtatttttaaaattgaatttatgtggaatttttggattagagttagggtttttattgtattttaaagaattggatatagtaagtttttattaatttttattttagtagtttagaattagtaataatttggttcgggttaggttgaaattggtatttgaataataataataatattattattattattattattattgagatagttttgttgtgtcgtttaggttggattgtagtggtataatttcggtttattgtaagttgtgttttttaggtttacgttatttttttgttttagttttttaagtagttgggattataggagttggttagaatgtttggttaatttttttgtatttttagtagaaatggagttttattatgttagttaggatggtttttattttttgttttcgtgattcgttcgttttggttttttaaaatgttgggattataggtcgtattcggtcggtatttgaattatttaagagaaaagtgtttattgagagtgataaaagcggtcgggcgcggtggtttacgtttgtaattttagtattttgggaggtcgaggcgggcggattatgaggttaggagatcgaggttattttggttaatatagtgaaatttcgtttttattaaaaatataaaaaattagtcgggcgtggtggcgggcgtttgtagttttagttatttaggaggttgaggtaggagaatggcgtgaattcgggaggtggagtttgtagtgagtcgagatcgcgttattgtattttagtttgggcgatagagcgaaatttcgttttaaaaaaaaaaaaaaaaaaaaagagagtgataaaagtaaaataaataaaatgtaattttttattgagattattttttgttagttatttttatatttgtaatatggtggttgacggtgattaaattatttagaatgggaagattttgttatattttttttttacgatgattttgaggtagagtggttgttttttttatttgattaaagaggaaagtaagttttagaatagataattaatatttttaagattacgtagttgataagtgggatttgaaggtaggtgtttttgatgattatgtttaagttttgtttagtgaattatattagtaagttagttaatagttattaagatttttcggttaggcgcggtggtttatatttgtaattttaggattttgagaggtcgaggcgggcggattacgaggttaggagatcgagattattttagttaatacggtgaaatttcgtttttattaaaaatagaaaaaattagtcgggcgtggtggcgggcgtttgtagttttagttattcgagaggttgaggtaggagaatggcgtgaatttaggaggcggagtttgtagtgagttgagatcgcgttattgtattttagtttgggcgaaagagtaagatttcgttttaaaaaaaaaaaaaaaaaaaaaaaagatttttttaggttataggtgttattttaagttttttttttttttttttttttgagatagagtgttatttttttgattaggttgaagtgtagtggtacgatttcggtttattgtattttttattttttaggtttaagtaatttttttgttttttgagtagttgggattataagcgttcgttattatgtttggttaatttttgtatttttagtagagataggatttcgttatgttggttaggttggtttcgaatttttgattttaggcgattcgtttatttcggttttttaaagtgttgggattatagatgcgagttattgcgtttggttttgttttaagttttttataataatttttttatattttttttatagtttaattaattaataatggaaacgtaattttggaaagtatggttattttatttaaagaaataaattgtaagtattttagaaatatttatttaattatataaaaatgttttattaattgttttttttataaagtttcgttaggtttaaggtaagttattaaatatgtgagaggttttggaaaaggcggtgggttaagagtagggattcggtagttttttttgtttattgtttaggtggttttaggtaaattattaataatttttttggttttagtttttttatttataaattagtgataataataataatagttttttatataattatcgagataattaagtttttataaatgtttttatgtttgtaaagtttttagtgtaacgtttgacgtatgttaagtatttaataatattgtttattattattatgttattattaagagtaagatgttagtgtttttaaggatattttgtaatttatgttttttaatagtttaaattaaatttttagttaatatgtattcgtatttgttataaaaaaatatttatttattataaaaagtttttttttttttttttttaagacggagttttttattttcgtttaggttggagtgtagtggtataatttcggtttattgtaagttttgtttttcgggtttacgttatttttttgttttagtcgttcgcgtagttggaattataggcgtttattatttcgtttagttagatttttttgtttttagtagagatagggttttattatgttagttaggatgtttttaattttttgatttcgtaatttgttcgttttggttttttaaagtgttgggattataggcgtgagttatcgcgttcggttataaaaagttttttttaaaatagatgggtagttgaggtttagagtggttaagtgatttatagtttgggtttatgggttttttattatattttattgtttttagagaaaattataaaattattattaaggtttagtttttttttgtgagtttaatttttgttttttttttttgattttagtttttttttttaaggaagaaaggaaagtgtttttttggatattagatatgttgagttgggataggagttaaggatagaggtgaggaaattcgtagataatagcgatatgttttttatttttgagttttagcgaatttttttattgtgtgtgtgtgtacgtatatttgtgtataagtggtggtgggatagaggttgggtgggtaggatggtgggatgttgggattgttgagtgggaataggtagtgggaatgttaaaagtatttttgttgttgttgtttgaaataggattttattttgttttttaggttggaatgtagttaattgattatttgtaggtttgaattttagggtttaagcgatttttttattttagttttttgagtagttaaggattataggtgtgtattattatgttgggttaatttttttttttttttttttgagatggagtttggttttgttatttaggttggagtgtagtggcgcgatttcggtttattgtaagtttcgtttttcgggtttacgttatttttttgttttagttttttaaatagttgggattatagttttttattattatgttcggttaattttttgtatttgtagtagagatggggttttattgtgttagttaggatggtttcgattttttgattttatgatttgtttatttcggttttttaaagtgttgggattataggcgtgagttattgtattatgttgggttaatttttaaatttgtcgtatagatgggattttgttatgttgtttaggttggtttcgaatttttggttttaagtaatttttttattttggttttttaaagtgttggggttgtaggtatgaatcgttatatttagttatgggagtatttttttttttttttagtgattttaatggattgtgaggagtataggagggaggagaatttaatttttattttatgtttat

SEQ ID NO: 1639 - DNA, 5798 bp, Artificial Sequence
  chemically treated genomic DNA (Homo sapiens)
ggattttttaaatttagtttaaaaataagagagggaaattgcgtaatgaaagcggtttgttaattgagatttttaaattttttgtagaattagaattttgatgttttttggtatttgttagtattgggatttgatttttattttttttgagtttttagagttatttagtattttggtttatggtaggattttaggattttattttgttttcgtttttgggagatattttttttttttttatttatagtataaatattttttaaggtttatttttataatatatttatatttatttattttttggatattatatttattttatttaattattgattatagttagtttattgattatttattatatgttatttattttttaaagtaagttttgggtattagataatatttataaaatgtataaaaataaatattaatttttatataagaaaattaaagaataggtaggaaattggaatataaagaagttaaataatttaagttttttttgataaatatattaattagtgtttttagtatttaaatgaagatttttaattattatgttattttgtttgtttattttaggattgatagttaggaatatttttttgatattttttagtatttgagtttttttgttttttgatttgattatttgtagataattataggtgaattaagttagagaagagtttaagtattatttaattttggaataggttatatagatggtattattttttattattgtattaatagtagatattattaattaattatagtattatatttacggtaatgttttattgttttagttttataataaaattttttagttatttattattaatttataaagttggtatatgattaaaaattatttgttattttaaaatttgttaaaattttatattttatagatgaggatagtgaattttaaagttaataagatttgtttaaggttattttgggtaggttattggtgaaattaagattagatttaagttttttgatatttaattttttttatttttattagttttttttgatttttaataattataatttttatgattatttttgttgtttgtgtatggatgtatttttcgtttgaagttagtttagaggaaaattaataaagtttttagggtattatataagataatggttttattgttgtttggaaaatatatataaattttatttttaaattaatatttttattttatgtatatatttagattgatgttatatagtatatttggtagagaattattttttaaaatgattaaaaagttgttattttgaaataatttaattttttttttgattaaaggaaatttaaatgatatatatgttttatatattgtaaattttttattgttaaaagtttatatagtaattgtaataaatgaaaaatgtatgaggtaaatgtttaaaaattttttttgaattaaaatagtaaaaatttatttgatttaagaataggagtatattaattataagaaaaaaataaagtaattaatatatatatttaaaagtaaataaagtaaaatgtaagtaaaataatggtgagttttttgtttcgatttattttatttcgaagtataatttaatatattgtttagtaaagtgtaggtattttaaatgtagagttttatgaattttatatgtgtagttaattatttaattatttttttgattaaaattagagagggaagtttttaaaagttttttttatgatgtttatatttgtaaaggaattattgttttaatttttattattgtacgttttttttgttttttaataagaaaaatattttttttttagtaattataaaatgtttttaagaataatatatttatatttaagtgaaggggtaaattttttagtaatgtgtttatttgattaaaagttttaataatatttatatattttgatttattaattttttggttagaaaattaaacgaagatattaataataatgttatattagtttttttataagtattgtgtaaaattataaaaatggaaatggtatgatttttaattatggagaagtaaatttttaagttaattatggtgtattgatatatatgaatttttatagagtttttaaagtttaagattattggggaatatttattgttttgtgagaaatttaaatatattaattgaaaaggtagtatttaattttggatttggtggtgaaattttagatatatattttatagtttaataatatattgttaattattaatcgatgttatttttataaaataatgagaatttttgaggaataaattttgtaattgtttttttttttttttttttaatttattttgagtttagaatgattttaatattaaaattagataaagatattataataaaagaaaattataaattaatagaaatttataaattaaatttatgaataaaatttttaataaaatattagtaaataaaattcgataatatataaaaagaattataagttataattaagtggaatttattttaggtatgtaaggttgatttagcgtttaaaaattggttgatataatttattatattaattttttaaagaaggaaaattttattataatattaatagatggaaaattttttttgatataatttaatagttatttatgatttaaaaaaaaaaatttttagtaaattaggaatagagggatatttttttagttttatagagtgtattaaaaaagatttatagtaaatattatatttaatggtgagaaattagatattttttttttaagattgagtataaggtaaggatgtttttttttattattttaatttaatataatattggaaggtttagttaatataatagtataagataagaaaataaaaatatatatagattagaaagaataaataaaattgaatttatttgtagaagatatgattgtttgtgtagaaaattatagagaattagtaataaaaaaaagttatgttattaataagtaattttagttataggatataaggttaatagataaaatttaataattttttgtatattagtaatgagtaattagaatttgaaattaatatataatattatttatattaatattaataaaatgaagtgtttagaaattagtttaagatgtataatatatatgagggaaattataaatttttgatgaaagattaaagacgatttaaataaatgaagagatattttatatgtatggataggtggagttaatgttgttagtatgttagttttttttaatttgatttgtatttttaatataattttagtttaaattttagtaggttttttttggatgtgatagattgattttaatgtttatatggaaaggttaaagatttagaatagttaatatagtattgaaaaagaatagttagaggattaatattatttaattttaagatttattattaggaaatagtaattaagacggtgtggtattggtgaaagaatagataaatggattaatggaatagaatagagagtttttaatagatgaatggatatataaaatgtattatatatatataagggaatattatttagttttaaggatatgtagtatattatatgttgttatatagatgaattttgagatttttacgttaaatgatataagttagttataaaagaaaaatattatatgattttatttatatgaggtagttagagtagttaaaattagaaatagtaagtagaaatggtggttgttaggggtttgggggaggggaaattggagattaataggtatagaatttttgtttatagatgaaaagagttattgagattgttgtataatagtgtgaatgtttttaatgttattaaattatgtatttaaaaatggttaagatggtatgtgtatttttattataataaaaataataaatgaataaagaataaaggaagtaattagttattaaattataataaggtacggagaaattttaaatgtatattgtttagtgaaagaagttagtttgaaaaggttgtttattatatgattttaattatgtatatgatatttgggaaaagataagtttatagagatagtaaaaagattagtggtagttagagatttgtggagaggaaaaaggatgaatagaagaatatagtgaatttttagagtaggaaaatttttatatgatattgtaatgatggatagattaggtttgtagggggagtagatgaggttagttttttgtaaatttggtttttttttgttacgtttcgtttatagttttattgtgtgtgaattaagagagttggaaggttttttgtagacggatttattttatttgaatttttatgatatattggatttttttatataattttatttggaaagaaatttgagtatttaaataaaatgtttggaaattattatgttataagattagtatgtgttgtttagtttttattttttgtaatagtaagattttggggtattaagatttagttttaggattttgttattttgttaacgttttgtggttggggttttaaaggagtttgtttggtttagaattgtaagtgattttagtgtgatggagagtattagtaaagttttagggtttatttttggttttttgttatttatagaggggtaggtttttggtttttttttattatgacgttagtttttatttttttttttttatagataattttttattttaaggaaattagagtttttaatagtttagtgaggttattttgttgagtataattttatattttttagtttttgttttatagagtttaagtaaaagatagaaatttataatttttttgttttgttatttggaaattattttaggatttggtgtttatttagtatatttaaggaaggttttattttatttttttttgattgtgattatgtttaggttttttgttttttataaaaggtaggtagagttatcgaggagtagagaggttgagaataatttagaaatttttattttttatgttgaagtttatatttttgttttttaagatgaaggtttttgtagcgtttttgtgtttgttgtttatggtagttatttttagtttttagggatttgtttagttaggtaagatttttttttttttaaggggagattaaaagaggaattaagaagagttattatgttatagtttattaggaataaaattagaattaaaggtttaggttattgaggttggtttttttgattttttttgattttagttttgggaggagatagtggagtcgttatagtaataatttttttattgtttggggaaataatttagaacgaagaattgttttttattgtgggtgtaaaggatattttaggtcgtagtggagagggagaaattattgtttgaagttttaaattttggttatggtttagtgtattttttagaatagtggttgtgtaaagaggatgaggatttagaggaattttagcgtatggtataggttaattttaaagtttatgaggatgaaagattgggaagtaaggtattggaatttatgtttttagtgttagaagttttgggttagtagataaggattagtttgttatttaaaatgtttttaaatttagttaataatgacgggtcgtagagtttaatagaggaaagagatttataggtaatattttatttttgggatttggattaagatattgaatttgggatggtgattttttggttttttttttttttttttttttttttttataaatgtatatttacggtgggttttaaatgttttattttttgtaaaattttttttaga

SEQ ID NO: 1640 - DNA, 5798 bp, Artificial Sequence
  chemically treated genomic DNA (Homo sapiens)
tttgaaagaaattttgtaaagaatgagatatttaggatttatcgtaagtgtgtatttgtaaggaaaagaagagaaggaaggagaagattaagaagttattattttaagtttagtgttttagtttagattttagagataaaatgttgtttgtgagttttttttttttattgaattttgcggttcgttattgttgattgggtttggaaatattttgagtaataagttagtttttgtttattaatttaaaatttttgatattgggaatataagttttaatattttgttttttagttttttatttttatgggttttagagttagtttatgttatacgttgagatttttttgggtttttattttttttatatagttattgttttggaaggtatattgaattataattaaaatttgaagttttaggtaatagtttttttttttttattacggtttgaaatgttttttatatttatagtgagaaatagtttttcgttttggattatttttttaaataatgggagggttgttgttgtagcggttttattgtttttttttaaaattggggttaggaaagattaagggaattagttttagtgatttgagtttttagttttggttttgtttttaatgagttgtgatataatggttttttttaattttttttttggtttttttttaaaaagggagaggttttatttggttgagtaagtttttgagggttgaaagtggttgttatgagtagtaggtatagaagcgttgtagaaatttttattttggagggtaagggtgtgagttttagtatgagaggtgaaggtttttgggttgtttttaatttttttgtttttcggtggttttgtttgttttttatagggagtagagagtttgggtatggttataattaaggaagaatgaagtaagattttttttgaatatgttgagtaagtattagattttgggataatttttagataataaaataaggaagttgtgagtttttattttttgtttaggttttgtggagtagaggttgaagggtatgggattgtgtttagtaaagtgattttattgaattattaagggttttgatttttttgaaatggaaaattgtttataagaaaggaagaatggaagttgacgttatagtggaagagagttaagggtttatttttttgtgggtaataggaggttagggatgggttttaaggttttgttggtgttttttattatattagagttatttgtagttttaagttaggtaagtttttttagaattttagttatagaacgttggtagaatgatagaattttggaattaagttttaatgttttagaattttattgttgtagagggtaagaattagatagtatatgttggttttgtagtatggtggtttttaaatattttatttagatgtttaagtttttttttaaatgaaattatatggagaagtttaatatgttatggagatttaggtggaatgggttcgtttgtagaaggttttttaatttttttggtttatatatagtggggttgtgggcggggcgtggtaagaaggaattaggtttgtaaaagattgattttatttattttttttgtaggtttgatttatttattattataatattatatagaagtttttttgttttaagaatttattgtatttttttatttatttttttttttttttataaatttttggttattattgatttttttattatttttgtgagtttgtttttttttaagtattatatgtatagttggaattatatagtaggtagtttttttagattggttttttttattaagtaatatgtatttaaggttttttcgtgttttgttgtggtttgatagttaattattttttttgttttttatttatttattatttttattgtggtaaaaatgtatatattattttaattatttttaagtgtatagtttagtggtattaagaatatttatattgttgtgtaatagttttaataattttttttatttgtaaatagaaattttatatttattgatttttagtttttttttttttaagtttttggtaattattatttttatttattgtttttgattttgattgttttaattattttatgtgagtgaaattatatagtattttttttttgtgattggtttatgttatttagcgtaaggattttagggtttatttatgtggtagtatatgatatgttatatatttttaaggttgagtaatatttttttgtatgtatatagtatattttatgtatttatttatttgttgagggttttttattttgttttattgatttatttgtttatttttttattaatattatatcgttttgattattgttttttaatagtaaattttgaagttgggtaatgttagttttttgattatttttttttagtattgtgttagttattttagatttttaatttttttatataaatattaaaattagtttattatatttaaaaagaatttgttgggatttggattgggattgtgttgaaggtatagattaagttgggaagaattgatatgttgataatattaattttatttatttatatatgtggaatatttttttatttatttagatcgtttttaattttttattagaagtttgtagttttttttatatatattgtatattttagattaatttttaaatattttattttattggtgttaatgtaaatagtattgtgtattaattttaaattttagttgtttattgttgatatataggaagttattgaattttatttattagttttgtattttgtagttaaaattgtttattagtggtatgatttttttttgttgttgattttttgtaattttttatatagataattatgttttttgtaaataaatttagttttatttattttttttaatttgtatatatttttatttttttgttttgtgttgttgtgttggttaggttttttagtattatgttgaattggagtggtgagaagaaatatttttgttttatatttaattttaggagaaaaatatttagttttttattattaagtatgatatttgttgtaggttttttttaatgtattttataaagttgaggaagtatttttttatttttagtttgttgagagtttttttttttaaattatgaatggttgttgaattgtgttaaaaaaaattttttatttattgatattataataagattttttttttttagaaagttgatatgatgggttatattaattaatttttgaacgttggattagttttgtatatttggaataaattttatttggttgtagtttataattttttttatatgttgtcggattttatttgttgatattttgttgagaattttgtttatgagtttggtttatagatttttgttggtttatagtttttttttgttgtaatgtttttatttggttttgatgttagggttattttggatttagaatgaattaggaagggaggagagggggtaattataaaatttgttttttaggaatttttattgttttatagaaataatatcggttagtaattggtaatgtattgttgaattatagggtgtatatttaaaattttattattaaatttaagattgaatattgtttttttaattagtgtgtttagattttttataagatagtaaatattttttaataattttgaattttaaaagttttataggagtttatatatattagtgtattataattaatttaagaatttatttttttatagttgggaattatattatttttatttttatggttttatataatatttgtggaaaagttgatataatattattattaatgttttcgtttaattttttagttaaagaattaataaattaaaatatgtggatattattaagatttttaattaaatgaatatattgttggaaaatttgtttttttatttaaatgtgagtgtattatttttaaaaatattttatagttgttaagaagaagatattttttttgttaaaagataaaagaaacgtatagtgatagaggttagaatagtggtttttttgtaggtatggatattatgagggaaatttttggaagtttttttttttgattttgattagagaggtagttaaatggttaattatatatgtaaaatttatgaaattttatatttaaaatgtttgtattttattggatagtatattgaattatatttcgaaataaagtaaatcgaagtaaaaggtttattattattttgtttatattttattttatttgtttttgaatatgtatgttagttgttttattttttttttgtggttaatatgtttttgtttttaaattaggtgggtttttattgttttgatttagaagagatttttaaatatttattttatgtattttttatttattataattattatgtgaatttttaatagtaaagaatttgtagtatatggaatatgtgtgttatttggattttttttaattagaaaggaaattgagttgttttaggatggtagttttttaattattttaggggatggttttttgttaggtgtattgtgtagtattaatttgagtgtgtgtatggggtgggggtattggtttaggggtggagtttgtgtgtattttttaagtagtaataaagttattgttttatgtaatattttgaggattttgttaatttttttttgagttgattttaaacgaaaagtgtatttatgtatagataatagaaatagttatgaaaattataattattgggaattaaaaaaggttagtaaaaatgaagggaattaagtgttaaggaatttgagtttagttttgattttattaataatttgtttaaagtggttttgggtaagttttattgattttgagatttattatttttatttatgaagtatggggttttgataggttttgggatgataagtagtttttgattatgtgttaattttatgaattggtgatagatgattagaaagttttgttgtaaaattaaaataatgaggtattatcgtgaatataatgttgtgattgattagtgatgtttgttattagtatagtaataaggagtggtattatttatgtaatttattttagaattaaatagtatttaagtttttttttaatttgatttatttgtgattgtttgtaaataattaaattaaagagtagagaggtttagatgttaggaaatgttagagaagtgtttttggttgttagttttaaaatagataggtagaatagtatgatggttaaaagtttttatttggatattgggaatattggttaatatatttgttagagaaggtttaggttatttaatttttttatattttaattttttatttattttttaatttttttgtgtggaaattgatatttatttttatgtattttatgaatattatttgatatttaaaatttgttttgaagagtgagtagtatatggtaggtgattaataaattaattgtaattaatagttaagtaaggtgggtgtagtgtttagaagataagtggatatagatgtgttatagggatggattttggggaatatttgtgttgtggatgaaggaaaaaaaagtgttttttaggaacgggagtaaagtgagattttgggattttgttatgaattaaaatattagatggttttgggaatttagagggaatggaagttagattttagtgttaatagatgttaaggggtattagaattttaattttgtagggagtttaggaattttagttggtaagtcgtttttattacgtaattttttttttttgtttttaaattgaatttgagaaattt

SEQ ID NO: 1641 - DNA, 5347 bp, Artificial Sequence
  chemically treated genomic DNA (Homo sapiens)
tattagatgtttaaagagtaaaggtggacggaatattttataaatgattttgttagaataagtttttttaaagaagaaaggattttgaatttgtttggaagaaagtgagggatttagaatgtagaggatgacgtatggtattatttttgagggttttgttatgttttattggtttatatttttgttttggtattagtattatgatgttttggttattgtagttttgtagtatagtttgaagttaggtagcgtgatgtttttagttatgtttttttagtttaggattgatttggtaatgcgggtttttttttggttttatatgaattttaaagtaggtttttttaatttagtgaagaaagttatggtagtttgatggggatggtatcgaatttataaattattttatgtagtatggttatttttacgatattgattttttttatttatgagtatggaatgtttttttatttgtttgtgttttttttattttattgattattggtttgtagttttttttgaagaggttttttatattttttgtaagttggatttttaggtattttatttttttttaagtaattgtgaatgggagtttatttatgatttggttttttgtttgtttgttagaaataatattatatatttataattatttgatttttgataaatttgataaaaataagaaatggggaaaggattttttatttaataaatggtgttgggaaaattggttagttatatgtagaaagttgaaattggattttttttttatattttatataaaaattaatttaagatggattaaagatttaaatgttagatttaaaattataaaaattttagaagaaaatttagggtaatattatttaggatataggtatgggtaaggattttatgtttaaaatattaaaagtaatggtaataaaagttaaaattgataaatgggttttaattaaatttaagagtttttgtatagtaaaagaaattattattagagtgaataggtaattatagaatgggagaaaatttttgtaatttatttatttgataaaaggttaatatttagaatttataaagaatttaaataaatttataagaaaaaaataaataattttattaaaaagtgggtaaaggatatgaatagatattttttaaaagaagatatttatgtagttaatagatatatgaaaaaatgtttattattattggttattagagaaatgtaaattaaaattataatgagatattattttatattagatagaatggtaattattaaaaagttaggaaataataggtgttggagaggatgtggagaaatgggaatatttttatattgttggtggaattgtaaattagtttaattattgtggaagatagtgtggtaattttttagggatttagaattagaaatattatttgatttagttattttattattgggtatatatttaaaggaatattaattatgttgttataaagatatatgtatacgtatgtttattgtggtattatttataatagtaaagatttggaattaagttaaatgtttaataatgatagattggattaagaaaatgtggtataaatatattatgtaatattatgtagttataaaaaatgatgagtttatgttttttttagggatatggatgaagttggaaattattatttttagtaaattattataaggataaaaaattaaatattatatgtttttatttataggtgggaaatgaataatgagagtatttggatataagaaggggaatattagatattagggtttgttgtggggtgggggaagggtggggggatagtattaggagatatatttaatgtaaaagacgagttaatgggtgtagtatattaatatggtatatgtatatatatgtaatatatttgtatgttttgtatatgtattttagaatttaaagtataataaaaaatataataaataaataaataaaataaaaaaataaatagaaagtagaggatagttttaggtggaatattttggaagtttttaggatttttgatattattgtaattttaaaggtaagagtggaaggattgaggatattaatagtttaaaatatggttgttgggaaatataataaagtggttagttagattggggagagttgttagggggtgtttgttagtaattgtgaagaaagtggtttgtaatttggaaattattaaaaattattggggtagattttttggtgtttgattgttagtgttggattttttattatttaatttatgttttatttattttgtttagttgtaaaatgggggagaaaattttttttatttaagaattaatgtgaggtttaagaaataatgaatattaagtgttttggaaggtaaaaattatttatattgtattagtttatattatattatattgtggtataatgattaaaataggattgttttagatagatagttaagtttttaggttgttaggatgttgatattattggatgaattattttattttagttgggaataaaaataatagagtttttttttattatttggatatagtgtaggtaagataaatggtttttgtttaaattgatgataaagaagtaattattgttaaagtgttgtgtttttagtggtttttggtgttgttatatttaattttagaggatttttggattatttacgtttgtataaagttaatatttaagatgtttatataggaattagatatgggtagtgggttagagtgatttttatgggaagttagtttaagtgatatattgttttttgattaggttgggtaatttaatagtttatttttagtggggattttttattatgtgtttgttagttaaagaagtgttttttttttttttgtattttataaataagttatagtgaattgatttagagtgtaaattaggtgagatatatatatttataagatcgttaggaggaattggtaatttttttttatgatttattttagattttattatttggcgttaaaaataaattcgtgtgtttatttatgtttaaaatagtttatttagaattaacgtaaatatatatatatatatatagtttaaaagttaataatttatgtaattaaattttttttaaaagaataaagttttattttatggtttattttttgtggttacgttgaatttaattgtttaagattttttgaagtgttattattttatttaggtttaatttttgtttttcgatatattttaatttttaaaacgttaatatattaaatttgtaggttgttttttatagattattattttttagaaagatgaagaattatattttttgagttaggtatgatgttggtgatgttaagaagttgtgaagattttttatttagttttttatagagtaaggtttatattattaaattttatttagttagtgaatttttgaagtttttttttaaaataaaagttgttaaggtttatgatattttttttttgtttattaatggaggtgatggatgggggagttaataaaatttttagtattataggagataaggaaaagagttgtgttttatgattggttttttattgttattatgtttattgattatttttgttggtttgttgtgagggtaagggtttttagaattagttagaagaggatttagttagatttttatgaaagaaagtttatgtgttattttaatataataatttatttttgttatggagtaagatagtggaaaatttttaaatttttagtgttttaatttttttatagataatagaaggagagagggagaggaagttggaaattattttattttttaattttaggtagtagtgtagggtttattggggattagagtaggtttgtggaaatagcgttggttattagtaattatgaaattcgatggttttagaaatttgtggggagtattttttttttcgtgaagttgtttgagggaaaatagattgggtgttgttgtgttgttaaattgatataaatttttataagaagtttttatatgagttttttaaatttattagttttttatagtatttttaaatggtgttaaatatatatttggggttgggaatagagttggggtaggtttgggatttttggtaagttttagtttgcgtttattatattatattttatttttaataagattaaaattttttttaatttaatagtatagtaattgttaatagtaaggtattttttatggtaatttgttgggtgattttggaagatttttgtttaattatttggatatacgtatatttgttatatattataagtatagaatttttagtaagcggatttattaaagtaggtgatttgtaggggagttaataaaatttagtggtttttttaggttattgattttaagtggtaagagataagggttttttgttattatgttattttggtttttaaagttggttgaagtttagagatttataaagttatttaagaaatttagaatgatttgtttgtaaggaagataggaaggatttttagtttatagtaatttaaatatgaataatattttttgattaatagtaataataattagaaaggattgatttttagaaattttttttaaattaaggtttttgttattttggttttattttttttttttagaaggagaggaggagtattttttagagggttgcgtgttttagaaaagtcggtatttttagttcgttttggtataggttatgaggttttgttgaattttgttgaatagttatttttttttagttggagttatagttttttttatcgcggagtagggttataacgtttttttcggtagaggtgtacgtagttttttttggttattttttttattagtttttattgtttggttttttttttttaattttttttttttatattgttttatgagtttagggaatttttttagtattttaaagtttgagttttttgttagtggggagagatgagtgtagataaaaggagtgtagaaggtacgaggaagttatagtgtttcggattttttaattttcgtttttttaattttcgtttttttatttagtttaggaattcgcgatcgttcgtagcgtttttttgattattatgagttttttgtttagtcgcgcggttcgtgttttcggtttttcgagttttttgtgcgcgttgttggtgttgttgttgttgttgacgtagttagggtttatcgttagcggtgagagcgtatggcgcgcgggacgtattcgtattcgggtatagaggtgtattttagtttttgcggggtcgttgcgttttagggaatttttttagtaatttgttttataaagggtgttttttttttttttttagt

SEQ ID NO: 1642 - DNA, 5347 bp, Artificial Sequence
  chemically treated genomic DNA (Homo sapiens)
gttggggaagaaagagagatattttttatagggtaggttgttgggagagttttttggaacgtagcgatttcgtagaggttgggatgtatttttgtgttcgagtgcgagtgcgtttcgcgcgttatgcgtttttatcgttggcgatgggttttggttgcgttagtagtagtagtagtattaatagcgcgtataaggagttcgaaggatcggggatacgggtcgcgcggttggataggaggtttatagtggttaagagagcgttgcgagcggtcgcgggtttttgaattgggtggaggagcggagattggaggagcgaagattggaggattcggagtattgtggttttttcgtgttttttgtattttttttatttatatttatttttttttattgataggaaatttaagttttgggatgttggggaaattttttgaatttatggggtagtgtggaaagaagaggttgggggaggggggttagataatgggaattggtggggagggtggttaggaggagttgcgtgtatttttatcgagagggacgttgtaattttgtttcgcggtggagggagttgtggttttagttagaagggagtagttatttagtaggatttagtagggttttatggtttgtgttagagcgggttagggatgtcggtttttttgaggtacgtagttttttgggagatgttttttttttttttttagagagaaaaggtggaattaaagtaataggagttttgatttgagaaaaatttttgaaagttaattttttttaattattattattattaattaggaaatgttatttatgtttgaattgttataaattgaaagttttttttgttttttttgtaggtaggttattttaggttttttgaatgattttatgaatttttggattttaattagttttggaagttaagataatatgataataagagatttttgttttttgttatttgaagttagtggtttgaaaggattattgaattttgttaatttttttatagattatttattttggtaagttcgtttattgagaattttgtatttgtagtatatagtaagtatacgtgtgtttaggtagttaaataaaaattttttaaaattatttagtaaattgttatggaagatattttgttattggtagttgttatgttattgaattggaagaggttttggttttgttgggggtgaggtgtagtatggtgagcgtaggttaaagtttgttagggattttaggtttgttttagttttgtttttagttttagatatgtatttgatattatttggagatgttgtgggaggttgatgagtttgaagggtttatgtgaaagttttttgtaggggtttgtattaatttggtagtataatagtatttagtttgtttttttttaaataattttacggagggaggaatgttttttataggtttttggaattatcgagttttatgattattggtgattaacgttgtttttataggtttattttagtttttagtgagttttgtattgttgtttgaaattgaagggtgaagtagtttttagttttttttttttttttttttttgttatttgtggaggagttaaagtattgaaggtttaagggttttttattgttttgttttatggtaggaatgggttattgtattggaatgatatataggtttttttttatggaaatttaattagatttttttttggttggttttgaagatttttgtttttatagtagattagtaaaggtaattagtaaatatgatggtaatgagaaattagttatgaaatataatttttttttttgttttttatgatattgggaattttattaatttttttatttattatttttattggtgagtaagaaagagatgttatagattttaataatttttattttggaaggaaattttagaaatttattggttgagtaaggtttggtggtatgggttttattttgtgggaaattaaatgagaagtttttatagttttttgatattattagtattatatttgatttagaaaatgtaattttttatttttttggggagtggtaatttgtagaaaatagtttgtagatttagtatgttgacgttttagagattagagtgtatcgaaagataaaagttaagtttaggtgaagtgataatattttaaaaaattttgggtaattaaatttaacgtaattatagggagtaaattataggataagattttgtttttttaaaagaagtttaattatataggttattgatttttaaattgtgtgtgtgtgtgtgtgtttacgttagttttaaataagttattttaaatataagtgaatatacgaatttgtttttggcgttaaatggtgaaatttgagatggattatgagaaaagattgttagttttttttgacggttttataaatgtatatattttatttggtttgtattttgaattaatttattgtagtttgtttatggaatgtaagaagaaaaaaaatatttttttagttgataagtatatgatagaaagtttttattagaaatgggttgttgggttgtttaatttaattaggaagtaatatgttatttaaattggttttttatggaaattattttggtttattgtttatgtttggtttttatataggtattttggatgttggttttgtataaacgtggatggtttaaaagttttttaaggttgagtatgatagtattaagaattattgaagatatagtattttaatagtagttgtttttttattattagtttaaataaaagttatttgttttatttgtattgtatttaggtggtagagaaaaattttgttatttttgtttttaattaaaatagaataatttatttaatggtattagtattttgatagtttgaaggtttaattgtttgtttaaagtaattttattttagttattatattatagtataatgtaatataaattaatatagtataaatgatttttgttttttaaaatatttaatgtttattattttttgagttttatattgatttttggataagagaaatttttttttttattttgtagttaggtaaagtaagtagagtatgagttaagtagtagaaaatttagtattggtagttaagtattagagaatttgttttagtaatttttaatggtttttagattataaattattttttttataattgttggtaaatattttttagtagttttttttaatttggttaattattttattgtgttttttaataattatattttaagttattgatatttttagtttttttatttttgtttttgagattgtagtaatattaagggttttagaggtttttaaggtattttatttgaaattgttttttgttttttatttatttttttattttatttatttatttattatattttttattatattttaagttttagggtatatgtgtaaaatatgtaggtatgttatatatgtatatatgtgttatgttggtgtgttgtatttattaattcgttttttatattaggtatattttttaatgttatttttttattttttttttattttataataggttttggtgtttgatgtttttttttttgtgtttaagtgtttttattgtttattttttatttatgagtgagaatatgtggtgtttggttttttgtttttgtgatagtttgttgagaatgatggtttttagttttatttatgtttttaaaaaggatatgaatttattattttttatggttgtatagtattgtatggtgtatttgtgttatatttttttaatttagtttattattgttggatatttggtttggttttaagtttttgttattgtgagtagtgttataataaatatacgtgtgtatgtgtttttatagtagtatgattgatatttttttgggtatatatttagtaatgggatggttgggttaaatggtatttttagttttagatttttgaggaattgttatattgttttttataatggttgaattagtttatagttttattaatagtgtaaaagtgtttttatttttttatattttttttagtatttgttgttttttgattttttaatgattgttattttatttggtgtgagatgatattttattgtggttttgatttgtatttttttgatggttagtgatgatgagtatttttttatgtgtttgttggttgtataaatgtttttttttgagaagtgtttgtttatattttttgtttattttttgatggggttgtttgttttttttttgtaaatttgtttgagttttttgtagattttggatattagttttttgttagatgagtagattgtaaaaatttttttttattttgtagttgtttgtttattttgatggtagttttttttgttgtgtagaagtttttgagtttaattagagtttatttgttaattttggtttttgttgttattgtttttggtgttttagatatgaagtttttgtttatgtttatgttttgaatggtattgttttaggtttttttttagggtttttatggttttaggtttaatatttaagtttttaatttattttgaattaatttttgtataaggtgtaaggaagggatttagttttagttttttatatatggttagttagtttttttagtattatttgttaaatagggaattttttttttattttttgtttttgttaggtttgttaaagattagatagttgtagatgtgtggtattatttttgatagataaatagagaattaaattatgagtgaatttttatttataattgtttaaaagagaataaaatatttaggaatttaatttataagggatgtgaaggatttttttaaggagaattataaattagtgattaataaaataaaaaggatataaataaatggaagaatattttatgtttatggataggaagaattaatatcgtgaaaatggttatattgtataagataatttatagattcgatgttatttttattaagttattatgattttttttattgaattggaaaaatttattttaaagtttatatggaattaaaaaagagttcgtattgttaagttaattttaagttaaaagaatatagttggagatattacgttatttgattttaaattatattataaggttatagtaattaaaatattatggtattggtattaaaatagagatatagattaatggaatataatagagtttttagaaataatattatacgttattttttgtattttaaattttttatttttttttagatagatttaaagtttttttttttttgaaaaggtttattttgataaagttatttgtagggtatttcgtttatttttgttttttgaatatttagta

SEQ ID NO: 1643 - DNA, 8446 bp, Artificial Sequence
  chemically treated genomic DNA (Homo sapiens)
gtttaatagaaaaattggaaaattatgtaaatatgttttatagaagaagaaatttttatatggattgtatattatgtgtgataaaatgtaaaataatttgttagatgaattaagatatttagattagaaagttataagaaagagaaaacgttgagttttttttatttgtattttttatgtttttgttttttttttttaataatgaatgtttttttttaaaaatggatttttttattttattgtgtggttatatatgtatgagtagtgttaatattttagagtattagagtttgtaggtataaatgttgatgtttgtatatgtatatgtttgtttatatatttttgtacgtatatattagatatatttgtatttattttggatatataaattaagtagtttttttatgttaggtattgtataggattttgaagaaatagtagtgaaaaagataaggaatttttggaaaaagatagataaaaaaaattagtaagtaaattgttgttatgtttgaaggtgttgggagttttgaatgagaatagaatagtaaaaatagattaaatgatattagaatgggtatgtgtataaagttttaaattgggtgattaggaaaagttataatgagtagtatttgagtgaagaattgaaggaggtgagggtattagttatgttgatatttgagggaagagagtattaggtagaggaaatagtaaatgtaaaggtttggagttaggagtaaaattgatatgtttgagaaataaggtggtcgcgtgttgtgttgatgtaagaggcgtagagaatagtaggggaggatgttagagagtgaatgagagagaagagtatagggtataggtatttgtaattttttgtaaagattttgaatttattttttaagaatggagagttatcgaaggattttgaggaaagaaatgatattttttaatggttattttggtcgatgtggttaattaaggtaaagatggaagtagaaagaatagttaggaggttattgtatgattcgattaatttaagtgagaggtgatggtggtttggtatagggtggtttgggggtagtgagaagtgtttaggttttatttgaagatagagagtttgtagtatttgttgattgggtgtaatatttatgagaaagagaagagttaaagataaaaatatttattatgataagtatgttttaattgattgttgttaattaatgtttatttattagtaagttatgtttattttgcgttaggtttttatttttttgtttgttatttaaattttttttaaatgatattttagtgtatgttttgataaattgaaagtgaataatttattttgagagtttaataaattttatgttagtatgttaaataaaaatttagttattagttaaattgtcgattttattgaaaatatgagaaagttttaggtataattttttgagtttatatttttattttttatttttttttattatttattttattttaaaaaattgataggtaaaattgtatgtatttattgtgtaaaagatgatgttttaaagtatatatatattgtcgaatgattaaatttaattaattaatatatgtattattttatatagttattattttttgtgaggagaatatatttattttagtattttttaagaatataatatatttttaattatagttataacgttgtataatagattttttgaaattattttttttatttaattaaaattttgtattttttgattaatatatttttaattttattttacgttttttaatcgttttaatttttggtaattattattttattttgtatttttatggaattaatttgtttagattttatatgtgagtgggattatgtagtatttgtttgtatttggtttattttatttaaaataatgttttttaggtttatttacgttttggtaaatgatagtatttttttttttttttttggttgattagtattttattgtgtatatgtattatattttttttatttatttaggttgatttgatattttggttattatgaataatgttgtaataaatatgggagtgtatatatttttttgatatagtgattttattttttttgaatatatatttagtagtgtgattgttggattatatggtagttttatttgtaattttttgaggaaattttattgttttttatattgtttatattaatttagatttttgttaatagtgtgtaagagtttttttttttttatatttttgataatatttgttatcgtttgttttttttattatagttattttaataggtgtagggtgatattttattatatttttttaaaaaatttatatttttttgatgattaatgatgttggatatttttttatatatttgattgttatttgtgtgttttattttgagaaatgtttatttaagttttttatttatttttaaattgtgttgtttttttgttaatgattgtttgagttttttatatattttgtatattaattttttattagatgtatagtttgtaaatatttttttttattttataagttgttttttatttttgttgattatttttttggttgtgtagaagttttttagttagacgtaattttatttgtttgtttttgtttttgttttttttatttgtttagtttaatgttatgaagtatggttttatgtttttagatggttattttttatttaatgtataattattgtaattttggcgttttaaaaaaattgttttatttaaaaattaattgttgagtaattattatatattaggttttttgtaagtgtcggggatttagagataataagggaattttttatttttaaagagtttgttatttagtgggagacgtaggaatgtaattgagtaggagaatattatgagattcgttgtagaatagttatgagaatagaataaagttttaagagagtataaaggggtggtataatttaattttattaaaaaaatttaggaaaatttatatagagaggaggagtttataagtaattatgtagggagttgttatgggtattttagttaaaggaaatatgtgaggagtataaaagaggttggtttattgggttggttgtatatgtatgtgtttgttaaggtttgggagtgtgtgagtgaatggtggaaggtgagtttgaaaggaaagtagtattagattttgagtatttttatatattatagtgaaagattagaaatatattttataggtattggaattagtaaagaggtttttagtagggaaatggtatgattagattgaggttttatagtgattattttggtaaagttgtagagaatagattgagaggaggttttggtttgggaaattagttagtttattgtaattggtttatgatttgagtagtgtgggaagaaaggaggatatattttaaagaattatttagaaggtatatttagtttagtttggttgagaaagatacgtgggtggatagtaatgagtttaatatgatttttatatattagtatttggaaattagatggaagagaatatattgttttatgttaaggattaatatgaggagaagtagtttgaatagaagatgtgtttagtgtttaaggagtgattgtgtagtaaggtagagattattaaagagttagtttgaagtttagaatgaagtttgggtgaaaaattaaatgcgattagtgggaagttttttagaggttaatttatattttttattaaaatataggaatttatttttatattttttatagtaatggatttttaattatatatgtatttaataaatatattttatagatatttatataatataaagaataattattatataataaatttagtggtagaaaagttttattgtaattagtatgtttaaattttattgggagtattgtaaattaaaattatattttggggagattatatggtaatatataataagagttgtaaagatgattatattattttatttagtaattttatttttggttattaaagggaaataattcggtgtgtattaatgaaattgattttatagttttgatttttataataagttataagaaaatggtttaatgtgtatgtgtatatatttatttgaagtagaaatatgaacgttaaaaaatgggaagatatttaagttggtgttaaaatagtatttaaaattattataattatgagaatatatgtatgttaatgtagatttattggaaaaatattgaaaatgaaaattgttagatggtaagattataattttattttttttttaatttgaaataagttggtatagtatagttttttaaaagtttttataaatgtgtatgttaagttgtaataaagtaaatatatgtatgtagatatgtttaaatagttatttaattgttttttgggtatttggggagatggggtgaagaaaggggggtgatttgaatgaaggtggaggagaaaaatgagaattaagaaagtaaaggatcgagaagtttagtgtggtagtagttttttttttttttttgagagagttaaagggtggtattagggatttatgatttatggttgtggaagttttatgttatattggatgttatatgaggtgggatggaatatagtgattattttattttattttttttatagttttcgtggtgggttatggtagtgaatagtttttaggtatgtttacggtggaagatttgaatttaggttggtggtaggagataatataattacgtttttttttatgtatgtatttggtttaattgatatattaattatagataaaggggtaaaggttataaggcgttaggttagtatgaatagggaaagggattttttttttttttttttttaagaaaaataaaagtattagtattgtaaagattttttatgattttatatttatttcgaaagtttttttttattataggaagtgtattgattattggaggtataaaagaggtttttaaagagttcgatttttattttttttgtatagtttagtaggattttagttatgagattttttattttggttttttttggtatttgtttttttattgtatatattgtggaaggtaagtggagaagttgtttgtgagataaagaatagggaggtaaggtaggtgggtatatattttgggtttgatttaggttatgattggattaatttgttttttttaggggagttttaaattttttatgtgtaagaaaggaatgatgattttgattgtagagggtttcgtaaatttttaaaatagggagaatttgattagtatttgggtttttattttttttaattgggtaattttaggtaaattttttaattatttagggtttgtgtttatttatgtataattgaatagtataatagatatgattatttgagattaagattaaataaatattatggtttatttaataatattagatttttttataagtagtaattttttgattaatgttagttatggattagaggtgatgattataaatgtatttgtaggttttgtttatttaatatatagtttgataaattattaaaattttagagagtttagttataatgtggggatgtattagaggatgtatgttttggagtaaattaatgtttttaatataaaattaagttttaaatgattggaagtttaaatttttatgtttagaaaattaatattatttttaagtacgtgggggattttgttagtaatgttatgattattattatttatgagaaattttttgtttttgtaagagaatatataataataattattattaaatagattagtattttatatatagtttaataaatttgtaagatatatttaggtaagatttagatatatcgagtttttatttgagtatttagtaggtattttttaaggattaattttttttatgattggagtgaatttgtcgatttatttgtgttttagttggtaggtttattatttagattatgatattataatttaataatgggtttttaaggggttttatgaataaaggtggttaagtttggaagtttttgaaattatggataaaataaaaaaatattgatgaaataaaagagtttgattattatattaggttatatgttgttatttggttggtattttgttgagataatgggtatattatttgagggagatttagatttgagtaggggaaaggagttttgttagaggttgagaagaattgtagatattggttttaaatttttaagttttttagttgaaggagttttataagttttattggtgtttagttttttatatataaaaatgagggaaaacggtttttgttttgatttaattttgtaatttgagtgaaggtgatattttaaaaaataatatagatatttaaatattgttgataataaggaaaaggttttgtggttttaagtataataggattttttgagttttaggagtttattttagatattttatagagagaaatattgttttttaaatatgagagaaatagagaaaaaatttagatttttttttttttattggttatagaaataatttattattaaaaataaattggtaaaggtagaggatagtaatgtgtagattggtattgagagtgaagaaatgatgaagaaaagtatataatgaatattttttgtttagttttttgttttaaaaaatgttttttgatattagtaatattatagattaatgttggttattattagtggttattttagatgttttttagttgtttatttttttgggaagtaaagattagtgtttatagttaaggagaaaattagtatttagaaatttggattagattttatttaatttttaatagtattaatttttttaagttatttttttttttgtaatgtaagatgattttttatatttaatagtttaatttttttgggttattattattggggatgtatatttaagggttgatttttttttatatatattttattttttattatttattaattttttggagagtttttattatttttatgtatagaaaatttaatagtgtatatttaatttagtttagtggtaagtttttttgtttttgttatttttagtttggtattgtgagttatagattttggattcgggatattgtagattttattatattcgttattgtaatttgttttgatagtttttattagtttagttaaagtttttttgtttttttggttaatttgtgtgaaggttatagtggtgttttttgtggattggatgttttagttttgtttttttattttttgataatgtattaagggattttttattttaggatataggatagatagaaagttaattagtttgatggggtttatattatgtgtaatattagttgagttttttttttttttagtaaggtggtgatagtgttaatttttgtttaaagaataggtgattttttagtggggataatttttttgttagtagttttttttttagtttgggttaatagtttttgtttttttttttgttttgtttttggttagtatttgtggattagtttaagtggttgagtagttgtttgggggtttaaggtttgggtgaattggttaatggtagaaggtatttttagttgtttatagaggatagttttttgtagttggaattagatatagcggggttattttataaagtagcggaggttttttttgggttggatgttttgtttaatgtttgtttaagaaaatttttaggtttttttttatatagcggttttattatttttttagttttttgtttttttacgacggtagggtttggggttatttttttttttttggttatttttttttttagtattttaggtagttgatagagagagatatttgattatttaaaaaggagaatatttttatttagtttgttaaaagtatgttttttttttttattgaatgttgttttgtttagagtattttttacgtattattttgttattttatttatggtattgtaatatgttgtattatttgaaatgattttttttgtttgtttgtttgttgtttggtttttttatgagaagatatgttttatgaaaataggagtaatgtttgtttagtaaaatatgtgggatataataggtattattgtataaatgaatgaatgcgtgttattggggtatttgttagtcgttttaaatgtttaagtgaaaatatatatagagacgggataatattttgttatttttttttagtatgaaatttttgaaataattttgttgattgagtttttaaattagttaaatatttattaagaatttgtgacgggtaagagattcgggatgtttattagttttttttttttttaaaaagtaaatggttttaaatttttataatatttttagagtaatttaatagatgattgtttttgtgatttggataattgttttatttttaattgtttgttgtttttttttttttattagg

SEQ ID NO: 1644 - DNA, 8446 bp, Artificial Sequence
  chemically treated genomic DNA (Homo sapiens)
tttggtgaggaaaaaaaaataatagataattaaaaataaagtaattatttagattataggaataattatttgttaaattattttgagaatgttgtgagaatttaaggttatttgttttttgggggaagagaggattgataggtatttcgaattttttgttcgttatagatttttagtaaatatttgattaatttaaaaatttaattaatagaattgttttaggaattttatgttgagagaaaataataagatgttatttcgtttttgtgtatatttttatttagatatttgggacggttagtaaatgttttagtgatacgtatttatttatttatataatggtgtttgttgtgttttatatgttttattaagtagatattatttttgtttttatagagtatatttttttatgagggagttaggtagtagataggtaaatagaaaagattattttaaatagtgtaatatgttatagtattataagtgagatgatagagtaatgcgtgaagagtattttaggtaaggtaatatttagtgagggaaggaagtatgtttttgatagattaaataaaggtgtttttttttttaaatggttaaatgtttttttttgttagttgtttaagatgttgaaaggaaagatggttaaaggaaggaaagtggttttagattttgtcgtcgtgaggaagtaggaggttaagaaagtgatgaaatcgttgtgtgagaaaaggtttaagagtttttttaggtaggtattggataggatatttagtttaaaagggattttcgttgttttgtgaaatggtttcgttatatttggttttagttgtaaagagttattttttataagtagttgaaagtgttttttgttattaattagtttatttaagttttagatttttaaatagttatttagttatttaagttgatttataagtattgattagagataaagtaagagaagaagtagagattgttggtttaggttgagaagaaagttgttagtaaaggggttgtttttattaggaaattatttgttttttgagtaggggttaatattattattattttgttggaaaagaagaaggtttagttggtattgtatatggtgtggattttattaagttggttaattttttgtttgttttgtgttttaaaatggggggttttttaatgtattattaaggggtaagaaggtaagattgggatatttagtttataggaagtattattgtggtttttatataagttaattaggaagataaaggagttttggttaagttggtggaagttattaggataaattataatgacggatatgatgagatttgtaatgtttcgagtttaaaatttgtggtttataatgttaagttggaaatagtaaaggtagaggaatttgttattaaattgggttaaatgtatattgttgagttttttgtatataaaaataataaaaattttttaaaaaattaataaatggtaaaaggtaagatatatataaaaggaagttagtttttaaatatgtatttttaatagtaatggtttaaaggaattaaattattaagtgtagagaattattttatattgtaagaggaaaaataatttgggagaattaatattgttaagggttgggtgaaatttaatttaagtttttaagtgttgattttttttttagttgtagatattggtttttgttttttagggaaataggtagttaaaaagtatttaaagtaattattgataatggttaatattggtttgtagtgttgttaatattagaaggtattttttaaagtaagggattaaataaagagtgtttattgtgtgtttttttttattatttttttatttttaatgttagtttgtatattgttattttttatttttgttaatttatttttagtggtgaattgtttttgtagttaatgaaagaggaaaaatttgggttttttttttgttttttttatatttaagaaataatatttttttttgtgaagtatttgaagtggatttttaagatttagggaattttgttatgtttgaaattataaagttttttttttattgttagtaatgtttgagtgtttgtgttattttttaaaatattatttttatttaggttgtaaaattgagttaaagtagagatcgtttttttttatttttgtatgtaagaagttaagtattagtgggatttatagagtttttttaattagaaaatttgggaatttgagattagtgtttgtagttttttttagtttttaatagagttttttttttttatttagatttgagttttttttaaatggtatgtttattgttttagtaaaatgttagttaggtagtaatatgtggtttaatgtagtaattaaatttttttgttttattagtatttttttgttttatttataattttaaggatttttagatttagttatttttatttatggaattttttggggatttattattaagttataatattatagtttaagtaataagtttattaattagaatataaataagtcgatagatttattttagttataggaaaaattaatttttaagaaatatttattgaatgtttaggtaagggttcggtatatttgaattttatttggatgtgttttgtaggtttattgaattgtgtataaggtgttgatttatttggtagtagttattattgtatgtttttttataaaaatagaaaattttttataaatagtaatagttatggtattattaatagagttttttacgtatttgaaggtaatattgattttttggatatgaaggtttgaatttttagttatttggggtttagttttgtattgaaaatattgatttattttagaatatatattttttggtgtatttttatattgtaattgaattttttaagattttgataatttattaaattatatattaaatgggtaaaatttataaatgtatttataattattatttttaatttatagttaatattaattaaaaaattattgtttgtaaggaaatttgatgttattaaataaattataatatttatttaattttaattttaggtgattatgtttgttatattatttagttatatataaataagtataggttttgagtggttaaggaatttatttgaaattatttaattaggaaaagtaggagtttagatattaattaaattttttttgttttggaagtttacgaagttttttatagttaaaattattattttttttttgtatatgggaagtttaaggtttttttggggaaagtaggttagtttagttataatttgagttaaatttaaaatgtgtgtttatttgttttgtttttttgttttttattttatagatagtttttttatttattttttataatgtatgtagtgagagagtagatgttaaggagggttaggatgagaagttttatggttgaggttttgttgagttgtgtaaggagagtgaggatcgggttttttgaggattttttttatgtttttagtggttagtgtattttttgtggtgagagggggttttcgaggtgggtgtaggattatggaaagtttttgtaatattgatgtttttattttttttaaaaaaaaaaaaaaaaaaagtttttttttttgtttatattaatttaacgttttgtggtttttatttttttgtttgtggttaatgtgttaattaaattaaatgtatgtataaaagaaaacgtggttgtgttgttttttgttattagtttgaatttagattttttatcgtagatatgtttgaaggttgtttattgttatggtttattacggaagttgtaaaggaaatgaggtggggtggttattgtgttttattttattttatgtgatatttagtgtgatatgaggtttttataattatggattatgagtttttgatgttattttttgatttttttaggaggggaagagaggttgttgttatattgagtttttcgattttttgtttttttggtttttattttttttttttatttttatttaagttatttttttttttttattttatttttttaggtatttaagaaataattaaataattgtttaagtatgtttatatgtatgtgtttgttttattataatttaatatatatatttatagaagtttttgaaaagttgtgttgtattaatttattttaaattaaaaaagaaataaaattataattttattatttgatagtttttatttttaatatttttttagtgaatttgtattggtatatatgtgtttttataattgtggtaattttaaatgttgttttaatattaatttaaatatttttttattttttagcgtttatatttttattttaagtaaatatatatatatatatattaaattatttttttataatttattataaagattagaattgtaaggttaattttattaatatatatcgaattatttttttttaataattaggagtaggattattgggtaaaatgatatgattatttttatagtttttattatatattgttatatagtttttttaaaatataattttagtttgtaatgtttttagtagaatttaaatatattgattgtaatggaatttttttgttattgaatttgttgtatggtggttgttttttatgttatataggtatttataaaatgtatttattaaatatatgtgtagttaaaggtttattgttatgaggaatatgaaaataaatttttatgttttgataaaaagtataggttaatttttaagagattttttattaatcgtatttgattttttatttagattttattttaaattttaaattggttttttaatgatttttattttattgtataattattttttgaatattggatatattttttatttaaattgtttttttttatattagtttttagtatggagtaatgtgtttttttttatttaatttttaaatattgatatatagggattatgttagatttattgttatttatttacgtgttttttttaattaaattggattaagtatattttttaagtagttttttgagatgtgtttttttttttttttatattgtttaaattataggttaattgtagtggattaattggttttttagattagggtttttttttagtttgttttttgtagttttgttagggtaattattgtaaagttttaatttaattatgttatttttttattgagaatttttttattaattttaatgtttatgggatgtatttttaattttttattgtgatatataagaatgtttaagatttagtattgttttttttttagatttattttttattatttatttatatatttttaaattttaataaatatatatatgtgtagttaatttaatgggttagttttttttatgttttttatatgttttttttaattggaatatttatgatagttttttatatagttatttgtaaattttttttttttgtataagtttttttgaatttttttgataaaattaagttgtgttatttttttatgtttttttagaattttgttttgtttttatggttgttttgtaacgaattttatggtgtttttttatttaattatatttttgcgttttttattagatggtagattttttgagagtaggagatttttttgttatttttggattttcggtatttgtagaaagtttggtatgtaataattgtttaataattagtttttaagtaaaataatttttttaaaacgttaaaattataatgattgtgtattaagtgaaagatgattatttaaaaatataaagttatgttttatgatattgggttaagtaaataaaggaaataaaggtaaaaatagataaatagaattacgtttaattaaaaagtttttgtatagttaagggaataattaatagaggtagaagataatttatgaaatgggagaaaatatttataaattatatatttgataaggaattaatatgtaaaatatataaagaatttaagtaattattagtaagaaaataatataatttaaaaatgggtaaaagatttgaatagatattttttaaaataaaatatataaatagtaattaggtatatgaaaaaatgtttaatattattaattattagggaaatgtaaattttttaaaaaaatataatgaggtattattttatatttgttaggatggttgtgatagaaaagataaacgatagtaagtgttgttaaggatatggaaaagagggaatttttgtatattgttggtaggaatttaaattagtatagatagtatggaaaatagtagagtttttttaagaaattataaatagaattattatatgatttagtaattatattattgggtatatgtttaaaggaaatgaaattattgtattaaagagatatgtgtatttttatgtttattgtaatattatttataatagttaagatattaaattaatttaaatagataaagaaaatgtggtatatatatataatggagtattagttagttaaaaaaaagggaggaaatattgttatttgttaaaacgtggatgaatttggaaaatattattttaagtgaaataagttaggtgtagatagatattgtatgattttatttatatgtggaatttaaataagttgattttatagaaatataaagtagaatggtggttattaggggttggggcggttgagaagcgtggggtggggttggggatatgttggttaaagaatataaaattttagttagatagaaggaataattttaagagatttattatataacgttgtggttgtaattaaaaatatattgtatttttgaaaaatgttagagtgaatgtattttttttataaaaaatgatagttatgtgaggtaatgtatatattgattagttaggtttagttattcgataatgtatatatattttgaaatattattttttatataataaatatatataattttatttgttaattttttaaaataaaataaataataaaaagaagtaaaaaataaaggtgtgaatttaggagattgtgtttgaggtttttttatgtttttaatgaaatcgataatttgattagtggttgaatttttatttagtatattgatatggaatttgttaaatttttagaatgaattgtttatttttagtttgttaaagtatgtattagaatgttatttggggaagatttaaataatagataagaaagtagaaatttagcgtaaagtgggtatgatttgttaatgggtggatattggttgataataattagttgaggtatatttgttataatgaatatttttatttttgattttttttttttttatggatattatatttaattagtaaatattgtaggttttttatttttaaatagaatttaaatattttttattatttttaaattattttatgttaagttattattattttttatttggattagtcgagttatgtagtagttttttaattgttttttttgtttttatttttgttttaattgattatatcgattaaggtgattattagaaaatgttatttttttttttaaaatttttcgatggttttttatttttaggagataaatttaaagtttttgtaagggattataagtgtttatgttttgtgttttttttttttatttattttttgatatttttttttgttgttttttacgttttttatattaatataatacgcggttattttgttttttagatatgttaattttgtttttgattttaagtttttgtatttattgttttttttgtttaatattttttttttttagatgttagtatgattgatatttttattttttttaattttttatttaaatgttgtttattgtggttttttttgattatttaatttaaaattttgtatatatgtttattttggtattatttgatttatttttgttgttttatttttatttagaatttttaatatttttaaatatagtagtaatttatttgttgattttttttgtttgtttttttttaggaattttttattttttttattgttgtttttttagaattttgtataatgtttggtataaaggagttgtttaatttatatatttagaataaatataagtatatttggtgtgtacgtgtaggagtgtataagtaagtatatgtatgtgtaaatattaatatttatgtttgtaaattttagtgttttggaatattgatattgtttatgtatgtgtgattatatagtggaatgggaaaatttatttttgaaggaaagtatttattgttgagggaagaagatagaagtataaggggtataagtaaaggaaatttaacgtttttttttttttatgattttttggtttgaatattttaatttatttgataagttattttgtattttattatatataatatgtaatttatataaagatttttttttttataaaatatgtttgtataattttttaatttttttattaggt

SEQ ID NO: 1645 - DNA, 12142 bp, Artificial Sequence
  chemically treated genomic DNA (Homo sapiens)
attggtttatgtgaagtgtatagtattatttataatagatttttgttaagagtatgtagtttgggtttaattaagtttttagatttaattttcggtttataggaaataaataggatagaggaataaattagatgatattataaggaaataattaaataattaaattaagaatgagaatatcgtataagataatggatttgattttgttttttttttttttttgaggtagagttttattttgtcgtttaggttggattgtagtggcgcgattttagtttattgtaatttttatttttagggtttaagtaattttttagttttagttttttaagtagttgggattataggtgtatgttattatgtttatttaatttttgtatttttagtagcgacggggttttattatgttggttaggttggttttaaatttttgattttaagtaatttgtttgttttggttttttaaagtgttgggattataggtatgagttattatattcggtcgatttgatttttaagaaagttgaagttattaaaaaatgtgtaagtggtttgtgtagatttaaaaatatttatatgtagtgtatgaatttagatcggattttcgtttaaaagataaaagtaaggagggaataaaggaaagaaagaaggaagggagggaggcgttaggtgtggtattttacgtttataattttagtattttgggaggttaaggtgggtagatcgttggagtttaggagtttgagattagtttgggtaatatgggaaaattttatttttataaaaaaaaaaagtatagtaattagttaggtatggtggcgtgagtttgtggttttagtttttcgggaggttgagttgggaggatcgtttgtgtttgggaagtcgaggttgtagtgagttgagattatattattgtatttttgtttgggtgatagagagggattttgtttcgaaaagataaataaatggtcgggcgcggtggtttatgtttgtaattttagtattttgggatgttaaggcgggtggattataaggttaggagataaagattattttggttaatatagtgaaatttcgtttttattaaaaaaaaaaatataaaaaaaaaaaaaaaaattaattgggtgtggcggcgtgcgtttgtagttttagttatatttgggaggttgaggtaggagaatggcgtgaatttaggaggtagagtttgtagtgagtcgggacggcgttattgtattttagtttgggtgatagagcgagatttcgttttaaaaaataaaataaaataaaataaaataaaaataaatgaataaaataaaaaagaaagggagtgagggagagaagaaaggaggtaggaagaaggaaagagggagagaggagaaattataaaatatattttggggataattggagaaatttgggtatgaattgggtgttagatgatatataggaattattgttaattttgttagatgggataatgatattatatgtatgtaagataatagttttattttaaggagatgtatgttggaatatttaggggaaaagtgttaagtatttataatttattttgtaatggtttggttaaaaaataaaaataaaaaagataaaataaatattaaaaaatgttaattattggtggtagaggttttgtttgtttgtttgtttgtttgtttgaggtagagttttttttttgttgtttaggttggagtgtagtggtgtaatttcggtttatcgtaatttttgtttttcgagtttaagtaatttttttttagttttttaagtagttgagattataggtattcgttattatatttagttaattttttgtatttttagtagagacggggttttattatgttggttaggttggtttttaatttttgagttttggtgatttatttatttcggttttttaaagtgttgggattataggcgtgagttattgcgtttagttattggtggagatttgaaagtttttgtacgatttttttttttgtattgttgaatattttttaaaatagaaattttaaagagataaagtaaaattttgtttatttttagatggaaagattattttttttatttattttttttatttttttaataagtatgtagttttttttttttgttcgagtttatagtttttagttttttggtagggttggtaattttttttttttattgagttatagtttttgggggtaaggattttagtttatttgtttttgtgttttttattttattatattgtttggtatatatcgggtttaataatagatattaatgttttttgcgtgttaggtattgtgaaagtttttagttttatttattgtcgtggtggtttgatgaggtggttgtttgtattttattttatatatagggaagttgaaatgtagagagaggttaagttatttgtttaagggaatattttttattcgtggtggagttttgttgatgtatttatttatttttttttagatagggttttattttgtgtttaagttggagtgtagtggtatgattatggtttaatgtagttttaatttttttaggtttatttgatttttttattttagttttttgagtagttgggattgtaggtataggttattatattaattttcgtatattttttgtagggagggggttttattatgtttgtagagagggggttttgttaggttggttttagattttcgggaatttgtttttgttttttgtttcggttttttaaagtgttgggattataggtgtgagttattatattcggtttggagttttgtttagttttgggtttggttagtttgaaagtttggttattgtgtttaaattaaatttaaatttagtttttaatattttaatgagatagggtgattatttttattttatgggagtagaagttggatttggggagggtagagggtgtttaaagggttaaatgaggaaaagtagagtcgtgttttgtattttcgtttttattttatgttaggttttgtttcgtattttatggatataaatttatttagtttttatattggttttcgtagtgagggtggaggtaggtggtggattttattggttttgagtttagattttagagttagttggttgggacgaatttaggattttttattttttggttggtgaatttaagaaaatgttttttttttttttttttttttttagatagagttttattttgttatttaggttagagtgtagtggcgtgattttggtttattgtaattttttgttttttaggtttaagcgatttttttgttttagttttttaagtagttgggattataggtgtgtattatatttagttaatttttgtatttttagtagagacgaggttttattgtgttggttaggttggtttcgaatttttgattttaggtgatttatttattttagttttttaaagtgttgggattataggtgtgagttatcgtattcggtttttttttttgtttttatatgaatagagtagaaagaatacgattttagtttttatttttttttgtttttttttgggttttagttttattagttataaaaagagggattggatattgggaatgagaaggttattagttttttatgtgtataggttaggatagattttttgagtatgagtggattttggtttttgttaagggtgtttcgttattttaagaagtatttagttttttaatttttaattttatgtattaggtagtttattgggttgggtgggggggcgggggggggtggttgaggagagagaggtttttggttttgggatttgtggtttttttgtttagtttaattggtttatagcgtgggatgttggttttataattggttttttttagattggtagtttggagatattagtatagtttagttttatattaaggtagagttgttgatttttttggagttttagggattgttgttattgtttttagggaaggttgttatgaaggtagattgtgttttaatgtgtttttaaggttggtaagtttttgtatttttcggtgagagtttgttggagggtcggtgttgggaagttttttttttattgtattagtttaatgttttttttgggtagatagagaatttaggttttacgagaggtaagttttatttaagttacggttatagagttgaggagttaagagttatagagttatcggggatgggttggtagttattttgttttttgggttaataggggttagagtagaggtgggagtgggtgtaaagtagggagcgggagatcgggaggtggaggtagggaggttagggtttttttttgggttttgagttgtttatattttgtttattatggtggtgggaggggagttttttattttgatgttgtggataatttggggtggtttcgggttttagtttttttatttatttatatgaagttggatttaattttttttttagtagattttgtattaagtttttgttgattttaggttttttgttgggttttggagatgtatagattaataaggttttttaggagtttgggattttaagaggggaaatttaggggtttattttgatgtgggcgaggtattttttggattaaagaagagtttgttagatttacgatggaggggttttgagtttttttcggttttttggcgtttcgttttttattttacggtttgttggttttttgtgtgttgtttatttaggattaagggttttaggttagattttagggtatgtttttagtttgtggtaggagaggaggtttttgtatttaggtaggtttagtttagtttttcggggaaggttttagtatgataagtttaggatggtgagaagtttagggatataaagtcggtttggttttttggtaatattttgaggaatttagcggttgtatattggttttttttttttttttttttatttttttgtttgcgggggttggaggcggaggtagttaattttattataaaaagttatagatttttggcggcggtaaggggatagtattgagttttgtcgtttggttttagtcgtttgtttggttttcgtcgggatttttgtttatttttagttatggtttcgatatttttgtcgtggttgtttcgtttggttattttttgttatttgattgttttgttggttggtaagtggggtttgatttgggtataaatagggtagggagtttttagttttttgtttattttttaagtttgatattaggggttttagattttgtttgggtaaagtttaaggtcggtggtagtcgtttttttagggatgtgcgagagggggttgggtatttcgttttttttagatgtagcgttggatagatttttagttgttagcgatcgttttgtttggtttagcgagtaaagtggttgtgtttggaagtatagagaggtggtgtgggtggtataagggagttaggtgtgggtgtgttaggagggtgggggtggagagagtttgtagaagtttttgttgggtattggggtgggaggttttggttgatagtggttggttttttttattaagcgttaatgtgtaattcgtagttttggttttgggttaggttatagttgggatttttttttgttttgtttttaaagtttttaggattagggggtttaggattagtgaaggttaaggttattgtagtttatggttggggtttgttattgttgtgttagtttatagttttagttgttttgtttgtgtttattcgttatgttgttttttttttttaagtatagtgtagaaaatgtttttgtttttagttatttgtttattgaagtttaggatttggtaggggtatataattaatttttttatttgatatggataagatggaggtttagagaggtttagaaattggtttgataatgtatagttagtaagtagggtaggagaaggtaagatatatgggattgaatgtaggagagagtatagatgtatatttattatttttgtgggttatattatttttatgaatcgttagttagttttttttttagggagtgtttttattatttggtagggtgatttttagagaaggtgggtatatagtaagtttgggagaatgagaagtagtttttattgtttagatatttttatggagtaaatttattttggggtagggagtaggtgtgtgggtgggtgggtacgtgagagtggtggaggtaaatttttgttggttttttgttgtttgggttggggttttgaagtttgaggtgtttgcggatagtgagatttggaaagtagggagttagatggcggttgttttgttatagttttgttatgtgatcgtgagtagggttttgttttttttggttttagttgttgtatttttaaatatagttattattttttcggtggattgggggagggtgacgaggttttaatgtttgtggaggtgttttgaagagggcggaggaggaggattatttttattaagttgagagagggaagggttttaggttaggatggaaaggggatattgggggattttgggtgtttagattagtagtttgaggttttagaattaggtttttgtttttattttggttattggttttattggaagattttgggtattattggaattttttttagttttattttttttttttgtaaaattaggtatttgattaggtttattttggaagtttttttttacgttgatatgtatggttttgagaggttttcgggagtttttgtaggataagggggtggtttggaagttagagagatttcgagaggaggttggggggttcgtagttgttgttttgattagtgtggggtagttgcgttagtttttaaatgtgggtttgtggggttgtgttaggtaggaggtttttgtattttatataataaatttgtagttacgagttagtgtagagtattgtttttttattttaagagttgacgtatttatttttatttaagttttggtaagaaagagaaaaaaaaacgaatttgttttaagtttttatagtttattcgttttattagtagtgggggtggatggggagggtatgggaggataaatttaagagtgttagatttaggtttttgtttaatttaaataaaaatttttttatttttttgttggttaaggtattatgttataaagcgtttttttaggtattttgtttatttatttaataaatagttattggatatttattgtgtgataaatttggttttaggtattggggcggtattaataaataaaatagttaaggattttagtttttaaggtgttgtaatttaattgtagaggatatataatatataaagtaaattagtaaataatgtggtttgttggaaggagaaaaggtattgtgataaaaaaatagagaggggtggttgggcgtaggggtttatgtttgtaattttagtatattgggaggttaaggcgggtagattatttgacgttaggagtttaagattagtttggttaatattatgaaattttgtttttattaaaaatataaaattagttgggtgtggtggtgtatgtttgtagttttagttatttgggaggttgaggtaagagaatcgtttgaatttgggaggtagaggttggagtgagtcgagatcgtgttattgtattttagtttgggtgatagagtgagagtttatttaaaaaaaaaaaaaaagaaagaaaagaaaagaaaaagaaaaatagagaggggagaagagaggtgttgatattttaaatagggggttagggaagtttattgagtaggtggttttgtatagtttggagcggggtgagggcgggagttatgtggatatttttagagtaatggtttttagtgagtaattttgtttttttatgggttatttggtaatttttagagatattttttatttgttataaatattttaatgtttttggtttagttgagttattcgtttttagtgtgtagaggttatagatgttgttaaattttttatagtattcgggatagtttttaaaataaagaattgtttggtttaaaatgttagtagtgttattgttgagaaattttgttttaagggaaaaatgttttagaagttaaaaaatttttatttttataattatattgtgaagtaggtattgttatatttattttataagtaaggaaattgaggtttagggagttcgagtgatttgtttaggatatatagttgggtaatggtttaagttttttttttattattttatttagtaatttaggatattttttgagtttttttttaagattttggaagatttttagaagtttttgaggtttagtttaaaggagaatttttttaagaagttttttttgattatttgaagttggaagtggttttttttttatgtaaattttaatatgtttgtggtatgttttggaatattgtgtttttatttggtatttagggtagtttagaatagtggggtgtttaggggttgagtagaaaattagttttgttattatgtagttgtgtggtattgggtatatttagttttttttatttttagtttttgtatttgtaaagtggggataatattttttttgtaggaatgttgggaattaaagagagtagatgtgtatatgttggatatagggtttaatatatagtaggtgtttaattaaaaaaaataaataaaatttttgatattttgtgtgtttaatttatttgtttattaggttgggagttttttgaggttagaggtattttttgtttattttattgtattttatagtatttagtatagggtttggtaagaggaattagtatttgttggttgattgaataaatagagtgatttgatggtatttattgggatggaagtattttttttaaatttagtattagtgtttatgggagaaagagtttaaggttaaggataagagggtttgagatttttgtatatatttaaaagtaattttagttagtgttggttgaattaggaagtggatggatggatggatggatggatggatggatggatggatggatggatgggtggatagatggatgaatggatggatggatggatgggtggatggatggatagatggatggatggaagaagggatggggaggggatgatgagggatggatgagtaggtgagataaaagggggcggaagattgataggtggtaggtaggggagagggagtgggtagatggatgaatggagatgaataggggttgggtaggaggtggtaggtgggcgaggaatgggtagaagattgataagagtgggtggacgggtggatggataggtagatagatgtattaaagagagataagtaaattgagattaattttatttaatgaatattgattgagtatttattttgtgtttgatgttgggaaattatgatattaagatagataaggtttttgtttttttgatatttttatgatagataatatatgattggttggatgaggtattgtttttatttatagaaaggaaaattttagttttgagaagggataggttttttaggttagttaaataatttttttggtagaattaagaattgagtcgggttaggattatttagggatcgtggtagagggtggggattttggagataggatgattttgtggttttttaaagttttggaggtgggtaatggttttttttattttggatttggggagtatagaatggatttttttttttatttattgggtagttttttttgtttttttttgtttttggttatttaggggtatcgtattttttggggttttttaaagaagatatttgtaggttattttaggggattgttatttggttttatttaatagggtttggggaggttgtaggtgagttagtttgaggttttattgtagaaggagggtggttagtttatatagtgatttttatattttggttatttagagagaaaggatagttttgtgatttggggagttttttttgtatatagtttttaattttttgaagttattagtgtttttttttgatgatttaatttagatttgtcggttttaaattatttttttataaagtagggtgggttaaagttaagggggagcgatggagagaggaagtagtagattttataaagtttttttgtgtgtgtaagcgtgtatgtgtttgtatttgggaaagtggtgtatgtttgtatggttatatatatgtaaatatttatgtatgagtagttcgtgttttggtggagtttagggatgttttgggggttttttaggttttgaagggttagataagattagtttgtttttttgattgttttggtttttagatgtttgtaaaattttttggggttttgtttttgttgtatataattttgatttagatttgaaatttaagtttttttttgttttttatatttattttttttgagtttaagttaagtagaagaaaatttgttggagattatagaggaagagaaaaggtggaaatttaatgtaaataattttaaatgtttatattaaatagttgggtttatttgttttgtttcggggtttttttttggttttacgtgatatttagttattgtttgtttttttcgttttattttgtttttattttatttatatcgtttatttttaatttttttttttattttttttgttttaggaattttaaatgtttttttttttttaggtaggatgatttagtattttttagtaattgttttcgggtttattttggtttttagtagtagaataaaggattatttatttagtagattttattttttttagaaagtagttgtatttatatattttttaaaaagtttattgttgggtatagtggtttgtatttgtaattttagttatttcggaggttgaagtgggagaattatttgcggtcggggtttaagattagtttgggtaatatagtaagattttgttttttaaaaaaattagttaggtatggtagtaggtatttgtagttttagttatttgggaggttgaggtaagagattttttttttttttttttttttttttgagacggagttttgttttgttatttaggttttagtgtagtggtatgattttagtttattgtaatttttgtttttcggatttaagtaatttttttgttttagtttttcgagtagttgggattaaaggtgtatattattatgttaggttaatttgtgtatttgtagtagagataaggttttattatattgattaggttggttttaaatttttgattttagatgatttatttgtttcggttttttaaagtgttgggattataggtgtgagttatcgtattcggttaggaggattttttgagtttaggattttgaggttgtcgtgagttaggattatattattgtattttagtttgggtaatagaataagattttattttttaaaaaaaaatggtagcgggaagaaataaggtagaggtgaggggataggtaaggttataggttcggtggggattagagtaggagaatttgttttattatttgttggttgtgtgattttagtaggtttttgttatttttagatttattttttttgttgtataatggattatttaattttaaaaattaattcgggtttggtggtttaagtttgtaattttagtattttgggaggttaaggagggtagattatttgaggtcgggagtttgagattagtttgattaatatggagaaatttcgtttttattaaaaatataaaattagttaggagtcgtggtatatgtttgtaattttagttattcgggagtttgaagtaggagaatcgtttgaatttgggaggtcgaggttgcggtgagtcgagattatgttattgtattttagtttgggtaataagagtaagattttaatttaaaaaaaaaaaaattaaatttttaatatgtgttaggtaaaaagaattttataaataagaatttacgttttttatttttataataagattatgaggtagatgttatttttgtttttattttataggtggggaaattgaggtatagagaagtttggtaggggagggaggttgagttaaaggttttgaaggttagggtgtataggggattagttttggtttgggtggtgtggtcgggataatttggtacggggttgggaagttagatgtttatagatatttttgttgattaggaatttttttgaatttagg

SEQ ID NO: 1646 - DNA, 12142 bp, Artificial Sequence
  chemically treated genomic DNA (Homo sapiens)
tttgagtttaaagaggtttttggttagtagggatgtttgtgggtatttggttttttaatttcgtgttagattgtttcggttatattatttaagttaaaattgattttttgtatattttggtttttaaggtttttgatttagttttttttttttgttaaatttttttatgttttagtttttttatttgtaaaataggaataaaaatagtatttattttatagttttgttgtaagaataagaaacgtgaatttttatttatagagttttttttgtttggtatatattaagagtttaatttttttttttttgagttggagttttgtttttgttgtttaggttggagtgtaatggtatgatttcggtttatcgtaatttcggttttttagatttaagcgatttttttgttttagattttcgaatagttgggattataggtatgtgttacgatttttggttaattttgtatttttagtagagacggggtttttttatgttggttaggttggttttagattttcgattttaggtgatttgttttttttggttttttaaagtgttgggattataggtttgagttattaggttcgagttaatttttaaaattaagtggtttattgtgtagtaggggggatgaatttgagagtgatagggatttgttaaggttatatagttagtaagtgatggagtaggtttttttgttttagtttttatcgggtttgtggttttgtttatttttttatttttgttttattttttttcgttgttatttttttttaagagatagggttttgttttgttgtttaggttggagtgtagtggtataattttagtttacggtaattttaaaattttgggtttaagaaatttttttggtcgggtgcggtggtttatatttgtaattttagtattttgggaggtcgagatagatagattatttgaggttaggagtttgagattagtttgattaatatggtgaaattttgtttttattataaatatataaattagtttggtatgatggtgtgtatttttagttttagttattcgggaagttgagataggagaattgtttgaattcgggaggtagaggttgtagtgagttgagattatattattgtattaaagtttgggtgatagaataagatttcgttttaaaaaaaaaagaaaaaaaaaaagagattttttgttttagttttttaagtagttgggattataggtgtttgttattatgtttggttaatttttttaagagatagggttttgttatgttgtttaggttggttttgaatttcgatcgtaagtgatttttttattttaattttcggaatagttgggattatagatgtaagttattatgtttagtaataaattttttaaaaaatatataagtataattgttttttaaggaaggtggggtttgttgaatagatgattttttgttttgttgttgagagttagaatgagttcgagagtagttgttgaaaggtattgagttattttgtttaggagggaagaggtatttgaaatttttggagtaagaagagtaaggaggagggttggagatggacggtatgaataaggtgggggtagagtggggcggaaggggtaggtagtagttgagtgttacgtggaattagagagaaatttcgggataggataaataaatttaattatttgatataaatatttgaagttgtttatattgaatttttattttttttttttttttataatttttagtaaatttttttttgtttagtttgagtttaaggaggatgagtataaaaaataaggaagagtttgagttttagatttgagttaaggttatatgtagtaaaagtaagattttagagggttttgtaaatatttggagattagggtagttaagagagtaagttgattttatttagttttttagagtttgggaaatttttagggtatttttgggttttattagaatacgaattgtttatgtataaatatttatatatatgtggttatgtaaatatatattatttttttaaatataggtatatgtacgtttgtatatatagagagattttgtagagtttgttgttttttttttttatcgtttttttttagttttggtttattttgttttgtgggaaggtggtttagggtcggtaggtttgggttgagttattaaggagaagtattagtagttttagggggttgggggttgtgtgtaggaggggttttttaggttatagggttgttttttttttttgagtaattaggatataaaagttattgtgtgggttggttattttttttttgtaatggaattttagattgatttatttgtagtttttttaggttttattgagtggagttaggtggtagttttttaaaatggtttgtaggtgttttttttgggaagttttagaaaatacggtgtttttgagtgattagagataggaggaggtaagggaggttgtttaatggataggaaagaaggtttattttgtgttttttaaatttaagatgggaaaagttattgtttatttttagggttttaaagagttatagagttattttgtttttaaagtttttattttttgttacggtttttgaatggttttggttcggtttagtttttggttttgttaggaagattgtttaattgatttggggagtttgtttttttttagagttgaaatttttttttttgtaaatggagataatgttttatttagttagttatatattatttgttataggagtgttaggaaggtagggattttgtttgttttggtattatagttttttagtattaagtataaggtggatatttaattaatatttattgaatgaaattagttttagtttatttatttttttttaatgtatttatttatttatttatttattcgtttatttatttttattaattttttatttatttttcgtttatttgttattttttgtttaatttttatttatttttatttatttatttatttatttttttttttttatttattatttgttaatttttcgtttttttttattttatttatttatttattttttattattttttttttatttttttttttatttatttatttgtttatttatttatttatttatttatttatttatttatttatttatttatttatttatttatttatttatttatttatttatttatttatttatttatttattttttgatttagttaatattggttggaattatttttgagtatatataaaaattttaggtttttttatttttaattttgagtttttttttttataggtattggtgttgagtttgaagagagtgtttttattttaataaatgttattagattattttgtttatttagttaattaataaatgttggttttttttgttaggttttgtgttgggtgttgtgaggtatagtgagatgaataaggaatgtttttggttttagaaggtttttagtttgatggataggtaaattaggtatataaagtattagaggttttatttattttttttaattgaatatttattgtgtattggattttgtgtttagtatgtatatatttgttttttttaatttttaatatttttgtaaagggagtattatttttattttatagatgtagaagttggaaataagagaggttaaatgtgtttagtgttatatagttgtatggtggtagagttagttttttatttagtttttaaatattttattgttttaggttattttagatgttaggtagaaatatagtgttttagaatatattataaatatattggggtttatatgagggagagattatttttaattttaaatggttaggggaggttttttggaggaatttttttttaggttggattttaaggatttttaagagttttttagggttttagaaggagatttaggaaatgttttgggttgttggatgaggtgataaagggagggtttgagttattgtttagttgtgtgttttgagtaagttattcggattttttgagttttagtttttttatttgtaaaatggatgtgataatatttgttttatagtgtggttgtgagaataagaattttttaatttttggagtattttttttttagggtaaggttttttaatagtgatattattgatattttggattagataattttttgttttgggggttgtttcgggtattataggaggtttggtagtatttatggtttttatatattagaggcgagtagtttaattgaattaaaaatattgggatatttgtaataagtaaaaaatgtttttagaaattgttaaatggtttataggggagtaaaattatttattgaggattattgttttagagatatttatatggttttcgtttttatttcgttttaaattgtgtaaagttatttatttagtgggtttttttaattttttatttaaaatgttaatatttttttttttttttttttatttttttttttttttttttttttttttttttttttttttttaaatggatttttattttgttatttaggttggagtgtagtgatacgatttcggtttattttaatttttgttttttaggtttaagcgatttttttgttttagttttttaagtagttgggattataggtatgtattattatatttagttgattttatatttttagtagagatagggttttatgatgttggttaggttggttttgaatttttgacgttaggtgatttgttcgttttggttttttaatgtgttgggattataggtatgagtttttgcgtttagttatttttttttatttttttattatagtgttttttttttttttaatagattatattgtttattgatttattttgtgtgttatgtgttttttgtagttgaattatagtattttgagggttgaggtttttggttgttttatttattgatgtcgttttagtatttagaattaggtttgttatatagtaggtgtttaataattatttgttgaatgaatggataaaatgtttaaggaagcgttttgtggtataatattttaattaatagaaaaatggaggaatttttatttaaattagataggggtttggatttgatatttttgaatttatttttttatgttttttttatttatttttattgttaatgaggcgggtaggttataggagtttaaaatagattcgttttttttttttttttttgttaggatttgagtgggagtgaatgcgttagtttttggagtgggggggtaatgttttgtattgattcgtagttgtaggtttgttatataaagtatagaagttttttgtttgatatagttttataaatttatatttggggattgacgtagttgttttatattagttagggtagtagttacgaattttttagttttttttcggggtttttttggtttttaaattatttttttgttttataggggttttcgagggttttttagagttatatatgttagcgtgggagaggatttttaaggtgagtttggttaaatgtttagttttataggaggagaaagtgaggttgagaaaggttttaataatgtttaggattttttagtaaagttaatgattaagatgagggtagaagtttggttttaaagttttaggttgttagtttgagtatttagggttttttagtgttttttttttattttagtttaggattttttttttttttagtttagtaaaagtaatttttttttttcgttttttttaaaatatttttataggtattggaatttcgttatttttttttaatttatcggagaggtaatagttatatttaaagatgtagtaattgggattagaggaggtaagattttgtttacggttatataataggattgtggtaaagtagtcgttatttgattttttgttttttagattttattattcgtagatattttaggttttagggttttagtttagatagtaggaagttagtaggaatttgtttttattatttttacgtgtttatttatttatatatttgttttttgttttagggtgagtttgttttatggaaatatttggatagtggggattattttttatttttttagatttgttgtgtgtttattttttttgaaggttattttgttagatggtgggggtattttttgaggagggggttggttagcggtttatggaggtgatgtggtttatagaggtggtgagtgtgtatttgtgtttttttttgtatttagttttatgtgttttatttttttttgttttatttgttggttgtgtattgttaggttagtttttaaatttttttgggtttttattttatttatattaggtaggaaggttaattatgtatttttattaggttttgggttttagtaagtaagtgattagaggtaaaagtattttttatattgtgtttggaggaggaagatagtatgacgggtagatataggtagagtaattggggttatagattagtatagtagtggtaagttttaattatgagttgtagtgattttgatttttattggttttgggttttttaattttgggggttttgaaaataggataggagaaagttttaattgtggtttggtttagggttagggttgcgggttatatattaacgtttgatggaaagagttagttattgttagttagggttttttattttagtgtttagtaggagtttttgtaggttttttttatttttatttttttggtatatttatatttggtttttttatgttatttatattatttttttgtgtttttaggtatagttattttgttcgttgggttaggtagggcggtcgttggtaattggaaatttgtttagcgttgtatttgggggaagcgaggtgtttagttttttttcgtatatttttggggaagcggttgttatcggttttgagttttatttaggtagggtttggggtttttgatgttaggtttgagggatagataaggggttgggggttttttattttgtttgtgtttaagttaagttttatttattagttagtaggatagttagatggtagaaggtggttaagcggagtagttacgatagagatatcggagttatggttgagggtgggtaagagtttcggcgggggttaggtaggcggttagagttaggcggtagagtttagtgttgtttttttgtcgtcgttagagatttgtggttttttataatggggttggttgttttcgtttttagttttcgtaggtaggagggtgggaggggagaggaagggagttagtgtgtagtcgttggattttttaggatgttgttaaggaattaagtcggttttgtgtttttgggttttttattattttaggtttgttatattgggatttttttcgggaggttggattgggtttgtttgggtataaaggtttttttttttgttataagttgggaatatgttttaggatttggtttggggtttttgattttaagtgggtaatatataaaaggttagtaggtcgtggaatagagagcggggcgttaaggggtcgggagagatttagggtttttttatcgtgggtttgataagtttttttttgatttagagaatgtttcgtttatattaggatggatttttaaatttttttttttagaattttaagtttttgggggattttgttgatttatgtatttttagagtttagtagggagtttgaagttagtaggggtttggtgtagggtttgttgaaagaaggattgagtttaattttatatggatagatggggaaattgaggttcggagttattttaggttatttatagtattagagtggagaattttttttttattattatgatgagtagaatgtggatagtttaggatttaggagagagttttggtttttttgtttttatttttcggtttttcgttttttgttttgtatttatttttatttttgttttggtttttgttagtttaaagaataaggtggttgttaatttattttcgataattttgtggtttttggttttttaattttgtagtcgtggtttggataaggtttgtttttcgtggggtttgagttttttatttgtttaaagagagtattgggttagtgtaatggggagagggttttttagtatcggttttttaataggtttttatcgaagggtgtagaggtttgttagttttgggagtatattagaatatagtttgtttttatggtagttttttttaaaggtagtggtaataatttttgagattttagaagagttagtagttttgttttggtataggattgagttgtattggtgtttttaggttgttaatttgagggaaattagttgtggagttagtattttacgttatgagttagttgggttgggtagaggggttatagattttaaggttagggatttttttttttttaattattttttttcgtttttttatttaatttaatgggttgtttggtgtatggggttaggggttaggaggttagatattttttgaagtagcggaatatttttggtaggagttaaggtttatttatgtttagagaatttgttttggtttgtgtatatgggaagttagtagtttttttatttttaatgtttaatttttttttttataattggtgaaattgaggtttagagagggataaggagggataaaaattgaggtcgtgttttttttgttttgtttatgtaagaatagaggaggaggtcgagtgcgatggtttatatttgtaattttagtattttgggaggttgaggtgggtggattatttgaggttaggagttcgaggttagtttggttaatatagtgaaatttcgtttttattaaaaatataaaaattagttgggtgtggtgtatatttgtaattttagttatttgggaggttgaggtaggagaatcgtttgaatttgggaggtagagggttgtagtgagttaagattacgttattgtattttagtttgggtgatagagtgagattttgtttaaaaaaaaaaaaaaaaaaaaaagatatttttttaggtttattagttaggaaatgagggattttggattcgttttagttagttggttttgaggtttgagtttaagattagtagggtttattatttgtttttatttttattgcgaggattaatgtgaagattaagtgagtttatgtttatagggtacgggatagagtttggtataaaatagaagcgaaaatgtaaagtacggttttgtttttttttatttgattttttggatattttttattttttttaggtttagtttttatttttataaaatgggaatgattattttattttattaggatgttaagaattgaatttagatttaatttggatataataattaggtttttaggttagttagatttaaggttaaataggattttaggtcggatgtggtggtttatatttgtaattttagtattttgggaggtcgaggtaggaggtagaggtagattttcgggaatttgagattagtttggtaaaattttttttttataaatatggtgaaattttttttttataaaaaatatacgaaaattagtgtggtggtttgtgtttgtagttttagttgtttaggaggttaaagtggaaggattaagtgagtttggggaggttgaggttgtattgagttatgattatgttattgtattttagtttgggtatagagtgggattttatttgaaaaaaaataaataaatatattagtaggattttattacggataaggggtgtttttttgggtaagtgatttaatttttttttgtattttagtttttttatatgtaaaatgggatgtaaatagttattttattaagttattacgatagtgaataaaattaaggatttttatagtgtttggtacgtaggaggtattagtatttgttattgagttcggtgtgtgttaggtaatgtggtgggatgggggatataaaggtaagtgagttgaagtttttgtttttaggagttgtagtttagtaggagagagaagttgttagttttattagagggttagaggttgtgggttcgggtaggaagggagaattgtatgtttgttggggaaataagaaaggtgggtgagagagatgatttttttatttgaagatgggtagaattttgttttgtttttttaaaatttttgttttggaaaatatttaataatataaaagaaagaatcgtataaagatttttaaatttttattaatggttgggcgtagtggtttacgtttataattttagtattttgggaggtcgaggtgggtggattattagagtttaggagttggagattagtttggttaatatggtgaaatttcgtttttattaaaaatataaaaaattagttgagtgtggtggcgggtgtttgtaattttagttatttgggaggttgggagagaattgtttgaattcgggaggtagaggttgcggtgagtcgagattgtattattgtattttagtttgggtaataagagagaaattttgttttaaataaataaataaataaataaataaaatttttattattaatgattagtattttttaatatttgttttattttttttatttttattttttagttaaattattataaagtaaattatagatgtttgatattttttttttaaatattttagtatgtatttttttagaataaagttattgttttatatatatgtaatattattattttatttaataaaattaataataatttttgtatgttatttaatatttagtttatatttaaatttttttaattgtttttaaaatgtattttgtggttttttttttttttttttttttttttttttgttttttttttttttttttttatttttttttttttttattttatttatttatttttattttattttattttattttattttttgagacggaatttcgttttgttatttaggttggagtgtagtggcgtcgtttcggtttattgtaagttttgttttttgggtttacgttatttttttgttttagttttttaaatatagttgggattataggcgtacgtcgttatatttagttaatttttttttttttttttgtatttttttttttagtagagacggggttttattgtgttagttaggatggtttttattttttgattttgtgatttattcgttttggtattttaaagtgttgggattataggtatgagttatcgcgttcggttatttatttattttttcgagatagggtttttttttgttatttaggtaggagtgtaatggtgtaattttagtttattgtagtttcgattttttaggtataagcgatttttttagtttaatttttcgaggagttgggattataggtttacgttattatgtttggttaattattgtattttttttttttgtagagatggggtttttttatgttgtttaggttggttttaaatttttgggttttagcgatttgtttattttggttttttaaagtgttggaattataggcgtgaggtattatatttggcgtttttttttttttttttttttttttttttattttttttttgtttttattttttgaacgaggattcgatttaggtttatgtattgtatatgggtatttttgagtttatatagattatttgtatattttttaatgattttaatttttttaagagttaagtcggtcgggtgtggtggtttatgtttgtaattttagtattttgggaggttaaggtaggtagattatttgaggttaggagtttgagattagtttggttaatatggtgaaatttcgtcgttattaaaaatataaaaattaggtgggtatggtggtatgtatttataattttagttatttgggaggttgaggttagggaattgtttgaattttggaggtggaggttgtagtgagttgagatcgcgttattgtaatttagtttgggcggtagagtgagattttgttttaaaaaaaaaaaaagagtaaagttaagtttattgttttatacggtgtttttatttttaatttagttatttagttatttttttgtgatgttatttaatttgtttttttattttatttattttttgtaaatcgaaagttagatttaaaggtttgattagatttaggttatatatttttggtaagaatttattatgagtaatattgtatattttatatggattagt

SEQ ID NO: 1647 - DNA, 9206 bp, Artificial Sequence
  chemically treated genomic DNA (Homo sapiens)
tgggattatagtcgtgagttattacgtttagtttataatattttttttaataaattagtaaatataagtgtttttttgagttttatgagttgtggtagtaaattaatgaaatttaaggatggggttatagaaattttaatttatggttatttggttagaagtattgggaaaataatttagggtttgtaattggtatttgaagtaggggtagttttgtgggattggggttttaatatgtggggtttgagtttatttttaggtagattattttagagttgaattgaattagaagatagttagttggtgtttgtagttgaaggattattggttttgtatgtggggaattttcgtttttttttttatatatatatatatatttgaagttataaaagtattttgtgttgtgagagtaaggagaaattgagtttgttatttttatatttttagatttttttgttttagtattgtttagtaaggaagtttttgggtagagtttgtttagatagaagttttggtttgttagacgtgtatatattttgacggtaagttttgtttgtttatatatgtgtttagaattagtggggattagttttgttttttaggggtttttttttttagggtagtttggggttgtttgtaattggtttttgaggttagtggggatttagataggaaaaatatggttagttggttaaatgttaagttttggttttgggtacgggattttaaaaggttttttggatgattgttatgggagtgatttatgtttttaagagtgtttttaggatttggttgatgttttaggatttagagacgttggttttagagagatgtatttttgtttttgtttggttttgttatgttggtcgaggtttttaattttgagttttgggtttagagtttatggagatttgggttttatgtttttaaagttgagatagtggggtttatattgtaagttcggtttttgaaagtattaaattgataaatttaaagaaggtaaattaaagttttatgtaagtttattgtttagtatttttttaagggttttttttgggttaagtggttttatattgattaaatttattatgttagttaatgtatttgttgtatagatgatattagtaaggcggtgaggatttgttttttttatcgggttttttggtttttggaataggttatttgtttttgaattttagggttaggtgttaaaggagtgagggtagatgtgggtggttgggaggggtttttttaggattgtacgggagttgggagaggagtatttttggaggggtggtagggttaagggtatttagggattttatagggttttatagtttttttatgatttgagcgtttttggattagcgttttttagttttatttggtaggtaagtgaggaagatatcgtgttttttttgtgtgattttatgttttagtattttggagttaaatatttattttaagagggggattgcggtgggagggtgttaagtaatataaaaaatattttttatgtagaaaaggtttttaaattttagatttatttgtattgttgttaaaatttttgttatgtttttagttatttagattagtatttgttatgttagttttaattgatttattttttaaaatttgaattatatattaaaaaaaaaatttgagtaatatttgaaatatttgtttttattgtgttagttatatttttttttattattttaaaaaaataaatatataaatttatattttatagattttagagtattatttgaagttattttgttaattatatattgtataatatggatttagtgtaaatttttaatttttattgggaatttttttgtaggtttagtcgttgggttttggaggagtgaacggtttaggttaggtagaggggggtaggtagatgttgtttaggggtttagagattatagtatatatgttagtttaggagatgttttgtttttaatttagtagttagatttttgttttttattttgaattgtgtttaataaggtatttttgaggagtcgttgtgttttgtattatttggtagagcggtatagagtttgaagattttaggagaaggtggggttttatggggagtaagagtttttaggtagagaaagaaaggtggagttttttgagtataagtataagtaaaggatatagggaaaggggtggggaatttcgttgattcgaatttgagaggtatttttgtggtcgagtgagttggagatatgttaaaatggtttggtttgatggtcgtttgtttgtgtaggcggtgcggaggtttttagagtgtatagggttttattttattttatttatatatttatatatttatttatttatttatatatttgtttatttatttatttttgagacggagtttcgttttgttatttaggttggagtgtagtggcgttatttcggtttattgtaagtttcgtttttcgggtttacgttatttttttgttttagtttttcgagtagttgggattataggcgttcgttattacggtcggttaatttttttgtatttttagtagagacggggttttatcgtgttagttaggatggtttcgaatttttgatttcgtgattcgttcgtttcggttttttaaagtgttgggattataggtatgagttatcgtgttcggttagggttttaaattttaatcgttaattgtaaaattgtgaggtttgtatttaaaatatggatttttggttattttatttaaaattttaatttttattttatttttttttgttttatttttttttagtatttaatggttttttaagtattttatgcgtaattatttatgtttagcgttatgtgtttttaaacgtttagtgttttttttaaattattttaaatatgtagtttaggtttagtatatagtgggtgtttagtaagtatttaacgaacgattagcggaagggatggttttatgggtgttatagtagtttttgttttggggttttagggcgtttgcgggaggggtagcggttaggtttgaatttttggttcgttttcgatttagtttacgcgggttttttaggtttttgggatagattttaggtttagttgtttatttgattttgtggtaaagaaaaaaagaagaagaagaagcgagaggcgatggcgtttgttttggttagatttaagggtaagcgaggttgcgcgcggttttcgtagggtcggattttcgagttttagggcgtttttttattcgggtgtagatttttcgcggattttttcgttttttcgggttttattagttgcgtaggaatggagttggttagagttttgggagcggggagggaggcgtcgttattagagggcgtcggagttttagcgttgcggtcggtgagcggttaggtttttcggtttagtttagtaaaggtttggggacgttcgacggttgttttttttattggattttattgtttttagttttttaagagtagggttaagttagtggggttttcggttttaagtttagtgtttagggtgggtgggtgggtgggtgggtgggtggatggatggatggatggatggatggagtgtcggtttatagttatttaacggttaaagtggttttggaaaaaaaatgtatagaagatatttatttttattagcggagtttcggagttttcgtagttttttgttgatcgttttcgtttaatgtagtcgttgatcgtttatttttcgacggttaggattttttagggatagggacgtgtttttagggtaggtttttggatggacgcggcgattgattttatttcgttggacgttgtgttgggaaggatatagagaggtggttggggtagtttgcggttataaagcgaggtttaaaggggcgttttttttatttttacgttttttgggtgtcgatttgtatttttttttcgttatcggattggggttatttgggatgtttcgggggtattcggagggttaagtatcgtcgagggacggtttcgtgggaagagttttttggatttagaaggtagacgttagtagtattgttttaggagtcggaggtcggggtgggggagtttttagttttttgggtcgtacggagttttttttgggtaaggtagtaagtatttaggtttaaaggatttatttatagttattatttattgagtattgtttgtttgttagatacgatgtagagaatttcgcggcgtggggcgggttttattgaatttttcgttttatttcgcggggtgggtttgtgattagtttattttattattgagaggtcggaagtataaaggttatattcgtttttattgagagtcgtcggcgttttttgttttgtttgtataggcgaggaaattgaggttcggttggtggcgtcgtgggtttggagttcgagttacgttgattgtaaagacgggttttattttcgtagatcgagttttgtcggcggttgcgtcgtaagtcgggtaggtggcgagtttgagtttttacgtatagaaagtaggattttttcggttgttttgggtcgttatcgttagtaggtttttcgttcgggattaatttgtttgttttttattggtttttatttagttttcgttatcgaaaggtttcgtttcgtagttttttacgcgcgttttattttacgtttaaggtttttagtttttttagtggggttttgttatagggataataagcggttttttagtcggcgtcgtttaggttgcggattttattgtagatcgggttagcggtgcggggtttagcggagtttgagaaggttaaaggtcggagcgtattgcgtttcgggagtatagagggagcggaggaggggcgaaggggatgggtggggggtgtcgtcgagggagtcgcgcgttagagatttcggttacggttagtattcggtttcgggttcgttttttatcgcgcgtttcgtttcgtttcgtttggtttttttttttaaagcgttcggcgcgcgttttttatcgtcgtatttttatttttcgttagtcgtattgttcgttcggcgttcggttttcgattcgcgttcgttcgttcgttcgttcgttcgttcgcgttatgaacgttaaggtcgtggtcgtgttggttttcgtgttgatcgcgttttgttttagcgacggtaagtgcgttcggcggggaggttttggcgaggttttgggtttcggttttcgttcggcgtagagtcgcggtttttttgtttgcgttcgtagtttgcgtcgttcgatatagtgggggtggaggtagttcgtttagttgggcgttttggtgcggtgtcgcgtttaaagttttatttttgcgtcgagggtttgtgatttgtagagagcgatcgtttgattttaagttggttgtagagcgaggttagtcgggataattgggtaggaacgttttaagagagcgttcgggattggcgcgggaaggcgcgagggtggggagtcgcggattttagatttttgtttgtttattttttatttattgttttttcgttgcgggttcggtttttataggcgaatgggtttcgaggttttgttgcgtatagtgttggaggtcgggcggtgtatggcgagagcgcgttttgtaaagttcgttttatgtcgcgatttgaggttgtgaggttcgatgtagtcgcgtagttttcgttttttgcgaagtcgattttttttttatattttcgcggggtttttggttaggcgcgggcgggttgcgcggcgtagttgtcgggtttgtgttattcgttaggtcgcgtttttgtatagtttcgcggttcgtagcgacgcggatttgggcgcgcgtttagtcgttgtttttttgttttttttcgggtttatttgagagaggtttagggatttttcgagttttatacgttttttttttagttttttaaatatatttgtagataggtttttttgttattagttggttaagcgttttgttttagaatgagagttgtagtaaagtttaatttttaaggttttgggttattgggaatcgtggtgtttcgttttattgggagagggttttttttttttttttcgttgaagagaaattcgttgcgttgttataggatatcgatgtaaattaaaataaattgttgtttttgaatatataaaataaaattttgtggtttaggtcgttgagtttttttggttgtgaagttttttgtaaagagttgaaggatattttgagtgtttttgtagtcgcgggttgtgtaggtttagcgcgtttcgagtttttggttgggttggtgtagacgtggtttcggcgttttagttggtttggattgtgcgttggtgtgagtaggattagcgtagttgagtcgggttggagaagttgggtagtttggggtcgtggcggattgtttaagtgttaaggatatagattgaaggtaattgggaatgttcgtcgttgatgaaaagtttttgaggttgtgtttgtatattgattttttttttttttcgtaagttatggggtatgtttttagtttttattgttggatatttttttgtttttgtaaggtttttggtttgggtagttattgattgattggtgggatgagcgcggaggtgttatagtgcgtcgttttgggaaatggtgttgtttttttttcggagggttggagagaggattggaatgaggaatttcggtttttgagttatgggtgtaattgatttgggggaagtatagagacgtggggtttattttagattttttttggtttgggaagggtgatatggtttttagagttgttttattggtagttaagtaattagggtaggagtttgggttttaggtagatttgttttttatatatatcgttagaatgttttgttttgttttgttttttttttattttatagtgtttatgtgttttttatttttatatttagtttttaagttgtattatagagagagtttggttaggggttttgttttttttttattggttgattttcgttaggtagttgggtttttgggtttttcgggtttaaatttagggtgggttttttttttaagtttgtttggaggggttagttgggtttttgtttttgtattagattggagggttttttgaaaatttttggagttaagtttattcggttttaaattcggggtattattagagttagttaggatttttgtcggtatacggatttatatttagaacggttgggaaagttagttttattgataaaaagttggaggaaggagtatatgaggtatatacgagattatgtttttttggtaagtatatttgggggttttgttattttaaaaagatttgttgaaattcgttgtttgataggcgggttttaggttttgggagtagaagtaagaattgtttttgaaggaaatggataattttagggggtggagggggagaggagagagagtttgtgtgttgagttttgaataggttttgatttttggttttattattattgtttggttggggggttagaggagttttttttttttgggcgttggagagttatagttttatttattttagcgggggcggttgtagtatttgtttttggttgtatatttttaagtttattgttgtcgggagggggtttgtgttttattatcggttttttatttttttgttttatttttaatttattttttgttttagtttggaagggtttaaaagaaatttagggaaatttggaggtataatatttaggagcgtttagttttttagttatttaggttgtaggtttcggttttgggggtggtttttttaggtgatttggttatagtgtagtgttgattttttttgtagggttttagtgtagttgttggaagttggttttagaggtgtttttttggagttagattaggtgtaattgtgaaggttgttttaggtttttttagtgttatgagttattagtattttgatgtttggtttttttttggtttttagggagttgtatttggttttggggataaggaagtggggggataagtggtttattttttttgtaatttggtggttgaatatataatgtaatttttagtttatattattttttaattgattgtagtttgtagaaaaaataaaataaaatgagttttttatttaagatttttttttatttttttagtatttttttttaaaggtgtagaattttagaattatagaggttttttagaattttgtaaataggtaaatttaaaaaaaaagaaaaaagaaaaaaaatttttggattaaatatttttagatatatatttaatttttgatgaaaggatttataagtttaaataatttggggtattaagtggggtttggataaaatttttaaggaaaaaagaaaaataaaaagtatatataaattttagttttttagggtttgtaattttatatttaaagggtgagtagtgggttttgtaggagttttttgttaatttatattaatgagtgttaattatggtattttgtaaattggtgattttgtaaagattttaatataatttttgaggttatagtatttttgtttaggtaatgaaaattatatttaattttagttttattaatttttaagttttggggaaagtgttgggtagaaggtgggtttttggtttgtttttaggggatttataggtaggaagttagttaggatttttttgtgttttttagagttttaggtgaatgtgaggaggggtttttggggtgggggagggtagtatttttgagtattattgtgttttttggttagaggtttgtgttagaggagagaggttagggagtttggagttttttgttttttttttttttttttgagtagggagattttttttagttgttttttgaggaattttttttataaagagtaattggaaattttagtattttggattgaaatcgttatttattataattattatttttattttgagatattgagtaggtggtttttaatttaaattttcgttttatttaggtttcggttttttttaggtttgttgggttttttgttttgtagaagttgagtttgagtttagttagtatttattgtgttgtttgaggagatggttttttttaatatatattagtaatttggaatttattttagtgatgtcgttttttgatttttaatcgttgtattaattgttgtagtttagatatatattattaaaatttggtagggtagtaaagtgttttgttgtttttattttttttagg

SEQ ID NO: 1648 - DNA, 9206 bp, Artificial Sequence
  chemically treated genomic DNA (Homo sapiens)
tttagaagaggtaaggataataaggtattttattattttgttagattttggtaatgtgtgtttgggttgtagtagttggtgtagcgattaaggattaagagacggtattattggggtaagttttaggttattggtgtatgttgggaaaggttatttttttaggtaatatagtgagtgttggttgagtttaggtttagtttttatagggtaaggagtttaataggtttggggagagtcggagtttagatgaggcgggagtttaaattagaagttatttgtttagtgttttaagataaaggtagtaattatagtagataacggttttagtttaaggtattgaaatttttagttattttttgtaaaaaaaattttttaagggataattgagaaagatttttttatttagggaaaagaaagggggataagaggttttaggttttttggttttttttttttggtataggtttttagttaggaagtatagtagtatttaggaatgttgtttttttttattttagagatttttttttatatttatttaaagttttggaaggtataaaagaattttggttggttttttatttgtgagttttttgagagtaggttaaggatttattttttgtttagtattttttttaaggtttagagattagtggagttggagttaaatgtggtttttattgtttaggtagggatgttgtagttttaggaattgtattaagatttttgtaaaattattaatttataaaatgttataattgatatttattagtgtaaattagtaaggggtttttgtagaatttattgtttattttttaaatataggattgtaagttttggagggttgggatttgtgtgtgttttttgttttttttttttttttgaagattttatttaagttttatttaatattttaaattatttgaatttgtggatttttttattagagattaaatatatgtttaagaatatttggtttagagatttttttttttttttttttttttttaagtttgtttgtttataaagttttgagagatttttgtggttttgaaattttgtatttttgggaaagaatgttggggaagtaggaggaaattttgagtaaggggtttattttattttattttttttatagattgtaattaattgagggatgatgtggattaggaattgtattgtgtatttagttattaagttgtaggaaaagtggattatttgtttttttatttttttgtttttaggattaaatgtaattttttgaaaattaggaaaaagttaagtattagggtgttggtgatttatggtattggagagatttaaggtagtttttatagttatatttgatttaattttagaaaggtatttttggggttagtttttagtagttgtattgggattttgtaggggaagttagtattgtattgtaattagattatttgggaaagttatttttagggtcggggtttgtagtttgggtaattgaggagttaaacgtttttgagtgttgtgtttttaggtttttttggattttttttgggtttttttaagttgaggtagggggtgggttgggggtggagtaggagaataggaggtcggtagtgaggtataagttttttttcggtaatagtgagtttgaagatatgtagttaagggtaagtgttgtagtcgttttcgttgggatgggtggggttgtgattttttagcgtttagaggagagaagtttttttggttttttaattaagtagtggtgatgaggttagaaattagagtttatttagagtttaatatataggtttttttttttttttttttttattttttgggattatttattttttttaaaagtaatttttgtttttatttttaggatttaaggttcgtttgttaagtagcgaattttaataggtttttttaaagtgatagagtttttaggtgtgtttattaaaagaatatggtttcgtgtgtattttatgtgtttttttttttagttttttgttagtaagattaatttttttaatcgttttggatgtaaattcgtgtatcggtaagagttttgattggttttgatggtatttcggatttgggatcgggtgagtttggttttaggagtttttagaaagttttttagtttaatgtagagataggagtttagttggtttttttaagtaggtttgggaagggggtttattttgagtttaagttcgggaaatttaagggtttagttgtttgacggaagttagttaatgggggaggggtaggatttttggttaagttttttttgtagtgtagtttgaggattaagtgtggggatagggggtatataggtattgtgaggtgaggggaaaataaaataaaataaaatattttggcgatgtgtgtaaggagtagatttgtttggagtttaggtttttgttttggttatttggttgttaatggggtaattttgagggttatgttattttttttaggttaggaggagtttgggatgaattttacgtttttgtgttttttttaggttagttgtatttataatttaaagatcgaggttttttattttaattttttttttagtttttcggggagggggtagtattattttttagagcggcgtattgtgatattttcgcgtttattttattaattagttaataattgtttaaattagagattttataggaatagaagaatatttagtaataaaaattagaaatatgttttatgatttgcgggggggggggggggttagtgtgtagatatagttttagggattttttattaacgacgaatatttttaattgtttttagtttgtgtttttaatatttaggtagttcgttacgattttaggttgtttagtttttttagttcgatttagttgcgttggttttgtttatattagcgtatagtttaagttagttaggacgtcggggttacgtttgtattaatttagttaagggttcgaggcgcgttgggtttgtatagttcgcggttgtaagagtatttagagtgttttttaattttttgtaggaaattttatagttaaggaagtttagcggtttgagttatagggttttgttttgtgtgtttagaggtaatagtttattttggtttgtatcggtgttttgtgatagcgtagcgagtttttttttagcgaaagaaaagaaaaaagtttttttttagtgaaacgggatattacggtttttagtggtttagggttttggagattgaattttgttgtagtttttattttggggtaaagcgtttggttagttggtgataaaagagtttgtttgtaggtgtgtttggggagttggggagggggcgtgtgaggttcggagggtttttgggttttttttaggtgaattcgagaagagataggaagatagcggttggacgcgcgtttaggttcgcgtcgttgcggatcgcggagttgtgtagaagcgcggtttggcgggtggtataagttcgatagttgcgtcgcgtagttcgttcgcgtttggttaagagtttcgcgagggtgtggggagaggatcggtttcgtagggagcggaggttgcgcggttgtatcggattttatagttttaagtcgcggtatgaggcgaattttgtaaagcgcgttttcgttatgtatcgttcgatttttagtattgtgcgtagtaggatttcggagtttattcgtttgtggaaatcgagttcgtagcgggaaggtagtgggtggagggtgggtaggtaggggtttggggttcgcggttttttattttcgcgttttttcgcgttagtttcgaacgtttttttggggcgtttttgtttagttgtttcggttgatttcgttttgtagttagtttgaggttaggcggtcgttttttgtaggttataaattttcggcgtaaaagtagggttttgaacgcgatatcgtattagagcgtttagttaagcgagttgtttttatttttattgtgtcgggcggcgtaaattgcgggcgtaggtagaggagtcgcggttttgcgtcgggcgggagtcgaagtttagagtttcgttagggttttttcgtcgagcgtatttatcgtcgttgaggtagagcgcggttagtacgaggattagtacgattacgattttggcgtttatggcgcgggcgggcgggcgggcgggcggacgagcgcgggtcgggggtcggacgtcgagcgggtaatgcggttgacggagagtgaaagtgcggcggtgggaggcgcgcgtcgggcgttttagaggggagagttaggcggggcggggcggggcgcgcggtgaggggcgggttcggagtcgagtgttggtcgtggtcggggtttttgacgcgcgattttttcggcggtattttttatttatttttttcgtttttttttcgttttttttgtgttttcgaggcgtagtgcgtttcggtttttgatttttttaggtttcgttgggtttcgtatcgttggttcggtttgtagtgaggttcgtagtttgagcgacgtcggttggagggtcgtttattgtttttgtgatagggttttattggagagattgaggattttaggcgtaaagtggggcgcgcgtggaaagttgcgggacggggtttttcgatggcgggaattgaatgagaattaatgaaaagtaaataagttagtttcgggcggagggtttgttggcggtggcggtttaaggtagtcgagggggttttgttttttgtgcgtgggggtttaagttcgttatttgttcggtttgcggcgtagtcgtcggtagagttcgatttgcgggaatgagattcgtttttgtagttagcgtggttcggattttaagtttacggcgttattagtcgagttttagttttttcgtttgtataaataaagtagaaggcgtcggcggtttttagtaaaagcgaatgtagtttttgtattttcgattttttaatggtgaaatgagttaattataggtttatttcgcggagtgggacgggagatttaatgagattcgttttacgtcgcgaaattttttgtatcgtgtttgataagtagatagtatttaataaatggtagttgtaagtaagttttttaaatttaagtatttattgttttatttaagaaaagtttcgtgcgatttaaagagttgagaatttttttatttcgattttcgatttttaggatagtattattggcgtttgttttttgggtttagaaaattttttttacggagtcgtttttcggcggtgtttagtttttcggatattttcgagatattttagatggttttagttcggtggcgaagggagggtgtaggtcggtatttaggagacgtgggggtgaggagagcgtttttttgggtttcgttttgtgatcgtaggttgttttagttatttttttgtgttttttttagtatagcgtttagcgaagtggggttagtcgtcgcgtttatttaggggtttgttttggggatacgtttttgtttttggggagttttggtcgtcggggagtgggcggttagcggttgtattaggcgggagcggttaataggaggttgcgagggtttcggaatttcgttggtgggagtaggtgttttttgtgtattttttttttaaaattattttggtcgttagatggttgtgggtcggtattttatttatttatttatttatttatttatttatttatttatttatttatttattttgggtattgggtttggagtcgggaattttattgatttggttttgtttttaaagaattgaaggtagtgaggtttagtgaagaaggtagtcgtcgggcgtttttaggtttttgttgggttgggtcggggagtttggtcgtttatcggtcgtagcgttggggtttcggcgttttttggtggcggcgttttttttttcgtttttagagttttggttagttttatttttgcgtagttgatgaaattcgggagggcgaaggggttcgcgggaaatttatattcgggtggaggggcgttttggagttcggagattcgattttgcgggagtcgcgcgtagtttcgtttgtttttaaatttggttaaagtaaacgttatcgtttttcgttttttttttttttttttttttttgttataaaattaggtgggtagttggatttaggatttgttttagaagtttgaaaggttcgcgtgggttgagtcgagggcgaattagggatttaggtttggtcgttgtttttttcgtaggcgttttgaggttttagaatagaagttattgtggtatttatggggttatttttttcgttagtcgttcgttaaatatttattgagtatttattatgtgttagatttgggttatatgtttgaagtagtttagaaaaggtattaaacgtttagaagtatatggcgttaagtataagtaattacgtataaaatatttagaaggttattaaatgttaggggaagatggagtagaggaaagtggggtgggagttaggattttaaatagggtggttaaggatttatattttaggtataagttttataattttataattggcgattgaaatttaaaattttggtcgggtacggtggtttatgtttgtaattttagtattttggaaggtcgaggcgggcggattacgaggttaggagttcgagattattttggttaatacggtgaaatttcgtttttattaaaaatataaaaaaattagtcggtcgtggtggcgggcgtttgtagttttagttattcgggaggttgaggtaggaaaatggcgtgaattcgggaggcggagtttgtagtgagtcgagatggcgttattgtattttagtttgggtgataaagcgagatttcgttttaaaaataaataaataaataaatatgtaaataaataaataaatatgtaaatatgtaaataaaataaaataaaattttgtatattttgggggttttcgtatcgtttgtataggtaggcggttattagattaggttattttgatatgtttttagtttattcggttataggggtattttttaaattcgggttagcgaagttttttatttttttttttgtgttttttgtttatgtttatgtttaaaaggttttatttttttttttttgtttggggatttttattttttatagagttttatttttttttgaagtttttagattttgtgtcgttttattaggtaatgtagggtatagcggttttttagggatgttttgttaagtatagtttaaggtgggaggtaggggtttggttgttgagttaaaggtagggtattttttgagttggtatgtgtgttatggtttttagatttttaggtagtatttgtttatttttttttgtttggtttgggtcgtttatttttttagggtttaacggttgggtttgtaagagggtttttagtagggattgaaggtttatattaaatttatgttgtatagtgtgtaattgataaggtgattttaggtggtattttgaaatttataaaatatagatttatgtatttatttttttaaagtaataagaaaaaatataattagtatagtaaaggtagatattttagatattgtttaggttttttttttaatatatggtttaagttttaaaaagtaagttaattgaagttaatatagtaagtgttagtttaggtggttggagatatagtaaaaattttgatagtaatataaatagatttgaaatttgaaaattttttttatatgaagaatattttttgtattatttgatatttttttatcgtaattttttttttgaaataagtatttggttttaaagtgttgaaatataaaattatataagggaggtacgatgttttttttatttgtttgttaggtgaggttggagaacgttggtttaggagcgtttaggttataggaagattgtggggttttatgggatttttggatatttttggttttgttatttttttaggagtgttttttttttagttttcgtgtagttttggagggattttttttaattatttatatttgtttttatttttttggtatttggttttggggtttaggagtagatggtttattttaggaattaggaagttcggtgaggaagataaatttttatcgttttgttgatgttatttgtgtagtaggtatattagttgatatggtggatttggttagtgtgaaattatttggtttagagaaggtttttaggaagatattgaatagtggatttatataggattttagtttgttttttttgaatttgttaatttggtatttttaaagatcgagtttgtagtataagttttattgttttagttttgaagatatggaatttaagtttttatgggttttgagtttaaggtttagagttgagggtttcggttaatatgatagagttaggtaggagtaagggtatatttttttggggttaacgtttttggattttggaatattagttaggttttgaaagtatttttggggatataagttatttttatggtagttatttagggagttttttggaatttcgtatttagggttaggatttggtatttgattagttggttatgttttttttgtttagatttttattggttttaagagttagttgtaaatagttttaggttgttttagagggaaggatttttgggaggtagagttgatttttattggttttgggtatatgtgtgggtaagtaaggtttatcgttagggtatgtgtacgtttagtaggttaggatttttgtttgagtaggttttgtttaaagatttttttgttggatagtgttgaggtagggggatttgagaatgtaagaataataaatttagtttttttttatttttataatataaaatatttttgtgattttagatgtgtgtgtgtgtgtgggggggggggcggggattttttatatataaagttagtagttttttagttgtagatattagttggttgttttttaatttaatttaattttgagatgatttatttggaggtaggtttaggttttatatgttgaggttttagttttataaggttgtttttattttagatattagttgtaagttttgggttgtttttttagtgtttttgattaaatgattataaattagggtttttatgattttatttttgggttttattaatttgttattatagtttatggaatttagggaagtatttatgtttattggtttattaaaaagggtattatgggttgggcgtggtggtttacggttgtaatttta

SEQ ID NO: 1649 - DNA, 5379 bp, Artificial Sequence
  chemically treated genomic DNA (Homo sapiens)
tagagtgttttaggaaggtaggaggatattattgtttttgtttttcggttatatttattaaatataattttatttttcgatagatgtttttgttacgtgtggttgtggttagtgttgttttttattaaatttaataattttttgtttatagggtggttttggttaaaattttaatatttgttttggggtttttaattttttttttttggttatttttttgttttttattttttttgttataaaagtgagaatgagtgggtttgggtatatagtaaaattggttaaagtttttgatgtttgattaaagggtgtggaggagaggataagagatttttaggaagagataataaagttaggaagggtgatattttagagattaaatagtattggtggtagatatcggggtgtgtttgagtttgtatcgtttttttttttttttttatttttatttatgtagcggatgttttttttatgcgagaaattgttaagagggtttatgtgaggcgaggtttgaaaatcggtaattcggtaatagttagttatatttttagagtttgggagatttagtggagttttgaagtatttttaattagtttgttttttgggggtatattttggattatttgaagagggagatgatatttataatatttaatatgtttaattatttaaattttatttaattttttttttaattttttttgatttgtttttatttttaaaaaataagtaattgttttttatgaaattttgataggaaaaagtaggtgaagaagttatagtttggttgtaattttatttttacgtagcgttggtttagggtttttttacgagaggaaagttgggtttgtttatggtttttttagtagtttaggtagttagaggggagtttattagtttttagtatttatgtatttgatttgtagtgataatttcgggggtagggatatagaaaatattgtgggagaatgtaggtaattgtaaggatgaatggattttgaataatatatttttggttaaaataagtatatatattatatatatataaattatatatatatatgtatatattgtaaattaaaaagtaattgaagtatattttaatagattagaggtttattttgttttaggtaaaagaaatataaattattgtaggatttgtgatttgcgttttttttaaagagagttttgggaatttttatttttagaggggaaagagtaagtaggaggggaagaaaataaacgaaagatgggttggtaatgagataagtgtttatattgtggtaaggttttgtaatatttagtgagtttatattttatatgtaaaaagaagggattagagggaaattatgtatggattttatgtttagtatatttatattttatataagataaagtaagtatgtgaaattataggtatttgggaataaaaggaaggtagtttttgtatgatttattttttaagtttaattttttttttggtatagtgaatttgaggttttaagattttattttttttttatagtattttatatatatttatatataatatatataaaaatatttatatttatatataaaatataaaaatatttatatttatatataaaatataaaaatatttatatatataaaatatataaatatatataaataatatatatattttatatatataatatattgtaattatatatatatattttatatatattatatattatatatagtttatatttaagttattgttatttatttattttttttattttttattttttttatttttcgaatattgggatttttttttgaagtttttttaatttagaaataattagtttagaatttagaataattagtttgttttttgattttagagaaaatttgtttttgaattaggaatttttgggaattgtggtttagggattaattttatttaggtatggttttatttgttttgtttgtttttttttttgtttattttttttttgtttatgtatcggggatttagggtttgtttttattgtattttttttttattgtttattgtttttggggttttttttagtttttatgttttagaatttaggatatagttattttagtggagagttgtgatggttaaggatgttttaggaagaagagggtaagaagagtataggaaatttgggtagaataaggaatttcggggtataataataaaagaaattatggtttggagtagtaggtaagggagtgggttttggatattaattgtttggttttaatttttagttttgtgtttttgaatgagataaaatttttagatttttaatttttttatttgtaaaatggggataataggagtatttattttataggttgttgtacggattgaataattaataggtgaatatataaaatgtttagaatatggtttggtatatagtaagtatttaataaatgttagagattataattgggggtttaggatatatatatgtaagtaaaatagaaattttattattattggggttatttttagatatttttgaattaattttaaaaaggggaagagataaattataaatttagttatgaaaaattcgtaataataaagttagttatttagggatgttaacgattaatttttattagtaatataattattaggtattttattgatatcgaagataaattgttttttaagatttggttattttatatatttgattatgttttttaaaaatagtagattatgtatttatattttattaaaaataaaatatatatagataatgtattaatttaatttgatattttgttttaaaatttaaataaatattatatgagtgattatttttttgaatttattgaagtaataattatattgagttaagtaaagtgggataaagaattggaataatgttagtatttggattatgtaagagagtggtaaggtggagggaataaattttatgttttttgataggggttgaattaaattcgttaattaagttatttttttttaattagttgttttttttggaattttttttttttttttttgttttttttttgggttttgatatttttatgaatatagaaagattagtgttaataagtaaagagaaaaacgaggtttttattattattcgtttaggtttgttgatagtatatttttagatagattttttattttgaaaggttgtagatatagaatattagtttgatttgagttttgaaaatttatagaatatggaaattaaaatgatttttatttattgttattattatttagatagggtaagatgtagagatggggaatgtatataattatttagaagaaatgttaaaatgaagagtaggaatataggatattatatatatttttttttgttgtatttggaaataaatttttttttttttttttttttttttttttttttttttgagatggagttttgttttgtcgtttaggttggagtgtaatggtgtgattttagtttattgtaatttttgttttttgggtttaagcgatttttttgtattaggttttttagtagttgggattataggtatgcgttattatatttcggttaatttttgtatttttagtagagatagggttttattatattggttacgttggtttggaatttttgattttaggtgatttatttattttagttttttaaagtgttgggattataggtatgagttattatgtttggtttagagataagtttttttaaattgtatttttgttattataaaggtgaaaaaaagggaaattgaaaaaaattttaaaattttgaaaataataatgaaggatataaaaattattttaaattttgttatttagagttagttattgttaatattgtggaagaatttttattttttgtatattaatattttaaaaattttaaataaaattttgattaattaaatatatatatatagtttttcgttttattttttttttttttttttttttttttttttttttttttaagatagagttttattcgttttttaggttggagtgtattggcgtgattttggtttattgtaatttttatttttcgggtttaagcgatttttttgttttagtttttcgagtagttgggattataggtatgcgttattatgtttagttaattttgtatttttagtagagatggcgtttttttatgttggttaggttggttttgaattttcggttttaggtgattcgtttgtttcggttttttaaagtggtgggattataggcgtgagttattgtgtttggttttttttttattttttttattgaataaattatgaaatttttttagatgtaaatatttattttttatttttttttttttaaaataaggtattattttaattatttgagtgttagatattatttttagataatattttaatttaggtataattgtcgtgtaaaatttgaagattaatatttattttgtgagttatttttttgtgagatagtgtatgttaaatatgttgaattggtaggtgaaaaaggaagaaaaaatgagtagtgattggttatttatagttatgaatgagaaattgaaggtagtagattatggatgataaatttatttttggtttttttttgtttttgaaattttaattattattataattatatgagagatattattaataagtaaagttttataattttttaaagatatagattttatgttattataattaaaaattatgtatttttgttatattaataaaattgtatatacgatataaaggtatggataaaggtgaagtagttttaagagatagagtttttgatattattgtaattttaagtatcgtggatattttcgggaaagtttttggatgttattggggattttttttttattggatgtggataatatttttttattatttataggaagtaattttttttataaaagggttttagtcgaagtagtgtttagttgtttttggttgattttatattaaaatttttatattgatttgagatagaggtagtagtgatatttatttgagagattttgtgtttgaataattgttttttaaaacggtaagtgtagaacgttttataagggtagtttcgggttatgaaatatagatatgtaaaaggttttttaataaaaattatatttgtataagtttttattgtattgtagttaaaatttgttttttttttttgatttaaataatgaaagttttaaaatttgtttatttatttgattaaattttgaaataaagattattgtattagtgttttttgtttaaaattttaggatgttgttttaaatattatggtagaataatgtaattagttatttacgatttttttttttaatttattttgtgttttatttttttagg

SEQ ID NO: 1650 - DNA, 5379 bp, Artificial Sequence
  chemically treated genomic DNA (Homo sapiens)
tttggggagataaaatataaaatgaattaaagaaggaaatcgtgggtagttagttatattattttattatgatgtttaaggtagtattttaagattttgggtaaaggatattagtgtaataatttttattttagagtttaattaaataaataaataaattttaagatttttattatttaggttaaagagaaaagataggttttagttataatataataagagtttgtatagatgtggtttttattagaaggttttttgtatatttgtgttttatggttcgaggttgtttttataaagcgttttgtatttatcgttttgggaagtagttgtttaaatataggattttttaggtgggtattattgttgtttttgttttaggttagtataggagttttgatgtgaagttagttaagaatagttgaatattatttcggttgaggtttttttataggagggattgttttttgtgaataataggaggatattgtttatatttagtaaagaggaaatttttaatggtatttaaaaattttttcgggaatatttacgatgtttaaaattataatgatgttagaaattttgttttttgaagttattttatttttgtttatgtttttatatcgtatatgtaattttattaatatgataaaaatgtatgatttttaattataataatataaagtttatgtttttaaaaagttgtaaaattttgtttgttagtagtgttttttatgtagttgtggtagtaattagaattttagaaatagaaggaaattaagaataggtttgttatttatagtttattatttttaattttttatttatagttgtggataattaattattatttatttttttttttttttttatttgttaatttaatatatttaatatgtattgttttatagaggaatgatttataaggtagatattaatttttagattttgtacggtagttatgtttaaattaaaatattatttaaaaataatatttaatatttaaatggttaaaataatgttttattttaaaaaaagaaaaatgggaaatagatatttatatttgggaaagttttatggtttgtttagtgaaaaaaataaaaaggaggttaggtatagtggtttacgtttgtaattttattattttgggaggtcgaggtaggcggattatttgaggtcgggagtttaagattagtttgattaatatggagaaacgttatttttattaaaaatataaaattagttgggtatggtggcgtatgtttgtaattttagttattcgggaggttgaggtaggagaatcgtttgaattcgggaagtggaggttgtagtgagttaagattacgttagtgtattttagtttgggaaacgagtgaaattttgttttaaaaaaaaaaaaaaaaaaagaaaagaaaagaaaaaaaataaaacggaaaattatatatatatatttaattggttaaaattttgtttaaaatttttgaaatgttaatgtgtaaagaataaaaatttttttataatgttaatagtgattaattttggatggtaggatttgggataatttttatattttttattattatttttaggattttaaagttttttttaattttttttttttttatttttatagtaataagaatatagtttaaagaaatttgtttttaggttaggtatgatggtttatgtttgtaattttagtattttgggaggttgaggtgggtggattatttgaggttaggagttttagattagcgtggttaatatggtgaaattttgtttttattaaaaatataaaaattagtcggggtgtagtggcgtatgtttgtaattttagttattggggagtttgatgtaagagaatcgtttgaatttaggaggtagaggttgtagtgagttgaaattatattattgtattttagtttgggcgatagagtaagattttattttaaaaaaaaagaaaaaaagaaaaagaaaagaaaagaaatttgtttttaaatgtaatagaaggagatgtatgtggtattttatatttttgttttttattttgatattttttttgggtgattgtatatattttttatttttgtattttattttatttaaatgatggtaatagtaaatggggattattttaatttttatattttgtaggtttttagagtttaagttaagttaatattttatatttatagttttttaaaataggaggtttatttaaaaatgtattgttagtagatttgaacgagtagtggtaaaagtttcgtttttttttttatttgttagtattggtttttttgtgtttataaagatgttaagatttaaaaaaaaaataagaaaagagaagaaaaattttaaaaaagataattgattagaaaaaaataatttaattaacgaatttaatttaatttttattaaaaagtatagaatttattttttttattttattatttttttatatgatttagatattgatattattttaattttttattttattttatttagtttaatgtggttgttgttttaataaatttagaagagtaattatttatatagtgtttatttagattttagggtagaatgttaagttgggttaatatattatttgtatgtattttatttttaataaagtatgaatatataatttgttatttttaaaaagtatggttaaatgtatagagtagttaaattttaaaaaataatttattttcgatattaataaagtatttaataattatattgttaatagaaattagtcgttaatatttttagataattaattttattattgcgaattttttataattaagtttatagtttatttttttttttttttaaaattagtttaaagatatttaaaaatagttttagtggtgatgaagtttttattttatttatatatatatgttttggatttttaattataatttttaatatttattgagtgtttattatgtgttaggttatattttgagtattttgtatgtttatttattgattatttaattcgtataatagtttatgaaataggtatttttattatttttattttatagatgaggaaattgagaatttggggattttattttatttaaaagtatagagttaagggttgaaattaggtagttgatatttagagtttatttttttatttgttattttaaattatgattttttttgttgttatgtttcgagattttttgttttatttaagttttttgtattttttttgtttttttttttttgagatatttttgattattatagttttttattgagataattgtgttttgggttttgagatatgggggttggaagggattttagggatagtgagtagtagggagaggatgtagtgagaatagattttggattttcggtgtataggtagggagaaagtggataaaggaaaaaataagtaaggtaggtggagttatgtttaggtaaagttgatttttaagttatagtttttagaagtttttgatttaaaagtaaattttttttaaggttaaagggtaaattgattattttaaattttaaattgattatttttaaattgagaaagttttagggagagattttaatattcgaaggataagagaaatgaggagtggaagagataggtgagtaatagtaatttaaatgtagattatatataatatataatatatgtagagtatatatatataattataatatattatatatgtggaatatatatattatttatatatatttatatattttatatatatagatatttttatattttatatataaatatagatatttttatattttatatataaatatagatatttttatatatattatatataaatatatgtaaaatattgtgaaagaagaatagaattttgagattttaaatttattatgttaaagggaaagttaagtttgggaaatgagttatgtaaaaattgttttttttttgtttttaaatatttgtaattttatatgtttattttattttatataaaatgtagatgtattgagtatgagatttatgtataatttttttttagttttttttttttatatgtaaagtgtagatttattgagtgttatagagttttgttataatgtaaatatttgttttattgttaatttatttttcgtttatttttttttttttttgtttgtttttttttttttaaagatggaagtttttaaaattttttttggaaaaagcgtaggttatagattttatagtgatttgtgttttttttatttgggataaaataaatttttaatttgttgagatatgttttagttattttttggtttataatatgtatatgtatgtatataatttatatgtatataatatatgtatttgttttaattagaggtatgttatttaaaatttatttatttttataattatttgtatttttttatagtattttttgtgtttttgttttcgaggttgttattgtaaattaggtatatggatattgggagttgatgggtttttttttggttatttgggttgttgaaggggttatagatagatttagtttttttttcgtggagaggttttgggttagcgttgcgtgggagtgggattataattagattatagtttttttatttgtttttttttattaggattttataagaggtaattgtttgttttttgagggtgggggtaaattagggggagttgaagaggaaattgggtaagatttgaatagttgggtatgttgaatattatgaatattatttttttttttaaataatttaaaatatatttttaagaaataggttgattagaggtgttttaaggttttattgaattttttaagttttgaagatgtagttagttgttatcggattgtcggtttttaagtttcgttttatatggatttttttggtagtttttcgtatgggggaagtattcgttatatagatgggaatgaaaagaggaaagaagacggtgtaaatttaggtatatttcggtgtttgttattagtgttatttaatttttgaggtgttattttttttggttttattgtttttttttggaagttttttgtttttttttttatattttttaattaggtattaaagattttaattagttttgttgtgtgtttaggtttatttatttttatttttatggtaaagggagtgggagatagagagatagttagaaagaagagattggggattttaagataaatgttagaattttaattaaggttattttgtggataggagattattgggtttagtggaaagtagtattggttataattatacgtggtaaaagtatttatcgaggagtgaagttatatttggtgaatgtgatcgggaagtaggggtagtggtgtttttttgtttttttgaggtattttg

SEQ ID NO: 1651 - DNA, 6070 bp, Artificial Sequence
  chemically treated genomic DNA (Homo sapiens)
gagttttatagattggaggagaaatttagaagtttagtttgggatatgtaaaatatgagaggtttattgaataattaaatttgtttggggatggagatgttgagtaggtatttggttataggagaatggttttggttgtatagaatttagaattcgttcgtatttaaatggtatttaaagttaagagtgtgaattggattattaagttagtgaggttagatatagaagagtaaagcggtgatttttggagtattttaagggtttggaggttggggagatgagggagaattaatatatgatatagaagaaatagttagtgaagtaggaggaaaattaggagttttttggtgaagtaagatgaggatggagaataggttgtttgtgttagtgaagtgtaggattttggtgagagtagttttagggaattggtgtggttgaaagtttgattggataagttttaagatagaattatagtttgagtaatatagtgagattttgtttttataaaaataaaaaataaaaaaattagtcgagggttggggtatgtgtttgtagttttagttatatgggaggttgagggagaaggggtattagattttaggattttttgagtgtaatgagttatgatcgtattattgtattttagtttgagtgatagagtagtatttttattttttagagaaagagagagagagattgagagaattagaggagaggatttagaaaaaagtaagtttagatattttttttagggtatagtgggagtattggtatttttataagtttttttggttttacgtttttttttattttattatgttttttaagtttttgttataagtttagtttaatgattaagagtatggatttggaattgattggtttttgtttaaatttttaattatgttttttattagttatgtgattaaggtaattttttttttttaaattttttttaaattatattttaatttttgggatatatgagtagaacgtgtaggtttgttatataggtatatatgtgttatggtggtttgttgtatttattaatttgttatttatattaggtattttttttaatgttgttttttttttagttttatattttttgatatgttttagtgtgtgatgtttttttttttgtgtttatgtgtttttattgtttaatttttatttatgagtgagaatgggtaatgtttggttttttgttttagtgttagtttgttgagaatgacggtttttagttttatttatgtttttgtaaaggatatgaatttatttttttttatggttgtatagtattttatgatgtatatgtgttatattatttttatttagtttattattggtgggtatttgggttggttttaattttttgttgttgtgaatagtgttttaataaatataagtgtgtatgtgtttttatcgtagaatgatttataattttttgggtatatatttagtaatgggattgttgggttaaatggtttttttagttatagatttttgagaaatcgttatattgttttttataatgattgaattaatttatatttttattaatattgtaaaaagtatttttatttttttatattttttttagtatttgttgttttttgattttttaataatcgttattttaattggtatgagatggtattttattgtggttttgatttgtatttttttaatgattagtgatgatgagtttttttttatatgtttgttgattgtataaatttttttttttgagaagtatttgtttatattttttatttattttttgatggtgttgtttgtttttttttgtaaatttgtttaagttttttgtagattttggatattagttttttgttaggtgaatagattgtaaaaatttttttttattttgtaggttttttgtttattttgatgatagtttttttttttttattgtgtagaagttttttagtttaattagattttatttgttaattttggtttttgttgttgttgtttttggtgttttagttatgaagtttttgtttatatttacgttttgaatggtattgtttaggtttttttttagaatttttatggttttaggttttttatttaagtttttaatttattttgagttaatttttatataaggtgtaaggaagggatttagttttagttttttgtatatggttagttagtttttttaatattatttattaaatggggaatttttttttaattgtttttttttgttagttttgttaaagattagatggttgtagatgtgtggtgttatttttgatgtttttgttttgtttcgttggtttatatatttgtttttgtattagtattatgttgttttggttattatagttttgtagtatagtttgaagttaggtagtatgatgtttttagttttgttttttttgtttaggattgttttggttatataagtttttttttggttttatatgaaatttaaagtagtttttttttaattttgtgaaaaaagttagtagtagtttgatggggatagtattgaatttataaattattttgggtagtatggttatttttatgatattgattttttttatttatgagtatggaatgtttttttatttatttgtgtttttttttatttttttgagtagtggtttgtagttttttttgaataggttttttatattttttgtaagttggatttttaggtattttattttttttgtagtaatcgtgaatgggagtttatttatgatttggttttttgtttgtttattattgttgtataggaatttttgtgatttttttatattgattttgtaatttgagattttgttgaagttgttgattagtttaaggagattttgggttgagataatgggattttttaaatatataattatgttatttgtaaatagatataatttgatttttttttttttatttgaatatattttattttttttttttgtttgattgttttggttagaatttttaatattatgttgaataggagtggtgagagaggtatatttgttttgtgttagtttttaaagggaacgtttttagtttttgtttatttagtatgttattggttgtgggtttgttataaatagtttttattattttgagatacgttttattaatatttagtttattgagagtttttagtatgaaggggtgttgaattttatttaaggttttttttgtatttattgagataattacgtggtttttgtgattggttttgtttacgtaatggattttgtttattgatttgtgtatgttgaattagttttgtattttagggatgaagttaatttgattgtggttgataagttttttgatgtgttgttggatttagtttgtcgtattttattgagtattttcgtaatgatgtttattagggatattggtttgaaattttttttttttgttgtgtttttgttaggttttagtattaggatgatgttggttttataaaatgagtgagggaggagtttttttttttttattttttggaatagttttagaaggaatggtattagtatttttttgtatttttggtagaatttggttgtgaatttatttggttttgggttttttttagttggtaggttattaattgttgttttaattttagaatttgttattagtttatttagggatttgatttttttttggtttagttttgggagggtgtatgtgtttaggaatttatttattttttttagattttttagtttatttgtgtaaagatgtttatagtaatttttgatggtagtttgtatttttacgggattagtggtaatattttttttattattttttattgtgtttattgattttttttttttattagtttagttagtggtttatttattttgttaatttttttaaaatgtagtttttggatttattgattttttgaaggttttttcgtgtttttattttttatggttttgttttgattttagttattttttgtttttcgttagtttttgaatttgttttttaatttttttgagattttttagaatggggataataattatatttatagtagagagttgttataaagattaaataatataataaatatggggcgttgagttttagagtttttgttgttgttattattatttttttaaaaatgtaaatttgatttgtatttgatttattgatttatattagtgggtttttttttttattgttttttattatatgggttttaattttatatgtagttttataaaattattttattttatagtttaagaatattaaaggtatttgtaggtttttaaatttatacggtgaaaagttagagagtatgggttttttttaggggttaattttaggaagtgttattaataaggacgtttattaggtggtgagtaaggaaagacggaggtgaaggaatcgaaacgagttaagtttattgtttagttttattgaagttttgtaaatattataaatatgtttgaaatgtagttttgatttgtagtatttgtaatttttaagggttatttattataggtagttaagagttagtttagtatttatgaaaaagataggggagggtggtggaaaagaaggaggaggaggagagagagaaggaggaagaggagaataagaattaaataaaaataagaataagaataagtagaagaagaggagtaggaggaaaaagaagaggaagaagaatagtaataataatgagtgaaggaggaggagggtaaggaaagatgtataggagaatggaaggaaggatagaaaggagggaaggaagagagaatttagttatattattttttgattagtagtttatttttgttttagtgggaggtaatagaggttagtttaggaaaggggtggggaaagaggaaagagaagtgtaggaggaaggggagggaaaaggggaggaggaggaggatgtgagattgggttagagaaatgaaagaaagtaaggttttttgttgatatttagtgtagtttatttgtagtatagtatattttttttgggtaaggatttgagatttttgtgttaagttaagaggtttaatgggttgtagaagaattagagaaggattaagtaaagttatggtgagttttttagtttaaaagacgtttagatgtttagatagaaatttttggggttgtagaggtaggtggtaaggataggaattattttattttaattttggttttaaataatatagaaattaaatatttttttagatttttaaaaaaagtgattttgaaatttttttttttagatatgttgattttttttttttgattttgtttttggggagatttttgaagaaatattattgaaattagattttttgtaataaatattgtgtttatttgagaagtgatatgttttggaagatagaatttttttaaaattatattttaagttttagggtatatgtgtataatatataggtttgttatatatgtatatatgtgttatgttggtgtgttgtatttattaattcgttatttatattaagtatattttaaggtgtgtaggaaatttgtgattttgttattttagttgtttaaaaaggtatttttttttattaaaaaaagaaatattttttttttttggtgtttggttatttaattttttttttttttaggtatttgaggtattgatttattatgattaagagtgaggttataatattaaatataagtattaatagttaattaagtagtaataatattttaaaaaatatatatagtaaatattaaatagttttatttaatagtttagtagaaaagtaggtataaaaattattaaattatagaaaaaatttagggtagtatcgattagtaatttgagattaaagcgtaaaaataaaatagaataaaataaaattgtgtattagttttgatgtaaatttgaagtaattttttatttatgtttgagaaatttgttattttagatagggttagtagatatatgtgttttattttgattattaagaaagttgtaagtattattttaaaggttataaatgtgtggtttaagagtatatatttaaatataattttgtattttatttgtaga

SEQ ID NO: 1652 - DNA, 6070 bp, Artificial Sequence
  chemically treated genomic DNA (Homo sapiens)
tttgtaaatgaaatataaaattatatttagatgtatatttttaaattatatatttatagtttttgaggtggtgtttataatttttttaataattagaataaaatatatatgtttattaattttgtttgaggtaataggttttttagatatagatgaaaaattattttaaatttatattagaattgatgtatagttttgttttgttttattttatttttacgttttagttttaagttgttaatcggtattgttttgaattttttttatggtttggtaatttttatatttgtttttttgttgagttattagataaaattatttaatatttattatgtatattttttaaagtattgttgttgtttaattaattattgatgtttatatttaatgttatagttttatttttgattataatgggttaatgttttaaatatttaaaaaaaaaaaaaattagatagttagatattaggaaagaaaagtatttttttttttaataaaaagaaatatttttttgagtaattgaaatgataaagttataaattttttgtatattttaaaatatatttaatgtaaatgacgagttaatgggtgtagtatattaatatggtatatgtatatatgtgtgataaatttgtatgttgtgtatatgtattttagaatttaaagtataattttaaaaaaattttattttttaaagtatattattttttaggtagatatagtgtttattgtaaaagatttgattttaatagtatttttttaagagtttttttagagataaagttaagaagaggaaattagtatatttgagaagaaagattttaggattattttttttgagggtttgagaaaatgtttagtttttatattatttaaaattagaattgaaatggggtgatttttatttttgttatttgtttttataattttaagagtttttatttgagtatttaaacgttttttaggttgaaaggtttattatggttttgtttggtttttttttagtttttttgtagtttattgagttttttgatttagtataagggttttaggtttttgtttaaagggagtgtgttgtgttgtaggtagattgtattgaatgttaatagaaagttttgtttttttttatttttttaatttagttttatatttttttttttttttttttttttttttttttttttttgtattttttttttttttttttttattttttttttagattggtttttattgttttttattgagataaaaatgaattgttgattagaaagtaatgtgattagattttttttttttttttttttttttatttttttttttatttttttatgtatttttttttatttttttttttttttatttattgttgttgttgttttttttttttttttttttttttttgtttttttttttttatttgtttttgtttttgtttttgtttggtttttgtttttttttttttttttttttttttttttttttttttttttttttattatttttttttattttttttataaatgttaaattaatttttggttatttgtggtaaatggtttttggaaattgtaaatattataaattaaaattgtattttagatatatttatgatgtttgtaaaattttagtagagttaagtagtggatttgattcgtttcggtttttttattttcgtttttttttgtttattatttagtggacgtttttgttagtggtattttttgaagttaatttttgaagagagtttatgttttttagttttttatcgtgtaggtttgggagtttataagtatttttaatatttttggattataaaatgagatggttttataagattgtatgtgaaattaggatttatatgatgaaggataataaaaaggaagatttattgatgtgagttaatgagttaaatgtaaattagatttgtatttttaggaaaataataataataataataaaaattttgaagtttagcgttttatatttattatattgtttaatttttataatagttttttgttatagatatgattattatttttattttaaagagttttaaagaggttaagaaataaatttaaaaattagcgaaagataagaaataattaagattagagtagaattataggaggtagagatacgaaaaagtttttaaaaaattaataaatttaggagttgtattttgaaaagattaataaaatagatggattattagttagattaataagaaagaagaattaatagatataataaaaaatggtaaaggggatattattattgatttcgtagaaatataaattattattagagattattataaatatttttatataaataaattagaaaatttagaagaaatggataaatttttggatatatatatttttttaagattaaattaggaagaagttaaatttttgaatagattaataataagttttgaaattaaggtagtaattaatagtttattaattaaaaaaagtttaggattagatggatttatagttaaattttattagaggtataaagaggtgttggtattattttttttgaaattattttagagaatagaaaaagaggaattttttttttatttattttatgaggttagtattattttgatattaaaatttggtagagatataataaaaaaagaaaattttaggttaatatttttgatgaatattattgcgaaaatatttaataaaatacggtaaattgaatttagtagtatattaaaaagtttattaattataattaagttggttttatttttggaatgtaaggttggtttaatatatataaattaataaatagaatttattacgtaaatagaattaattataaaaattacgtgattattttaatagatgtagaaaaggttttggataaaatttaatatttttttatgttaaaaatttttaataaattaggtattgatggaacgtattttaaaataataagagttatttatgataaatttatagttaatagtatattgaatgggtaaaaattgaaagcgttttttttaaaaattggtataagataagtatgttttttttattatttttgtttaatatagtattggaagttttggttagggtaattaggtaagagaaagaaataaagtgtatttaaatagaagagaggaagttaaattgtgtttgtttgtagatgatatgattgtatatttagaaaattttattgttttagtttaaaatttttttaaattgattagtaattttagtaaagttttaggttataaaattaatgtgaaaaaattataagaatttttatatagtaataatagataaatagagagttaaattatgagtgaatttttatttacgattgttataaagagaataaaatatttaggaatttaatttataaggaatgtgaaggatttatttaaggagaattataaattattgtttaaggaaataagagaggatataaatgaatggaaaaatattttatgtttatgggtaggaagaattaatattatgaaaatgattatattgtttaaggtaatttatagatttagtgttatttttattaagttattattgattttttttatagaattagaaaaaaattattttaaattttatatggaattaaaaaagagtttgtatagttaagataattttaagtaaaaagaataaagttggaggtattatgttatttgattttaaattatattataaggttatagtaattaaaatagtatggtgttggtataaaaatagatatatggattaacggaatagaatagaggtattagaaataatattatatatttataattatttgatttttgataaagttgataaaaagaagtaattgggaaaggattttttatttaataaatgatgttgggaaaattggttagttatatgtagaaaattgaaattggattttttttttatattttatataaaaattaatttaagatggattaaagatttaaatggaagatttaaaattataaaaattttaggagaaaatttaggtaatattatttaggacgtaggtatgggtaaagattttatgattaaaatattaaaagtaatagtaataaaagttaaaattgataaatgggatttaattaaattaaagagtttttgtatagtagaaaaaaaaaaattattattaaagtgaataggaaatttatagaatgggagaaaatttttgtaatttatttatttgataaagggttaatatttaaaatttataagaaatttaaataaatttataagaaaaaataaataatattattaaaaagtgagtgaaggatatgaatagatgttttttaaaagaagaagtttatgtagttaataaatatatgaaaaaaagtttattattattggttattagagaaatgtaaattaaaattataatgagatgttattttatgttagttagaatggcgattattaaaaagttaggaaataatagatgttggagaggatgtggagaaataagaatgttttttatagtgttggtggaagtgtaaattagtttaattattgtggaagataatgtggcgattttttaaggatttataattagaaaaattatttgatttagtaattttattattgggtatatatttaaaggattataaattattttacgataaagatatatgtatatttatgtttattgaggtattatttataatagtaaagagttggaattaatttaaatgtttattaatgataaattggataaagatgatgtggtatatatatattatggaatattatatagttataaaaaaggatgagtttatgttttttgtagggatatggatgaagttggaaatcgttatttttagtaaattaatattggaatagaaaattaaatattatttatttttatttataagtgggagttgaataatgagaatatatggatatagggaggggaatattatatattggggtatgttaggggatgtggggttaggggaggaatagtattaggagaaatatttaatgtagatgataggttgatgaatgtagtaaattattatggtatatgtatatttatgtaataaatttgtacgttttgtttatgtattttagaaattaaagtataatttaaaaaaagtttaaaaaaagaaagttgttttagttatataattagtaagagatatggttgggaatttgaatagaggttaattagttttaaatttatgtttttgattattaagttgaatttatggtaggaatttggaagatatggtaaaatggggaaaaacgtggagttagggagatttgtgaaagtgttagtgtttttattatattttgaaagaagtatttagatttatttttttttaagtttttttttttaatttttttaatttttttttttttttttttaagagatgggaatgttgttttgttatttaggttagagtgtagtggtgcgattatagtttattgtatttaaggaattttagggtttagtgtttttttttttttagttttttatgtagttaagattataggtatatgttttaattttcgattaatttttttattttttatttttgtagagataggattttattatgttgtttaggttgtaattttgttttgaagtttgtttaattaggtttttagttatattaattttttgagattgtttttattaaggttttatattttattaatataaatagtttattttttatttttattttattttattagggagtttttggttttttttttattttattggttattttttttgtattatgtgttgatttttttttatttttttaatttttaaatttttggagtattttagagattatcgttttgtttttttgtgtttaattttattaatttggtggtttaatttatatttttgattttgaatattatttaaatgcgaacgaattttaaattttgtataattagaattatttttttgtagttaaatgtttatttaatatttttatttttaaataaatttagttgtttaataagttttttatattttatatattttaaattgaatttttgaattttttttttaatttgtagggttt

SEQ ID NO: 1653 - DNA, 15951 bp, Artificial Sequence
  chemically treated genomic DNA (Homo sapiens)
ttggttggtagtttttttttttttaatattttgaatatattattttattttttttgggtttagaagtattttgttgagaaattttgtgatagttttattgtaatttttgtttgtgatatgtttttttttttttgttgattttaggattttgtttttgtttttgatttttgatagtttgattattatgttttggtgtagttttttttggattgaatttgattggagatttttaagttttttgtatttgaatattaatattttattttagatttgggaaatttttagttagtaatttttaaatatgttttttgattttttttttttttatttttttttttttaaattattgtaatgtgaatattagtttttttttttaatttttaatttaatttttgtttttattttttgagatgtagttttattttgttatttaggttggagtgtagtggtatgattttagtttattgtaatttttgttttttaggttgaagagattttgttgttttagtttttttagtagttgggattataggtatgtgttataatttttggttaatttttttgtatttttagtagagattgggttttattatgttggttaggttggttttgatttttgattttaggtgatttatttattttggttttttaaagcgttgggattatggtatgagttattgagtttggttgaatgttagtttttttgatgttgttttataaattttgtaggtttttattatttttttttatttttttttttttttttattgtatatttttaaaaatttgtttttagtttatagatttttttttttgtttgattaagtttgttattggtgatttttattgtattttttattttatttattatattttttagttttaattttttttatgattttaatttttttgttatattttttatgttgtgtatttattgtttttttgattttattaaattgtttttttgtgtttgttttaaagtaattgagtttttttaaaaataattattttgaatttattgttaggttatttgtagtattttattttttttgggttagttattgggaaattattgtgttttttaggtggtgatattttaatttgggtttttatgttttttgttgttttatattgttgtttgagtatttggtggatttgttttaattttaggttgtatgggttgattttggtggagaaatatttttttatgtggaataatgcgaggatgttggttgggtgggatgtaaaagttttgattttagtaggggtaaagttgtgtggtttttatgtagatttgttagttgaggttggtgttagtgaatattatagggatttttagaggttaatattgtgggtatttatagtggtaatgaggttgttgaggtttttaattgtgataagttttttatatttttttttttttttatttgggaagttatgattgaggatattttttttggaattaggtttaatttgtaggtttgtttttggtggtggtgatattggtgtttgatgaatagtgtttatggagtggttaagagttaaggtttgaagtatgggtatgtatggagggattatagtattagatttaattgtagtaatggtattagtgtttaaggtataggtatatttattattatattgataatggtgtgtaaaatgtaggtatttataaagtagttaaggagttagggattttattgtatgtatacgtagagttatagtggttttaggatttagggtgtgggttagttttttttggtggttgagttggtgattagagtatggataggtatagagaaattttgattttaggatttagggtgtttattagtttattatagtggtggttttggtgttggaggtgtgggtgtgtgtagtatagttttagagatagggtttggagcgtaggtgtgtatattattatagtagttttggagttgagaatatgggttatttttttatagtggttgaattagtgtttggagtaaagatttttatagagagaatttggtttggggttttagggtgagatttagtttataatagtagtgattttagtgtttgagatatgaggaggtgtattgtagttatagagttatagtttagagtgtgaatatttgtagagtagttataatttttggggattaggaatatatatagatttgtgagaggtggtaattttggttttagttttggggtagtgtaataatagttgttttttggtgagggggtgtgaggggtagtgtaattgtgtttttttttttagtattttgttatgggaatggttgttggataaaagatgttagtgttttttgtggagtaggatattgggggttttagtggttttgtgttatatgattgatatagatagtttataaatttttttattcgtagttattttttggtgttttatatatgttagttttatcggtgatttttttatatggatatttttttttttttttattgtgttgttttaaattttttaataggtttttgagttttattttttaattttttatttttgtgagggttattttggtttgtgtataattgtttatgtttgtttttttgttggggtataaggttgatattttttattttattattttgttaatgttatttgtataggaatttttttatgttttttttatatttattaaaatttaataatattaaatttaaaaatatatgattaattgaatttattaatattaaatttattataaataagaaattattaggttgggtatggtggtttatgtttgtaattttaatattttgggaggttgaggtgaaaggattatttgagtttaggaatttaagattagtttgggaaatatagagagattttatttttagagatttttttttttaattagttagtagtgatggtatatatttatagttttagttatttaggaggttgaggtgggagaattgtttgagtttaggaggttaaggttggagtaagtagtaattatgttattgtattttagtttgggtcgtagagtgagattttgttttaaaaaaagaatttattagtttatatattatatttttttatttttatttgagattatatatattttttttaatatgaggtaatgttaaaaagaggggttggtgagtgaaagtaagaatagaaagatatggaggtaagttttatagaataatagttaatatttaaatttatatttaatagcgtgataggtattgttttaaatatattaaatttatttaatggtttttatatgtttatgtatttggtgattattatttttattatttatattgttgagtgtattattttgtttttatgatgttgatagagatatattcgagattggataatttattaaaaaaaaaaaggtttaatggatttatagttttacgtggatggggagtttttataattatggtagaaagtaaaagatacgttttatatggtagtagggaagagagagaaatgagaattaaataaaaggggtttttttttataaaattattagtttttatgcgatttatttattattatgagaatagtatgggggaaattatttttatgatttaatgatttattaggtgttttttataatttgtgggaattatgggagttataattttagatgagatttgggtggggatatagttaaattatattattgaggaaattgagttatagggagattagtaacgtttaatatagttggtaggtggtggagttaggtagtttgattttagggtttggattttgaattgtattatgttgttaagaagttttttatttttttttttttttaagttttttttatttttttatagttatttttttaatagtattttttttattattttttttatttttattatataattaattttttttttttggttttaaattttaacgtgtaaatgtagttttatatattttaatttatttttatttttagatttttttttaatgtttttattttattttattttaaatttatttatgagatgtttatttataagttgtaattattatgaagtgaatgaagaataatatttattattgtataatagaattttaagagtataaataggagttatggttttttgatttgaaattaaatatttgatatttgattttgttgtttgagattaatttgaaaagtaataataattattaatatttgttgagtattaattgtgggttaagtgttattttaattattttgtatatattaatttattttattttataataattcggtgaggtaagttttgttattttgttttatagttgaggaaatagaggtatagagagtttaagtagtttgtttagtagatagttagaagaggagttaggatgggtttcgggtagtttaatagtatagttgaagttttaattattatgttaatagttttttggttttatatattttatgggaagaggaaaataaaaaggtatttatttgtatatttttttatttttgatataagaagtagaattttttttatatgatttatgtttatttaatacgttattttgaaatttattaataaaattttttaagcgttagaaaattgttagtggttttttttatttttttttatttttttttgtgttattaattttgttttttttttttagaaggttgtcggaatagtaaatatttattgatatgttataattattggaaaatgggtattggaaaattatattgtaattaatttaaagtatgttttttaaatgtattattttaaattggagtttatattataatttaaggaaatttttgtgtgtgtattgtttttatattgtttagtttgggatatttaggagtaatttattttgcgtttgtttttagattattttttatggaagggggtgattttttgttttttggtaattattatttttaagttgttaatattatttttgtattattaatattttaattttatgggaagggttgtggtgagtttttggaatgtgaataggaagttgtttttttaaatagtttgatattgaggggaggtagtgagattgtaagtagtttgggttgggtagaaggtagaaaattagtagagttatagaggagatggtgagtttatttttttttgtatgggaagtggttgaagtgagttggagtggtatggagtaaagttaggtaggtaaaggtttagaaagtgaggaatagcgatagttatggagttttatgttgaattgtttattagattttgtgagtatttttaaatttgttgtttattttgatttttttaatatttttgtgagttgaggttgttatttttattttataaataaagttatcgtggtttatagaggttgtgttttatttaagttttattgttaggttatatgatgttgggatttggggtttgttttttggtttcgtagttgttgttttttttattagaatttataggggttttttgagaatagattatggtaaatttgttattttattttttaagattgtatttttttttgggataaatgatggaataaatggaagattgggtaggtgttttgggataagtttataattgaatagttttttatttttattttttttatttttttttgtgagtttatgaattttttgggattgatttggaatatttatatagtttttttttttgttttaagatttaattttgttaatgatttagtttttttttttataaaatggatatagtaataatattttatagttttattatgaggattaaataagattttgttgaaaagtatttagatttgagtttgatatatagtaagtgattagtaaatgttagttattattgttataataaaaagaaaatttttaggaatagtggggtttaggatttagggaagatttaaggatagttaggtattttgaatttagtaatgttatatgtttatggataagatgtacgtggttaggttatttttaatttagggaagatttaaggatagttaggtattttgaatttagtaatgttatatgtatttagataaaatgtatatggttaagttatttttaattttttttagattttttaagagtattttatatagttttagggttcgaaattttgtagtttgtggttatggaggaattaggtaggtttttgtttttgagtatttttttgtgggattttagaaaaaagtatcgtatatatttgatttattttattgttttgttttattatagtatattttttaagtatttataatgtgggtttttgtgttggggaaaataggaataagagtatgataaagagaagaggaaggagtttgagtttgttttaagtttgaattataatgatttaaggatatgaattatttttgttttgtttttttgtatgttatatttttgaattggttaatttaaatgagtagttattttttttttttttttattttttttggtatttttttttattttaaaggtatgaatttattggattagagagttttttgagattttgatgaaagttataatttgttttttttagatgaaagtaaaaatatcgatataaatattaatttttagagataattataggaggtttttagatttttatgtggattttagggtaagaatttttttcgattgttttttgggttttatgtttagaagttttttttttggtattttgaaattaggtttgagttttatagcgaagtgttaaggttttagttttggaatggtttttaatattttaaagataagatttttttttttttttttgagtatatttggttttaaagatttagaaattttaaattgtttgtgtaaattttgttttaagtttagagagtggttttaattaatttttaggatttgagaaaatgaggataaggtttttttggtggggtatttttaattagatagattttagaggagtagtttttgattgggaatttatagttaaattgtattgatgtttgttaaagttttagcgggttatggtcgggtttagtggtttatgtttgtaattttagtattttgggaggtcgaggcgtatagattatttgaagtcgagagtttaagagtagtttggttaatatggtgaaatattatatttattaaatttataaaaattggttgggtatgttggtatgtgtttgtaattttagttatttaggaggttgaggtaggataaatttttgaatttaggaggtggaggtggtagtgagttgagattatattattgaattttagtttgggtgatagagtaagatttgttttaaaaataaaataaaaaaaaagttttagtgggttaaggagtaggtttggattttcgtttatttatattttttaattattttatgtggtttttagtttttatttttttttttattatttgttttttaaaatgtaattaaaatagtttagatttttttgggttagttattagtttttagaatgtgtatttttagagatttttaagtagaagtttattgattaaatttttaaaaattaaaatgatttattatataaaaaattgtgtttagaaaaaattttggatttaaatttagagagtaggtatatagtggttttataaatgatatttattatattgtttttaaggtgtttaatttttttgattaaaaagtaaattagaaattttatgaagttaaatatagagtaaatttttattatttgtagagatataatttatttttgatttaatagattttttaaaaaattttaagtgtcgtattttatttttaatgttaatattttatttaaaataatggtaattggtagtttaaattaaatatatgtttggattttaagtgttgatgttttgggtttttttttgtttatatttataatttgttttttggtttagagataatttttttttttattgtatttttttttttatttttaagttgggttattaatatttgtgttatattattaatattattatcgtttagaaatataagggaattaatgtattagttgtaatagtttgtaatatttgggttttgttattaataagttgtatagttttgtatttttaataatttttatatttattttttttatttgtatttttattgatgttagattaaatttgtttttttttaatttttattgggattattgtaatagtttttttttttgtagtgtaatttttttgattgtaatttatttaaaaaaaaaaaagtatcgtattatttttatttttataatattagtatttttggaggttaaagaaaaagtattgtttgagtttaggggttttaggttagtttgggtaatatagtgagaatttatttttataaaaaattagtcgggtgtggtgatgtatgtttgtagttttagttatttaggaggttgagatgggaagattatttgaggttaggaggtggaggttttagtgaatttagattatgttattgtattttagtttgggtaatagagtaagattttgttttttagttttataaaaaaaattatattattattaagtgtatgtgtttatgatatttttttgtttagaagtattttttttgttaattggtatttgtgatttataagatatggttttaaattatttttttagttaatttttaggattttttaatttttagtaggttggagtgtagtagtgttattttagtttattgtaatttttgttttttgggtttaagcgatttttttgttttagttttttgagtagttgggattataggtatgcgttattatgtttagttaatttttgtattttttagtggagttggtttcgttatgttggtaaggttggttttgaatttttgattttaagggatttgtttgttttggttttataaagtgttgggattatagatgtgagttatcgtgtttagttttcgttggtttattattgtatttagaataaaattttatttttttgttttggattttaaagttcgatgtgatttgttattattttcggttcgtatttttttttttattgtttattttattttggttatattaatgtttttatgttttttgaatatattgtagtttgtttttattttaaggtttttgaaatagtttttttttttttttttaatgtttttttttttgttttttattggttggttttttgtagttatttttttttttatttaaatattattttattaaagaggttttttttgacgtttttgattaatatagtgatatagttattttattatataagttttattttttatttagtatttatggttatattttgttaatattttttatgtttatttgtttagtattgttgtgtagttattagtatttgttttattgttttttttattaatagaatgtgtattttatgaggattggaattatgtttgtttttattattttatttgtttatttagttattattattattgtaaaagtaatgtatttagttataattattatgtatttttttaatatttttttatttagtatatttttgttttatttttagttatttttttgttattatttatttatatatttatttataaaatgtttattgagtattgagtatgtgttttattatggttggggatttagatttgagtaagtaatagtttttgtttttgagaagtttttgttagtagtttttttagttgtatgtttatatgtttgttgcgtatttaaattgtggattttttgtttaagagaatatttagaaacggagatgttgattagaggatattggaaatagatgattataaggaggttatttttattttttaggaaagtagaagaatgagaagagaatagggttatggaggtgggaatttagagaaatatttatttttgtaagggaaggtagaggattgaggtagatttagaagaagatttagaaaagttttttaaatattagagtagaagaataatagaagagttaagggaagtattttaggtaaaaggaagtagtggtatttattgttatagaaaggttaaggaagataagggtggaaagtttttatttggtttggtaatgaggatgttagtaatgaagtttgtagggatattttgataggatggtcgggtagtgggttggagagtaagggggaggtaaggaagttaagaaagtttagttataagaggaaggagagaaataggtagatgtgggtaggaggataaagggttaagggagggatattgtttgatttcgtttttttaaaagtataaagttgtggtttataatgtagataaaaagaataagattttttttttgtggtattatttttgttaattttgtaagttatttggaacgtggtaagttatgggatatttattagtttttggtatttttttgtgtgaaaagttaggttaaggtatttgttttttttattttttttttgtttttttttttattttgtaattattattagtttttttgtttgtttgtttgttttgttttttgagaaagagttttattttgttgttaaggttggagtgtttcggtttattgttatttttgttttttgggtttaagcgatttttttgttttagttttttaagtagttgggattatagatatgtgttattatgtttggttaatttttgtatttttagtagagacgaggttttattatgttgttaggttgttttcgaatttttgattttaagtgatttgtttattttggttttttaaagtgttgggattagaggtatgagttattgtattagtttagttttttattaaagtaaaattaaagataattatggtatttaatgaaggtttatataggtataggatgttattttaatgatttagtttttgatttttttttagtaatttttagttgaattagttttttagagaatattaaagattagtagagtatgtggatgtttttagagaggaatttttttttgttttagtatttaatttgtttagtaatataggatagagtagtattttgtagattataatgtagagtaggagtaggtatgagaaggtttgtttattttaagtaggttttagaggaaaattgttatttaaagaagatttttaaatattatttattttttatatttttatataaaatttttattagttgttttatagttaatatagaattttgaatttgggttatattaaatatggatagatttagtaggttatgaattatttgagattttttaaattattgtaagtatgtatttgttttgaagaaatttgattacggtttttattagatttttaaaatttataagttttggaagaataagaataattgtgttaattttatgtatatttatgtgagtaagtttgggtaaattatttacgtttattgagttttagtggtggggagtggtggttgttttattttaggtattcgaagtttgaaagattttttgtagaatagtagataaatgttaagttggtttggaagtgatttttatgtttttttatagttttgaaataatttgtaagaggtgaattttggtatttggtgatgtatagaaatagaaaagtacgttagattaaagtaggggatgtatattgatttgtattttttttttttagatgttgtgtttttattaaaagtattgtattagttttttaaaatttttaaatgtttaaaataagttgtttcgtttttttttattttgttttattttgtgtggtagagaatttgttgatgaaattttgtttaaaaaaagtttaaataaataaataaataggttaaaatgggaaatatttttttttggaaattttgtttaaattaaattttatttaaaagtttaaataaataagttaaagtaggaaatagtgggtagggttggttattgtgatgggagattgggagttttatcgattttttcgttttatatatttttgtgagttggttttaaagttagggaaatttttagaaatattttgtttagggagaaaattatttttataggaagagtattattaaatttaaaatcgttgtattttttttgtaatttgtttgaatagagtaaagtttaggtttaaaggtaagtatttaggttttttttatgaaggttgtagagttgtgttttttagtagtaatatttttgtttttatatttttaaaaatattttggaatattatgttattttttatatttttttaagtggaaagttataattttttattttaaattttaaaagtaaaagaagattggattttttagtgtattataaaaattagattgtaaaaataaaattgttatataattttttaaagtttatttaatggaataaagtattagtatgatttgtaatttttattatttaaaagattataagtaggtttttaagaaattttatattatttatttttttttttttgaatagttatttttattttatttttatagtatttagtttaagattatatattttaagtttaaagtatttttttgattattatatttttttgtaaaataaaaatataaaattttaattttttataattgtaagtttttatgtgttaaaatgttttttttttttattgagttagtatgataattatttttagtatataattaaataaagtaaatatattgtaagttttgataagtaatttaaatttttatatttaaattgttattaaagatttatttttaagataggaggagtttttttttatttgtttatatatttatgaatgaatattatttattaataaaattagataagtttggtattaatattatttttatattttatttttaaggatttaaatattgagaaattttatttatatgaataagtaaatggaattagaagttttattatagtaatgttttaattttttgaagtttttttaagttatatgttttaaattatatagtgatttattattaaaatttagttagatttgataatttaatcgggtgtttttttaaagttgatgaaaggaaataaatggaaattattagatttgaaaacggatttgttgtaatattatttataatatttaaatttttaatatttatattaatatttcgaattatttttggtatacgaatgtatttatatttaaaggtaaagttttggaataaataagaaattagtaaaaggtataattttttttttataaagtgggagaaaggtgtattttaggtagattgtttttaagaaagtatatatgtgaaagttgagaatttgaatatagatttaattaatattttttttgtttgtgaattttttgggaagttagttttattttggtttgaagaattttattttagtatttggaatggtgtattttgaaatgtgataggaagaatagtttgtgatataatataatttagagaaagtagtggggttaggttcgtattaaagggttatcgattattttgtattttgtgtaaataaatagttgtaaattataacgttatgatatttttagtgtttaattataggttttgtagagattagtagtttataagaatataaaatatgtttatttattaaagttaagatttagaagtttttagatgaaaagttttaggtttatgagataattttattttttgggatatattaattggtttgagttgagttttttttggtatttggttaggttgtagttaaaagtgtatgaatatatgtatatatatgattttatattgttttatgtattttattgggcgtgatatatatataattttatattgttttatgtattttatataatttattattgggcgtgatatatatatatatatatatatatatatatatataattttatattgttttatgtattttatattatttattattgggtgtgatatatatatatatataattttatattgttttatgtattttatattatttattattaggatatgatatatgaatatatatataatattatatagttttatgtattttatattatttattattggggtgtgatataaatatatatatatataattttatattattttatgtattttatattatttattattggggtatgatatacgaatatatatataattttatatagttttatgtattttatattttattattggggtgtgatatatatatatatatatatatatataattttatattattttatgtattttatattattcgttattgtggtatgatatatatatatatatagaattttatattgttttatttattttatattatttattattgtggtatgatatatatatatatatatatatatatatatagaattttatattgttttatgtattttatattatttattattggggtatgatatacgtatatatatataattttatatagttttatgtagtttatattatttattattgtggtatgatatatatatatatatatatatatatatatatatatataattttatatcgttttatgtattttatattatttattattggggtatgatatacgaatatatatataatcgtatatcgttttatgtacgttatattatttattattggggtatgatatacgaatatatatataatttcgtagtaaattgttatagattaaattgtggtttgaggtaatttgagatttttttataggaaaggttttaggtagtagtttggttgggatagtgataaaattgtaaatgtatagtaaatgtattgtttttatgttgatagtaatgttgagtggttttagaggggaattgatgtagtagttaggtttggttatgtcgtatgttttattatttaaaatagtaatgtagtatgggatttagaagtttggaggttaatgaaggttaaaaaaaaaaaaaaaaaaaagtatagtggaaagagtttttttttgttttaaagttaagttttgttattgttattttgaacgtgttatttagatgttttaagttttagtatttttatgtgtaatatgaggaagtcggataagatgagtattattagaatttagatgtttaaaaatattttttgttgtttttttgagacggagttttgtattgtcgtttcggatagagtgtagtggtgtgattttcgtttattgtaattttcgtttttcgggtttaagcgatttttttgtttcgattttttaaggagttgggattataagtattcgttattatatttgtttaatttttttttaatgtatttttagtagagatagggttttattatgttggttaggttggttttgaatttttgattttatgattcgtttattttagttttttaaagtgttgggattataggtatgagttattgtgtttggttttaaaaatattttaaaaatatttatagatttgatgaaattttaatagaagagagtttatgagaaataatagttgttatagatttaaggggaataagtttattgtatatattaagaaatattaaatatatatatatatatgtatattaaatattgaatagtattgtagatgtgtatagaaatgaaaaagtaagaagataaaataaagatttatagtataaaatagatggtatagtataatataatttgttgatgttttgtattttaaagtataggttagatattatttgtgtgggttaggaagtttttatgtgattttttgttatttttgggtatgatatattattttttaaaaagattgttttataataataatgatagttatattaatgtgtttagtttttttttatatatattaaaaatgtattttaaaataaaaatattggtggtataaattatttaataaatatttgttgaatgaatgaagaaatgaattttgtttttagttttgttatagtgtttatttagggtagaatttagaagtagggtaatgagaagtaagaaggaagtagagggtttgaattatttttttagtggaaattggtataattatattttaatataatgattgttaattagaattatttttggttatgttggtggtgtatggatattaaaagaaagttttttttttttgttttagg

SEQ ID NO: 1654 - DNA, 15951 bp, Artificial Sequence
  chemically treated genomic DNA (Homo sapiens)
tttgaaataagaagagaaaatttttttttagtatttatatattattaatatggttaaaaataattttagttaataattattatgttgaagtataattgtgttaatttttattggaagagtggtttaagttttttgttttttttttgttttttattgttttgtttttaagttttattttggatggatattgtagtaaggttggggatagagtttatttttttatttatttaataaatgtttattgagtagtttgtgttattaatgtttttattttaagatatatttttaatgtgtatggaagaaagttaaatatattaatatggttgttattattattataaaataatttttttaagaagtggtatgttatatttaagaataatagaaagttatatgagaattttttgatttatataaataatgtttaatttatattttgaggtgtagagtattaataaattgtgttatgttatgttatttattttgtattatggatttttgttttatttttttgtttttttatttttgtatatatttataatattatttaatgtttaatatatatatgtatgtatatatttaatattttttaatatatgtagtaaatttgttttttttggatttatagtaattattattttttatgaatttttttttgttgggattttattaaatttatgaatatttttaaaatgtttttggggttaggtatagtggtttatgtttgtaattttagtattttgggaggttgaggtgggcggattatgaggttaggaatttaagattagtttggttaatatagtgaaattttgtttttattaaaagtatattaaaaaaaaattagataggtgtggtggcgggtgtttgtaattttagttttttgggaggtcgaggtaggagaatcgtttgaattcgggaggcggaggttgtagtgagcggagattatattattgtattttattcggggcgatagtgtaagatttcgttttaaaaaaataataaaaaatgtttttgggtatttaagttttagtgatgtttattttgttcgatttttttatgttgtatatgaaaatattgaagtttggggtatttaaataatacgtttagaatgatagtagtagagtttgattttgaaataagaaagagttttttttattgtatttttttttttttttttttttaatttttattaatttttaggtttttaaattttatgttgtattgttgttttggatgataaagtatgcgatatgattaagtttagttgttatattagtttttttttaaagttatttaatattattattaatataaaaatagtgtatttgttatgtatttgtagttttgttattattttagttagattgttatttaaaattttttttgtaaagaaattttaaattgttttagattataatttggtttgtgataatttgttgcgaggttatgtgtgtgttcgtgtgttatgttttagtgatggatgatgtagcgtgtatgggacggtgtgcggttgtgtgtatgttcgtgtgttatgttttagtgatggatgatgtagggtgtatgggacggtgtggggttgtgtgtgtgtgtgtgtgtgtgtgtgtgtgtgtatgtgttatgttatagtgatggatgatgtaggttgtatgggattgtgtggagttgtgtatgtatgcgtgtgttatgttttagtgatggatgatgtagggtgtatgggatagtgtggggttttgtgtgtgtgtgtgtgtgtgtgtgtgtgtgttatgttatagtgatggataatgtagggtggatgggatagtgtggggttttgtgtgtatgtgtgtgttatgttatagtgacggatgatgtagggtgtatgggatggtgtggagttgtgtgtgtgtgtgtgtgtgtgtgtgttatattttagtgatgagatgtagggtgtatgggattgtgtggggttgtgtgtgtgttcgtgtgttatgttttagtgatggatgatgtagggtgtatgggatggtgtggagttgtgtgtgtgtgtgtttgtgttatattttagtgatggatgatgtagggtgtatgggattgtgtggtgttgtgtgtgtgtttatgtattatgttttggtgatggatgatgtagggtgtatgggatagtgtgggattgtgtgtatgtgtgtgttatatttagtgatggatgatgtagggtgtatgggatagtgtgaggttgtgtgtgtgtgtgtgtgtgtgtgtgtgtgtgtgttacgtttagtgatggattatgtagggtgtatgggatagtgtggggttgtgtatgtgttacgtttagtagggtgtatgggatagtgtggggttatgtgtgtgtatgtgtttatgtatttttgattatagtttgattagatattagggagaatttaatttaaattagttaatgtgttttagagagtagagttattttataagtttagaattttttatttgggagtttttgaattttgattttggtaagtaggtatattttgtgtttttataagttgttgatttttgtaggatttatgattaaatattgagagtattataacgttatgatttatagttgtttatttgtataaaatgtagagtgatcgataattttttggtgcgaatttaattttattgttttttttgaattgtgttgtgttataagttgttttttttattatattttaaaatgtattattttaaatgttgaagtggaattttttaaattaggataaggttgattttttaaggggtttataagtaaagagagtgttaattaaatttgtatttagatttttaatttttatatatatatttttttaaaaataatttgtttaaaatatattttttttttattttataagagaaaaattatattttttattaattttttatttattttagagttttgtttttggatataaatatattcgtatgttagagatgattcgaaatattggtataggtattaagaatttgaatattgtaaatgatattgtagtaaattcgtttttaagtttagtgatttttatttatttttttttattagttttgagggagtattcgattaagttgttaagtttgattaaattttgatagtaaattattatataatttggggtatataatttggaaggattttaaggaattgagatattgttataataaaatttttaattttatttatttatttatatgaatgaagttttttaatgtttaaatttttgaaaatgaaatatgggaataatattgatgttaaatttgtttaattttgttgataagtaatatttatttatggatatatgaataaatgagggaaagttttttttgttttagagatgaatttttaatagtaatttaaatataaaggtttaagttatttgttaaaatttgtagtatatttattttatttaattgtgtattgaaagtagttgttatgttaatttaatagaaaagaaaaatattttaatatatagagatttatagttgtagaaaattgaaattttatatttttattttgtaaagaagtataataattaagaaaatattttaagtttaaaatgtgtaattttaggttaaatattgtagaagtgggatagaaataattatttaaggagagaaaaatgaataatataaaattttttaagagtttgtttgtggttttttaagtgatgaggattgtagattatgttagtattttattttattggataaattttaagaaattatgtaataattttatttttatagtttaatttttgtaatatattggaaaatttaatttttttttgtttttaaaatttgggataaaaaattgtagttttttatttagaaaggtgtaagaggtaatatagtgttttaggatatttttggaggtataggagtaaaaatattgttgttgaagagtataattttgtagtttttatgaaggggatttgagtgtttgtttttgaatttgggttttgttttatttagatagattgtagaaggagtgtaacgattttaaatttagtggtattttttttgtggaagtggttttttttttgaatagagtatttttagggatttttttggttttggggttagtttataagagtgtgtagggcgaaggagtcggtgaggtttttagttttttattatagtggttaattttatttattgttttttgttttgatttgtttgtttaaatttttaaataagatttggtttaaataaaatttttaaaaagagatgttttttattttaatttgtttgtttgtttgtttgaattttttttaagtaaaattttattagtaaattttttattatataagataaaataaagtgagagagagcgagataatttgttttaaatatttgaaggttttagaggattggtatagtgtttttgatgaaggtataatatttaagaaaggaaaatgtaagttagtgtgtattttttgttttaatttgacgtatttttttgtttttatgtattattaaatattaagatttattttttataggttattttagagttataggagaatataaaggttatttttaagttaatttagtatttatttgttgttttgtaggaagttttttagatttcgaatgtttaagatggggtagttattattttttattattgagatttagtgagcgtaaatgatttgtttaagtttgtttatatgaatgtgtatagggttaatatagttatttttatttttttagggtttatgaattttgaaaatttgataaaagtcgtggttagatttttttaaaataaatgtatgtttgtagtagtttagagaattttagatggtttatgatttattaagtttgtttatgtttaatgtggtttaagtttaagattttgtgttaattgtaaggtaattgatagggattttgtgtggaggtatggagaatggatgatgtttaaaaattttttttgagtaatagtttttttttgaaatttgtttggggtgggtaggtttttttatatttgtttttattttgtattatagtttgtaggatgttgttttgttttgtgttattaagtaagttaaatattaaaataagaggaaatttttttttagaagtatttatatgttttgttagtttttaatgttttttggaaggttggtttaattggaagttgttggaaaggagttagagattgggttattagaataatattttgtgtttgtgtaagtttttattaagtattatgattatttttaattttattttaataaagaattgggttggtgtagtggtttatgtttttaattttagtattttgggaggttaaggtgggtagattatttgaggttaggagttcgagaatagtttggtaatatggtaaaatttcgtttttattaaaaatgtaaaaattagttaggtatagtggtatatgtttgtagttttagttatttgggaggttgaggtaggagaatcgtttgaatttagaaggtagaggtggtagtgagtcgagatattttagttttggtaatagagtgagatttttttttaaaaaataaaataaataaataagtaaaaaaattaataatgattgtagggtgaagagaaaagtagagagaaagtggaagaagtaaatgttttgatttaattttttatataaggaggtattagaggttagtaggtgttttatggtttgttacgttttaggtggtttataaagttggtaagaatagtgttatagaaaggagattttgttttttttgtttatattgtagattatagttttgtgtttttagaaaggcggaattaaataatgttttttttttgattttttgtttttttgtttatatttgtttgtttttttttttttttttatagttaaatttttttaatttttttgttttttttttattttttagtttattgttcgattattttattaaagtgtttttgtaaattttattgttgatatttttattattaaattaaatgaagattttttatttttattttttttgatttttttgtagtagtaaatattattatttttttttgtttaaaatgttttttttagtttttttgttgtttttttgttttaatgtttgagaaatttttttgagtttttttttgaatttattttaattttttgtttttttttgtagaggtaagtgtttttttaggtttttatttttatggttttattttttttttatttttttgtttttttgggaagtaaagatgatttttttatggttatttgtttttaatgttttttaattagtattttcgtttttgaatatttttttgagtaggaggtttataatttaaatgcgtaataaatatgtgagtatatagttgaggaagttattgatagaggttttttaagggtaaggattattatttatttaggtttgaatttttagttatggtagggtatatatttaatatttaataaatattttatggataaatatatgaatgaataatggtagaggaataattgaaagtaagataaaaatatgttaaataagaaaatgttggaaaaatatataataattataattgaatgtattatttttatagtagtgataatagttaagtgaataaataaaatggtgaaaatagatataattttagtttttatagaatgtatattttattggtagagaagataatgaaataaatattaataattatataatagtattaaataagtaaatatgaaaaatattaatagaatatagttataagtgttaggtaggaaatgaaatttatgtgatagaatgattgtgttattatgttggttaggaacgttagggaagatttttttaatgagataatgtttaagtggagagaagaatgattgtaagaaattagttagtgagaagtaggaagaagagtattaaaggaagaagaaaaagttattttaaaggttttaaggtggaagtaaattgtagtgtgtttaaagaatatgaagatattagtgtggttagaatggaatgagtaatggagagaaaaatacgagtcgggggtagtgatagattatatcgggttttgggatttaaaataaggggatgagattttattttaagtgtaatgataagttaacggaagttgggtacggtggtttatatttgtaattttaatattttatgaggttaaggtaggtagattttttgaggttagaagtttaagattagttttgttaatatggcgaaattaattttattaaaaaatataaaaattagttgggtatggtggcgtatgtttgtaattttagttatttagaaggttgagataggagaatcgtttgaatttaggagatagaggttgtagtgagttgagatggtattattgtattttagtttgttgaagattgggagattttagaggttaattgaaaaggtagtttgagattatattttgtgggttataaatattagttggtagaagggatatttttgaatagagaagtattatgaatatatgtatttaatggtggtatgattttttttgtggggttgggggatagggttttgttttgttgtttaggttgaagtgtagtggtatgatttgggtttattgaaatttttattttttggttttaagtgatttttttattttagttttttgagtaattgggattataggtatgtattattatattcggttaattttttgtagagataagtttttattatattgtttaggttggtttggagtttttgggtttaagtaatattttttttttggtttttaaaaatgttgatattataggggtgagagtagtgcgatatttttttttttttaaatgagttataattagggagattgtattgtaaaagaagaggttattgtaatggttttagtgagagttaaagagggataggtttggtttggtattagtgggaatgtaaataggggaggtgaatatgagagttgttgaggatgtagaattatataatttgttggtagtaaagtttagatgttataagttattatagttaatatattagtttttttatgtttttggacggtggtggtgttagtggtgtggtatagatattggtagtttagtttaggggtggaaaaagaaatatagtgagaaaagaggttgtttttaagttaaagagtaaattatgaatatagataagaagggatttaggatattaatatttagaatttaagtatatatttaatttagattattaattgttattattttgagtaaaatattagtattaaaaataaagtacgatatttaaaattttttaaaaagtttattggattagagatgagttatatttttataaatagtgaggatttgttttgtatttgattttatgaagtttttgatttattttttaattaaaaagattagatattttgaagataatataatgaatgttatttataaaattattgtgtgtttattttttaggtttaggtttagggttttttttaaatatagttttttatgtagtaagttattttgatttttgaggatttgattaataagtttttatttaaagatttttgaagatgtatattttaagagttggtggttagtttaggagagtttgaattattttagttgtattttgaaaaataggtaatgaaaagaagagtaaggattggaagttatataaggtggttaaaaggtataaatggacgaaaatttagatttgttttttagtttattaaaattttttttttgttttgtttttgagataagttttgttttgttatttaggttggagtttagtggtgtgattttaatttattgttatttttattttttgggtttaagagtttgttttgttttagttttttgagtagttgggattataggtatatgttaatatgtttagttagtttttgtaagtttagtaaatatggtgttttattatgttggttaggttgtttttgaattttcgattttaagtgatttatgcgtttcggttttttaaagtgttgggattataggtatgagttattgagttcggttatagttcgttaaaattttgataaatattagtgtaatttaattataagtttttaattaagagttatttttttgagatttatttgattgaaaatattttattagaaaaattttatttttatttttttaggttttaaaagttaattaaagttattttttgaatttgaagtaaaatttatataggtagtttgaggtttttgaatttttggggttaaatgtgtttagaggaaaaggaagaggttttgtttttgaaatattaaaaattattttagggttggggttttagtatttcgttgtagagtttaagtttaattttagggtattaagagaggggtttttgaatataaagtttaggaggtaatcgagaagggtttttattttgggatttatatggaggtttgggaattttttgtggttgtttttaaaggttggtgtttatgtcgatgtttttgtttttatttgggaaagataagttgtaatttttattaaaattttaaagaattttttgatttaataagtttatatttttgaaatagaggaggatgttaaggagagtagaaggaagagaggaataattgtttatttaagttaattaatttagaagtatgatatgtaaaaagataggataaaagtaatttatatttttaggttattgtggtttaaatttaagataggtttaaattttttttttttttttttattatatttttatttttgttttttttaatatagaaatttatattataagtatttgaaaagtgtgttatagtaaagtaaagtagtaggatgaattaggtgtatgcggtatttttttttggagttttatagaaaggtgtttaaaaatagagatttgtttggtttttttatagttatagattgtaggatttcggattttgggattatgtgggatatttttggaaagtttgaggaaaattggaagtagtttaattatgtgtattttatttaggtgtatataatattgttgagtttaaaatgtttagttatttttggattttttttgaattagaagtagtttaattacgtgtattttatttatgagtatataatattgttgagtttaaaatgtttagttatttttggattttttttgaattttaaattttattatttttaagaattttttttttattgtaataataatggttaatatttattaattatttattatgtgttaggtttagatttggatgttttttagtaaaattttatttaatttttatgatgaaattatagagtattattattatatttattttatagaagaagaaattgagttattaataagattgagttttagggtagaaaaggaaattatgtggatattttagattagttttagaagatttataggtttatagaaagaaatgggagggatggggatgagaaattatttaattgtaagtttgttttagggtatttatttagttttttatttattttattatttattttagagagaagtatagttttggaaaatggggtgataggtttattatgatttatttttagagagtttttataaattttagtaggaggaatagtagttgcggagttagaggataggttttagattttaatattatgtagtttaatagtgaagtttagataaaatatagtttttgtaaattacgatggttttatttgtaaaatagaaatagtaattttaatttataagggtgttgggagggttaaagtggatagtaagtttaaaagtatttataaaatttaataggtaatttaatataaaattttatggttatcgttgttttttattttttgaatttttatttgtttgattttattttatattattttaatttattttaattattttttatgtagaaaaaaataaatttattattttttttgtgattttgttggttttttgttttttgtttaatttagattgtttatagttttattgtttttttttagtgttaggttgtttagaaaaataattttttatttatattttagaaatttattatagttttttttatgaagttagaatgttgataatgtaagagtaatgttggtagtttagaaatagtggttgttaagaggtaaggggttatttttttttatggaagatggtttggaggtaggcgtaaggtgaattatttttggatattttaggttgagtaatgtgggaatagtatatatataaaggtttttttggattatgatataagttttaatttaaagtagtatatttggaaaatatgttttgaattaattataatgtgattttttagtgtttattttttagtaattatgatatgttagtgaatgtttattatttcggtagttttttgagggaaagaagtaaaattagtagtataaaaaaaaatagagagaaatggaaaaagttattaatagttttttggcgtttgggaaattttattggtaagttttaaaatgacgtattaaatagatataggttatgtgaaaggaattttgttttttatattagaaataaaaaggtatataaatagatatttttttatttttttttttttatgggatgtgtaggattaaaaagttgttggtatagtggttaagattttagttgtgttgttaaattgttcgagatttattttggttttttttttggttatttattgggtaaattatttaagttttttatgtttttgtttttttaattgtaaaatagaataatagaatttgttttatcgggttgttgtaggatgaaatgagttaatatgtatagagtgattgaaatgatatttggtttataattgatgtttaataaatgttagtgattattattattttttagattgattttagatagtaaaattaagtattaagtatttagttttaagttagaaagttataatttttatttatatttttggaattttattgtatagtagtaggtattattttttatttattttatgatggttatagtttgtaaataggtattttatggataaatttaaaatggaatgaagtagaaatattggaagaaagtttaaaggtaaagatgaattagggtatataaggttgtatttgtacgttggaatttgggattaagaagaaaaaattaattatatagtagaagtagaaaagatggtgaaggaaatgttgttgaaggaatgattgtaggggaataagggaaatttagagagaggaaaaaatgaggaattttttggtagtatgatgtagtttagagtttagattttagagttagattgtttggttttattatttattagttgtgttgggcgttattaatttttttataatttagtttttttagtgatgtggtttggttgtgtttttatttaaattttatttggaattgtagtttttataatttttataggttgtgggaggtatttggtagattattgaattatgggggtggttttttttatattgtttttatggtagtgaataagtcgtatgagagttgatggttttataaggggaaattttttttgtttggtttttattttttttttttttttgttgttatgtaagacgtgttttttgttttttattatgattgtgaggattttttatttacgtggaattgtgagtttattaaatttttttttttttaataagttatttagtttcgggtatgtttttattagtattatgagaatagaataatatatttagtaatgtgaataataaggataataattattaaatatatagatatgtaaggattattaaatgaatttaatgtgtttggaataatatttattacgttgttaagtgtaagtttaagtgttggttattattttataagatttgtttttatgtttttttgtttttatttttatttattagtttttttttttggtattgttttatgttagaaaaaatatatatagttttagatggggatgaggaagtgtggtatgtagattagtaggttttttttttgagatagggttttattttgcggtttaggttggagtgtagtggtatgattattgtttgttttagttttgattttttgggtttaagtaatttttttattttagttttttgagtagttgggattatagatgtgtgttattattattggttaattaaaaaaaaaaatttttagagatagggtttttttatattttttaggttggttttgaatttttgggtttaagtgatttttttattttagttttttaaaatgttgggattataggtatgagttattatgtttagtttggtagttttttatttataataagtttgatattaataagtttaattgattatatgtttttaagtttgatattgttaaattttagtgaatataaggaaagtataaaaagatttttatgtaggtgatattagtaagatggtggagtaggagatgttagttttatgttttaataaaaaaataaatatagatagttatatataaattaaaatagtttttataagggtggggagttgggggatggggtttaagagtttgttaaagaatttggaataatataatggagaaaagaaagaatatttatgtagaagaattatcggtgagattggtatatatgagatattaggagatagttacgaataaagaaatttgtaggttatttgtgttagttatgtgatatagagttattgaggtttttagtgttttgttttatagaggatattggtattttttatttaatagttatttttatagtaggatgttaaaaagggaaatatagttgtattattttttatatttttttattaagaagtagttattgttgtattgttttaggattggggttagggttattattttttataagtttatgtgtgtttttgatttttaaaagttgtggttgttttatagatatttatattttggattgtggttttgtggttgtagtgtatttttttatgttttagatattggagttattgttgttgtgaattagattttattttgggattttaagttaagttttttttgtgaaagtttttgttttagatattagtttagttattgtagaaaggtaatttatatttttaattttagagttgttgtagtaatgtgtatatttgcgttttagattttgtttttgaggttgtattatatatatttatatttttaatattagagttattattatagtgagttagtgaatattttgggttttagagttaaggtttttttgtgtttgtttatgttttagttattagtttagttattaaggagagttagtttatattttggattttggagttattgtagttttgcgtatgtatgtagtaaagtttttggttttttagttgttttataagtatttgtattttatatattattattaatgtgatagtaagtatgtttgtgttttgggtattggtattattgttataattgaatttggtgttgtggtttttttatgtatgtttatgttttaggttttggtttttggttattttatgggtattgtttattagatattagtgttattattattaggagtaggtttgtaagttagatttaattttaagagggatgtttttagttatgattttttaggtggggaaaaaaagagatatggaggatttgttataattgaaaattttaatagttttattgttattgtagatatttatagtgttggtttttaaggatttttgtagtatttattaatattaattttagttgatagatttgtatggagattatatagttttgtttttattgaagttagaatttttgtattttatttagttagtattttcgtattattttatataagaaggtatttttttattaaagttagtttatatagtttgaaattggggtagatttattagatgtttagatagtagtgtaaggtagtaagaaatatgaaaatttaaattaaaatattattatttaagaaatataataattttttagtagttgatttaaaagaaatggagtattataaatggtttgataatggatttaagataattgtttttaaagaagtttagttattttgaagtaaatatagagaaataatttggtgaaattagagaaataataaatgtataatataagaaatgtaatagaaagattgaaattataaaagaaattggagttgaaaaatataatgaatgaagtgagaaatgtagtagaaattattagtagtagatttgattaagtagaagaaagaatttgtgaattgaagataggtttttgaaaatatatagtgagaggagaaaaaagaatgaaaagaaatgatgaaagtttataagatttatgggatagtattaagagagttaatatttagttagatttagtggtttatgttataattttagcgttttgggaggttaaggtgagtggattatttgaggttaggagttaagattagtttgattaatatggtgaaatttagtttttattaaaaatataaaaaaattagttagggattgtggtatatgtttgtaattttagttattggggagattgaggtagtagaatttttttaatttagaaggtaaaggttgtagtgagttgagattatgttattgtattttagtttgggtgatagagtgagattgtattttaaaaaataaaaataaaaattaaattaaaaattaaaaaagagagttaatgtttatattatagtagtttaagaaggagaaaatagaggaaaagggggttagaaagtatatttaaagattgttagttgaaaattttttaaatttgaaataaaatattaatatttaggtataggaagtttaaaaatttttagttaggtttaatttaaaaaagattatattaagatataataattaaattattaaaaattaaagataaagataggattttaaaattagtaagagaaaagaagtatattatagataagaattgtaataaggttattataagattttttagtagaatgtttttaggtttagagagagtgagatgatatatttaaagtgttgaaagagaaaaaattgttaattaa

SEQ ID NO: 1655 - DNA, 5397 bp, Artificial Sequence
  chemically treated genomic DNA (Homo sapiens)
ggtgaagattttatgaaagattttaaaagtataggtaataaaagcgaaaataaataaatgggattatattaaattaaaaagtatttgtagagaaaataattagtagtgtgaagagaaaatttgtagaattggagaaaatatttgtaattattaatttaataaggaattaatattttgtatatataaggaatttaaataagtttatagtaaaaaaatttaaataatataattttaaaatgggtaaatgatttgaatagatacgttttgaaagaagatatataaattgttaataagtatattaaaaatgtttggttaggttcggtggtttttgtttgtaattttagtaatttgggaggttgaagtgggaagttggtttgagtttaggagtttgagattagtttgggaaatatagtgagattttatgtttataaaaataaaaaattattcgggtatggtggtttatgtttatagtgttagttatttaggaggttgagttgggaggattgtttgagtttaggaggtgaaggttgtagtgagttgagattgtgttattgcgttttgttttgggtgatagagtaagattttgtttaaaataaaataatagatataatataaaaataagaatttttaatattattatttttaaggaaaatgttaattaaattataatgagatattttattttaggtagattggtttttattaataagataataattaataaatattggtaaggatgtagagaaaagtgaatttttatatattgttggtggaaatgtaaagtagtatagttattatggaaaatagaggggagatttttttaaaaaataaaaaatagaacgattatatgatttaataattttattatttagtatttataggaatatatttaaaggaaaggaatttagtatgttgaagaagtatttgtatttttatgtttattgtagtattatttataatagttaaatgtggaattaaattaagtgtttattaatggatggatggataaagaaaatgcgataattatatattatgaaatattgttcggttttaagaaagaatgaaattttgttatttatggtaatatggatgagttattatgttaaatgaaataaagttaggaagagaaagttaaatatagtatttttttatatatatgtggaagttaaaaataaagttaattttatagacgtaaatagtagaatagagtatattagaggttgggaaaattaggagaatgaaggatggggagagtttggttaatggataaaagattatagttagataagagtaatgagttttagttttttagagtattggagggtgattatagtgaataataatttattatatatatttaaagaggtaaaagagaagattgtgaatgtttttattattaaatattgatatatttttggggtgatgggtatataatttattttgatttgattattgattattgtatatatgtattaaaatagtttattatattttatgtatatataaaattatgtgtttattaaaaataagaaattttttaaaattaaaaagagtaaagaataagttatttaaattaaaaataagtaaattttaagaaaagattatagttaataattatatttttgtgtgttaatttgaaaatatggttggggtatgtaagagaaaatatttattgtagaagagtatttgtagtatggttttattgatgtaaagttagtgtgtgtgtgtgcgtgtgtgtgtgtgtgtgtgtatgtgtacgtgtgtttttttgagtttattttattggagatagttgttgttatttgttagttttaatttttttaaggcgtagaatgggaaaaattgttttttttattttaaagttttaataaaatatgacgtgtttttttggggtttggaagatttaaaatgtttagggtagtgaggtgagagggttgtgttgatgaaaattaaaatttgttatttttaggttatagaaagatttattgtgttatgttttttaagaatgtagtgatatttattagatgtgttaatgtaatatagatatgtgtgtaaatatatagtatataatatatgtgtgtatatatatttataatatatatatatataattgtttagtatgttggttgtattaaggaaaagaagcgttaatttttatttttttaatgtggttgagttgttttttagattttgatagtagaagtgattttgaaatatatttataattagtaaatttatttatgtatttttttgtttttaggtataggtagattaagtatatttttttgattttgggaaggttttagtagaggattgagttggaaagaggatttttgggtaattttggtaatttatgtaatttttgttagttttagttgattgaagtatggaatggggatttatttattttttgtacgttttatagagtgttgtaatgatttaaaacgacgggaaagttttagtagttatagatagtttttttttattgttagtatttagtgtagttggagaaaggggaaggaaagagttttttgagtattgagagagaggtttcgaatttgtagagattttcgtgggttgtttttagggcggtgtatggtttttattttgtgtttttttagttttaaaaagcgtcgtttttttggttttagttatattgggtgaggagggggttttgttatagggagtgggattcggagtgtagtgagattgtggattttgaggtggtttcgcgtgggtatttagggtttggtagtgtgaagaggatgttttcgtagagggaggtggtttagtatgggggttgaagtttttaggagagtgagaagggtattgaaggagagcggatcggttagggtaatggggtttgagtagggggaggaggttgtggacgcggtagagtggtttggtttggatattcggaatttagtagggattgtagtaatttttagtgttaagaatgataagtttgtgttttttaattatattttttagatttgttggtgttatgtgttggtaaattgtatttgttttaatattaaattcggatagtgttttttgtagtacgtaggcgagtgtatggttttttttggcggtcggtggtaagttttatttacgagtttatattgttataaattaattaaagggtaataaagagcgtgatgagggatgggatttttataatagttttaaagtgcgtttttataatatagttattgattaaaattagaaaaagaataaatttgtagtggtaaattgtgatatttattattttaattaaatgattaatacgaatattattagttttggggtaaattaaagttatatgttgtcgggtagaatgggagaagagcgtagtcgggtgtcgatggtatttttgtcgaagttatagaatttgaatttaattgtaaggtaatataaataaataaataaataaagtgaggggtattttatatagtaatttttttgtgatttttatattgtgtttaggttatgaaggtgaagggaagatagagggattttgtgggttttaggattttggagaagcgtgataatcgaataaggtatatggtttagaaacggattttttgttataaaggatattattggggtattgtgtatattttgtatagggtttgaaggttatttggagttattgtattcgtgtttattttttgattacggttataatgtaaaaatgtttttgcgtgaaaaatatattaaagtattggggtgttggggttttatgttgataatttatttttataggtttaggggaaaaaaaagtcgtacgatattggtaatttttttgtaattttgatgttgttttagaataataaaatgaaaaatgaaattgattaaggttatttggttaataagtgatagttttgggttaaaatttaggtgtgttttttttttaaagttatgttttgttttgttaattataaggttttgtatatttaagttggtttttgtttttgtttattatttgtaaaatagttttgtttttttatagttaagttgttggagtttcgttttatttgtttttaatttgtattggtttgatttttttattttatatttggtttagtatttattatatggtgtggtagatagtattggggtagttgaaagattttatgttataaattggtattgtttagttttttgtttttgggagtggggttcgttgtttgagttttcgttttttggaagagttttaaattttttaatggtttgggattttttaaattaattttaaataagttaggggagatttttttgtttgggtttttattattattatttttatagttggagatttttttttaatttagatgtttaaattaggattttaataattagggttttatatattattgggatatttagtataattattattgtaggttgttagatattatttaaagtgatgttttattaaagatagaaattgtagtttttttatgattttttaggtgttgttttgatttttttagttgaatttgttagggtagagggaagtggaacgtgtagtatatttgtttgttattttgtttatgtgtttattaattcggttgtaggttttagagatattggttgggggttttggggtttagagttgagtaaggttatagggtagataggttggtttggattaatttgattaattttagttgaagtagtgatttttttattgtttgaaattaaattaggaatttagtggagttttttgagtgtagagtgggtgattttagttagtgaggtatttttttttttatagatttggtatttttttttattaggttttgtgttttttttaagggttttaagtatttttgtagtttgagtgttttgtagggaaatgtgttgtgtaaatattatgtttattttttgtttggagaataggttttgtggtagagtttttaggggtggggaagaagtttggtagtttatatgttataaattttgttgtttatttttatgttttaatttggaggtagagatttaagtagttggaggttttgtgtgtgggtgagtttagttatattttttaggtgttttttagtttgaggatcgtaggtagagaggattagtttagtagttataggtttgattaaggtttaggttgggaaggagggtaattttttattttttattgggaggtgttttatagtatggttaatatggatgatttataaagatttttatgttttgatattttttttggttagatttatttttattagggatttagtagggtttaagtagggggagtgggagaatagattttaagaggaaggaagattttattattgattgtgagagggttattatttttcgatgattattttgaagggtttaggttgtgggttttatttatttttttttatttttagg

SEQ ID NO: 1656 - DNA, 5397 bp, Artificial Sequence
  chemically treated genomic DNA (Homo sapiens)
tttgagaatgaaaagagatgaatagggtttatagtttggattttttaaggtgattatcggggggtgatgatttttttatagttagtgatgaggttttttttttttttggggtttgtttttttattttttttgtttaggttttgttgagtttttggtagggatggatttggttaaggaagatattaaagtatgagggtttttgtaggttatttatgttgattatgttgtgaaatattttttagtggaaaatggggagttgtttttttttttaatttgggttttggttaggtttgtggttgttgggttggttttttttgtttgcgatttttaagttggagaatatttaggggatgtggttaaatttatttatatatagagtttttagttgtttgggtttttgtttttaagttagagtataaaggtggataatagaatttatagtatgtgggttgttaggttttttttttatttttgagagttttattataaaatttgttttttaagtaggaaataggtatagtgtttatatagtatatttttttgtagaatatttaggttgtaggaatatttaggatttttgaggggagtatagaatttggtaaagaaaaatattaggtttgtaagaagagaaatgttttattggttaaggttatttattttgtatttagggagttttattgggtttttggtttagttttagataatgaagaagttattgttttagttgaggttggttaggttgatttaggttaatttgtttgttttgtaattttgtttagttttgagttttaggatttttagttagtgtttttggagtttgtagtcgagttggtgggtatatggatagagtggtaggtaaatatgttgtacgttttatttttttttgttttagtaggtttagttggaggagttagggtagtatttggaaggttatgggagagttgtagtttttgtttttggtagaatattattttgggtgatgtttggtaatttgtaatggtgattatgttaagtgttttagtgatatatgaagttttagttgttagggttttggtttgagtatttggattaggagggaatttttaattgtggaggtggtaatgatgggaatttagataggaaaattttttttggtttatttggaattggtttgaaaaattttaaattattgaggagtttggagtttttttagggagcggaagtttagataacggattttatttttaggagtaggaagttgggtagtgttaatttgtagtatggagttttttagttgttttagtgttgtttgttatattatgtggtgggtgttgggttaggtgtggaatgggggagttaggttagtgtaggttgggggtaggtggggcgaagttttagtaatttggttgtggggaggtagggttgttttgtaggtgatgagtaggaatagaggttaatttggatgtgtagggttttgtggttggtagggtagggtatggttttaggggaaaggtatatttgagttttgatttagagttgttatttattaattaggtggttttggttagttttattttttattttattattttgaaataatattaaaattatagaaaaattgttagtatcgtacgattttttttttttttgaatttatgagagtaggttgttaatatgaaattttaatattttaatattttaatgtgttttttacgtaaaggtatttttgtattataatcgtaattaagaaataaatacggatataataattttaaatagtttttaggttttatgtaaaatgtatataatgttttaatagtgttttttatagtaaaggattcgtttttgagttatgtgttttattcggttgttacgtttttttagggttttgaaatttataaagtttttttgttttttttttatttttatgatttgaatatagtgtgaagattataggggagttattgtgtaaaatattttttattttgtttgtttgtttgtttgtattgttttatagttagatttaggttttgtaatttcggtagaaatattatcgatattcggttgcgttttttttttattttattcggtagtatgtgattttagtttgttttaagattgatgatgttcgtgttgattatttaattaaggtggtgggtgttataatttgttattgtaaatttattttttttttgattttaattagtgattatgttgtggggacgtattttgggattattgtaaagattttattttttattacgttttttgttgttttttgattgatttgtagtaatgtggattcgtgagtgaggtttgttatcgatcgttagggggaattatgtattcgtttgcgtgttgtaagggatattattcgagtttgatgttgagataggtatagtttattagtatatggtattagtaaatttaaagaatgtagttaagaaatataagtttgttatttttagtattaagaattgttgtagtttttgttgagtttcgagtgtttaagttaggttattttgtcgcgtttatagttttttttttttgtttaggttttattgttttggtcggttcgtttttttttagtgttttttttatttttttaggggttttaatttttatgttgggttatttttttttgcggggatattttttttatattgttaggttttgggtgtttacgcgaagttattttagagtttatagttttattgtatttcgagttttattttttgtggtaggattttttttttatttagtgtgattgaaattaggaagacgacgttttttaagattgaaggggtatagagtgggagttatgtatcgttttaagaatagtttacgggggtttttgtagattcgagattttttttttagtgtttaagggatttttttttttttttttttttagttgtattgggtgttagtagtgggaagaggttgtttgtggttgttagagttttttcgtcgttttggattattgtagtattttatgaggcgtatagagagtaagtaaatttttattttatattttagttaattgaggttgataggggttatatggattgttaaaattatttagaaattttttttttagtttagttttttgttagaatttttttagagttagagggatgtgtttaatttatttgtatttggagataaagagatgtataaatagatttattaattatggatatattttaagattatttttattgttagaatttaaggggtagtttagttatattaagggaatggaagttgacgttttttttttttgatgtagttagtatattaagtaattatgtgtgtatgtattataaatatatgtatatatatatattgtgtgttgtatatttatatatatatttatattatattggtatatttaataaatgttattgtatttttaaaaagtataatataataaatttttttatgatttagaaatgataaattttaatttttattaatatagtttttttattttattattttgagtattttgagttttttaaattttagagaaatacgttatgttttattaaggttttgaggtgagggagatagttttttttattttgcgttttggaggaattgaaattggtagatggtagtaattatttttaatgaaataggtttaggaaaatatacgtgtatatatatatatatatatatatacgtatatatatatattgattttgtattaataagattatattgtagatatttttttataataagtgtttttttttatatattttagttatatttttagattgatatatagggatataattgttaattatagtttttttttggggtttgtttgtttttaatttgggtgatttattttttattttttttaattttaaaaaattttttatttttaatggatatataattttatatatatatgggatatagtgagttattttgatatatgtatgtaataattaatgattaaattagggtaagttgtatatttattattttaaaagtgtattaatatttagtgataagaatatttatagtttttttttttatttttttgaatgtatataatgagttattgtttattatggttattttttagtgttttagaaggttagaatttattgtttttgtttagttatgattttttgtttattgattaagttttttttattttttatttttttggtttttttagtttttagtatgttttgttttattgtttacgtttgtgagattaattttatttttagtttttatatatgtgtgagaagatgttgtgtttaattttttttttttggttttattttatttaatataatggtttatttatgttgttatgaatgataggattttatttttttttagggtcggatagtattttatggtgtatagttatcgtattttttttatttatttatttattggtagatatttaatttgattttatatttggttattgtgaatagtattataataaatatgggagtgtagatatttttttaatatattgagttttttttttttgaatatatttttatgaatattgagtagtggaattgttagattatatggtcgttttattttttgttttttggaggaattttttttttgttttttataataattgtattgttttatatttttattaatagtgtataagagtttatttttttttgtatttttgttagtatttattagttattgttttattaataagagttagtttatttggggtgagatattttattgtggtttgattgatattttttttaggagtagtagtattgagaatttttatttttatattatatttattattttattttagatagggttttgttttgttatttaggatagagcgtagtgatataattttagtttattgtagtttttattttttggatttaagtaatttttttaatttagttttttgagtagttgatattataggtatagattattatgttcggataattttttatttttgtaagtatgaaattttattatgttttttaggttggttttaaatttttgggtttaagttaattttttattttagttttttaaattattgggattataggtaagagttatcgggtttggttaagtatttttaatatatttgttggtaatttatatgtttttttttaagacgtgtttgtttagattatttgtttattttaaaattgtattatttggatttttttgttgtagatttgtttgagttttttgtgtatataggatattaattttttattggattaatagttgtaaatattttttttaattttgtaggttttttttttatattgttgattgttttttttgtagatgttttttagtttgatataattttatttgtttattttcgtttttgttgtttgtgtttttgaggttttttataaaatttttatt

SEQ ID NO: 1657 - DNA, 5378 bp, Artificial Sequence
  chemically treated genomic DNA (Homo sapiens)
aatagaaattatatttaaataaatttaattacgaagagtggggataggagaggggaggaaagttatgggtttttaggtttaggttttaagtagagttagaagaatgtagtttaaaatataataaaaggaattaaaatgaattttgttttttcgtgtatttttgtaaggatataaaagagattttaatattaattgttttatttggttgatttttttttttttagttttaggtgttttaagttttatatttgggagttttatattttttatagttaagaagaaaaataagatttttttttatttgtagtttggtttgttttttttttttttttttttttttttaattgtgatgaaatatataaatatagataatataatattgttttaattatttttaagtgtatagttcggggacgttaagtttatttatattatgtaattaaaatcgtcgtttatttttagaattttttattataggatgaaattttgtttttattaattagtattttcgcgtttttttttttttagtttttggtaatttttgatttattttttgtttttacgagtttgattattttgtatattttttataaatggaattatataatatttgtttttttgtgattggattattttattgagcgttatgtttttaagatttatttatgttgtagtatgtgtttaaattttttttttttttttttttatttttatttattttagacggagtattgttttgttgtttaggttagagtgtagtggcgtaattttagttttttgtaattttcgtttttcgggtttaagcgattttttagttttagtttttcgagtagttgggattataggtatgtattattaggttcggttaatttttgtatttttagtagagacggggttttatcgtgttggtaaggttggtttcgaatttttgatttcgtgatttgtttattttggttttttaaagttttgggattataggtatgagttattgcgtttggttgaattttttttttaaaaaggtttaataatatttttttgagtgtgtataatatattttgtttatttatttattcgtggatgaatatttgtttttattttttggttattatgaataatgttgtaatgaaaattgatatataaatatttgtttcggtatttgttttttatttttttgaatacgtacgtaggagtggaattgttgggtttgaaagtaatttaatatttaaattttttagaaattgttttgtaaaaattattttttatataggtttttatagtgattgtattattttatattttcggtagtaaagtatttagggttttaatttttttatatttttttaatatgtattattttttggttttttataatagtcgttttagagggtgtgaggtatggttttgatttgttttattttgtattaagtggttaaggatttttttggtaatgtattattaatttgattttgattttttattttataattagttgatttggtttttattttttaatttaaaaatttaattggtttagttaagtatgtagatggatttttttggggtttggtgtgtttatttttggtttagtcggttttggttagggggatgaagggaggtggtttatgaggtttttttttttagggatgtggtgcgtggttttttagatagtattattggggtaggtaggggtagatttgtgtggtgtagatttatggatataatgttaggcgggatatgtgttttttatattttgatgataaggaattggtttttagaaatatgagtttgtttatatattaagagaagaggtattttttgtgaataaatttgagttaattaagttttttatttttagagtagttattagaatgtttttttttttttttttttttttttagaatgtttttttatttatttttagtgagaagtaggtaggttaggagaagaatcgttagtagaggtagatttatgtaggttttttttgtagttacgttttataggaagttcgatttttattagagattgtggtgaggatggtattaaagtaaggggtgttaggagattgtttattttagggattaggagttaggatatttttagtttagttaatagttggttttttgtgttttttttattggtgtttttggatggtagttttcgatagttagatattaatttttttttgaggttttgataaaagttacggatttattatttagaaaattttatataagtatttggttttgtatttagtattatggtttttagataatgttatgtgtttattaattttatttttttttttttttgggtatgtaggcgtattgtattttttagttttttttggggttagtgagggtgtgagattgaattgagagggaagaaatgacggatattatttttaggtttcgtttttaaaattttttttattattttttatttttttttttttttttttgttggttagatgtaggggatttaggggaggattttgagttttttaagtaagtagaagggggatttcgagtatttgaatgacggtacggatttgagttttattattcggagttaatttgtgttgtattgtaatcgagtaagaaggaaatatgtgggttaggcgcggtggtttatatttataattttagtattttgggaggttaaggtaggcggattatttgagattaggagttcgaaattaatttggttaatatggtgaaattttatttttattaaaaaaatataaaaattagttgggcgtgattacgggtgtttgtattttttagttatttaggaggttgaggtaggagaatcgtttgaattcgggaggtagaggttgtagtgagttaagatcgtattattgtattttagtttgggtaatagagtgagattttattttaaaaaaaaaaagaaggaaatatgtggttaggtatagtggtttatgtttgtaattttagtattttgggaggttgaggtgggtggattatttgagtttaggagttcgaaacgagtttgggtaatatggtaaaattttgtttttattaaaaatattatagaaaaaaattagttagacgtggtggcgtatgtttgtggttcgagttattttggagatttaggtgggaggattatttgagtttgggagatagaggttgtagtgagttaagattacgttattgtattttagtttgagcgttagagtgagattttatgttaaaaaataaaaaaaaaaagaaaaagaaatttgtatgaagtttatagattggagggttttttgttatggtagtgggattattttgattaatacgtttttggaggtagttagttataaatttttatttttttgcgtagtttgttttgattgtatttaaacgagatattattcgttgatttgtttaatatatattgaataataagtacgttttagttttatttttttgaggttttattaaggttatttagtttttagtttttggttatttatttttatatagttttggtggatttttatgatggtagttgtgtttgttgtattgataaggatttgaggttaatagaaattatataaatttttgggtaattttgagtgtggtattagttattttgtatttaattttttttttttttttttttttgagatagagtgttatttggttaatatggtgttaggagattgtttattttagggattaggagttaggatatttttagtttagttatatgtttaatggttatatgtttaatggttttatatttttattttagagtgtagcggtgtaattatggtttattgtagtcgcgatttggtgggtttaagcgatttttttgttttagttttttgagtagttgggattagagatatgtattattatataaggttaattttttaatttttttgtagttatggagttttattatattggttaggttggttttaaattttagggtttaaaggatttttttttttcggttttttaaagtgttaggattataggagtgagttattatatttagttttatttttttttattatggtattaatttttgttcgtttatttataaaagtattgtagtgtttttcgagtatagaggtttgtgagtttttattagggagagggtttttgtagagattagataaattgattataatggttggggtggtggtaatgtgttaatgtttttttttttttatttaagatattttttgttttttttagtttgtgagttttttttttagtgtgttttgttagtgggggttttgtttgagagtttttgtagttgtagaggatagtttttttttgttgaattatcgtagttatgttttagtttttattttggaggggtttttaggggttatgggtagtattttttgtatagggttgtttgggagttattttagggttatagaaattttgtttttgatttagggtattttgttttttgttttgtgtaaatgtttttttgattaatgtaaattatgtgtttatagaattagaagatttttttaggggaaaaggtaaggaggtggtgagagtgttttgggtttgtttttttagggtttgttttgggttaagagttaggtaggaagtttttaagagtattgtttaagagtagagggggtttgggaggtttagggaggggatgggaggggaatatttaggttgtttttaattagatgttttttattttttttaattttttttttacggtttggagaggtgggattaggtatggaggtttgagagtttttggttggaggaagttataagtttaggaatatgggagtttgggtagggggtaaaggaggtaggaataggttattagttaggataggtggtaaggtaggtaggagtgtttttgttgggaaaaggtgggattaagtatttggagggttttttagagtaaagataaatattgaggtcgttgttatttttatagagtttttacgtttcgtttagttataaggggttatgtattaagtagggtatttaggttgtagaggtgttatggttgagttatatttgttgtagtggttgttgttgttgttgtttacgttttgtggtttaggtattggtgagttttttttagtttttttttttttaggtagttttattatttattgagtattgttttgtgttaggtattaatttaagtttgtttttattttaaagataaggtagttggggtttagagagggtttagagtttatttaaggttatatagttggcgggtttaggagtaggtggaatttagagttgtttgacgtttatatgtttaatggttttatatttttagtaaaattgggtttagagggtgggtgaaattatgatgttaggtgtgtagtttggattttgattaaggttgttttggttttaaattatagt

SEQ ID NO: 1658 - DNA, 5378 bp, Artificial Sequence
  chemically treated genomic DNA (Homo sapiens)
gttgtggtttggggttagagtaattttaattaggatttaggttatatatttggtattatgattttatttattttttagatttagttttgttgggagtgtgaggttattaaatatgtggacgttagatagttttgggttttatttgtttttggattcgttagttgtgtgattttggataagttttgaattttttttgaattttagttgttttgtttttaaaatgaggatagatttgggttaatgtttagtataaagtagtgtttagtgagtggtggagttgtttaggagaggggaggttgggggagatttattagtgtttgggttatagagcgtgggtagtagtagtagtagttattgtagtaggtgtgatttagttatggtatttttgtagtttgggtattttgtttggtgtatggttttttatagttgggcggggcgtgggggttttgtaggagtggtagcgattttagtgtttgtttttgttttgaagagttttttaggtgtttgattttatttttttttagtaggaatatttttgtttgttttattatttgttttggttgatggtttgtttttgttttttttgttttttgtttagatttttatgtttttggatttgtggttttttttaattaggggtttttaagtttttatatttggttttatttttttaggtcgtgggagggaggttgaggagggtggagggtatttggttgggggtagtttgggtgttttttttttattttttttttgggttttttaggttttttttatttttgagtaatgtttttgagagttttttgtttggtttttaatttagggtaagttttggaagggtagatttaggatatttttattatttttttatttttttttttggaaaaattttttggttttatggatatatggtttgtattagttagaagagtatttatataaaatagaaaataaaatattttgagttagagataagatttttgtggttttggagtggtttttagatagttttatataggaggtgttgtttatggtttttggggatttttttagggtaggggttggggtatagttgcgatggtttagtagaaagaaattgttttttgtagttgtaggggtttttaggtagggtttttattggtagagtatattggagaaaaagtttataggttgagggagatagaggatattttgagtggaagaaagagagtattagtatattgttattattttagttattgtgattaatttatttgatttttgtaggagttttttttttagtggaggtttataggtttttatattcgggaagtattatagtgtttttgtgggtggacgggtaggaattagtattatgatgaaaagagatggggttgggtgtggtggtttatttttgtaattttggtattttgggaggtcgaggagggaggattttttgagttttggagtttgagattagtttggttaatatagtaagattttataattataaaaaaattaaaaaattaattttgtgtggtggtgtatgtttttggttttagttatttagaaagttggggtaggaggatcgtttgagtttattaggtcgcggttgtagtgagttatgattgtatcgttgtattttggaatgggagtgtgaggttattaaatatgtggttattaaatatgtgattgagttgagggtgttttggtttttggtttttgggatgggtagttttttgatattatgttggttaggtaatattttgttttaaaaaaaaaaaaaaaaaaagaattagatataaggtggttaatgttatatttaaggttatttaaggatttatgtagtttttgttggttttaagtttttgttagtataataaatatagttgttattatgggagtttattaagattgtgtaaaaatgagtaattaaagattgggaattgagtgattttggtagaattttaggaaggtggaattgaaacgtgtttgttatttagtatgtattaaataaattagcgagtggtatttcgtttgaatataattaggataggttgcgtaagagagtggggatttgtggttggttgtttttaggggcgtattggttagggtggttttattattataatagagagttttttagtttatgggttttatgtaagtttttttttttttttttttttgttttttgatatggggttttattttggcgtttaggttggagtgtagtggcgtgattttggtttattgtaatttttgttttttaggtttaagtgatttttttatttaagtttttagagtagttcggattataggtatacgttattacgtttggttaatttttttttatgatatttttggtagagatagggttttgttatattgtttaggttcgtttcgaatttttgagtttaggtgatttatttattttagttttttaaagtgttgggattataggtataagttattgtgtttagttatatgtttttttttttttttttttgagatggagttttattttgttgtttaggttggagtgtagtggtacgattttggtttattgtaatttttgtttttcgggtttaagcgatttttttgttttagttttttgaatagttggggagtataggtattcgtgattacgtttagttaatttttgtatttttttagtagagatggggttttattatgttgattaggttggtttcgaatttttgattttaggtgattcgtttgttttggttttttaaagtgttgggattataggtgtgagttatcgcgtttggtttatatgttttttttttattcggttatagtgtagtataggttggtttcgggtggtgagatttaggttcgtatcgttatttaggtgttcggagttttttttttgtttgtttggagggtttagagtttttttttgggttttttgtatttggttaatagggagaagagagaaagagtggaagatggtggaggaggttttagggacgaggtttgggagtggtgttcgttatttttttttttttagtttagttttatatttttattaattttagggaaagttgggaagtgtaatgcgtttgtatgtttaggagggaagggagatggagttggtggatatatagtattgtttaaaagttataatgttgaatgtaaaattaggtgtttatgtggggttttttaggtagtgggttcgtggtttttattagaattttaaagagggattggtatttgattgtcgagagttgttatttaagagtattaataaaggagatataaaaagttagttgttgattgagttgagggtgttttggtttttggtttttgggatgggtagttttttggtattttttgttttgatgttatttttattatagtttttgatgaaaatcgggttttttgtgaagcgtggttgtagggggaatttgtatggatttgtttttattgacggttttttttttggtttatttgttttttattggaaatgaataaagaaatattttgggaaaaaaaaaaaaaaaaaaagaatattttgatagttattttggggatggagaatttgattaatttaagtttatttataggagatgtttttttttttggtgtgtggataaatttatgtttttgagagttagttttttgttattaaaatatagaagatatatgtttcgtttagtattgtgtttatgggtttatattatataggtttgtttttgtttgttttagtaatattgtttagaaagttacgtattatatttttggaaagggaagttttatggattatttttttttatttttttggttagagtcgattggattagaggtagatatattagattttaaaagagtttatttgtatgtttggttgaattaattggatttttaaattgggagatgagagttaagttagttgattgtggggtgaaggattaaagttaagttaatggtgtattgttaagggggtttttggttatttaatgtaaaatggagtaaattaaaattatattttatattttttaggacggttattatgaaaaattagaaaataatatatgttgagaggatgtggagaaattggaattttaggtgttttgttgtcgagaatgtgaaatggtgtagttattgtggaaatttgtgtggaaaatagtttttataaaatagtttttgaaaagtttgaatattgaattatttttagatttagtaattttatttttacgtacgtatttaagagaatggaaaataggtatcggaatagatatttgtatgttagtttttattgtagtattatttataatagttaaaaggtagaaataagtgtttatttacggatgaatgggtaaataaaatgtgttgtatatatttaaaggaatattattgagtttttttaggaaggaaatttagttaggcgtagtggtttatgtttgtaattttaggattttgggaggttaaggtgggtagattacgaggttaggagttcgagattagttttattaatacggtgaaatttcgtttttattaaaaatataaaaattagtcgggtttggtggtgtatgtttgtaattttagttattcgggaggttgaggttggagaatcgtttgaattcgggaggcggaggttatagagaattgagattgcgttattgtattttagtttgggtaatagagtaatatttcgtttggggtgggtgggggtaggaaaaaaaaggaaagaaatttggatatatgttataatatggatgaattttgaaaatatgacgtttagtgaaataatttagttataaaaggatagatattgtgtgattttatttataggaagtatgtagagtagttaaattcgtagggatagaaagtaggttagaggttattaggggttggggaagagggaacgcggaggtattggttaatggaaataaagttttattttgtgatgaaaagttttggagatgaacgacggttttggttgtataatgtgggtgggtttgacgttttcgagttgtatatttaaaaatggttaaggtagtattatgttatttatatttgtatattttattataattgaaaaagaaaggggaagagagagaaataaattaggttgtaggtggagaagagttttgtttttttttttgattgtggaaagtgtgagatttttaagtgtgggatttgagatatttggggttgggaaaaaagagattagttaaatgggatagttgatattaaaattttttttatgtttttgtagagatgtacggaagagtagaatttattttagttttttttgttgtattttgggttgtatttttttgattttgtttggggtttgagtttaaggatttatgatttttttttttttttttatttttatttttcgtagttgaatttatttgagtgtagtttttgtt

SEQ ID NO: 1659 - DNA, 8781 bp, Artificial Sequence
  chemically treated genomic DNA (Homo sapiens)
aattaaataaaaaataggttgatagagggtatagtgttggggaatgagataaatttttagagatttttatatttttagttttttagaaggtagtatttttgtttatatgtttaatatattgttattataattagtataataaagttattatataaaagttatttatatagtataataaagttattatataaaagttatttatgattaaggaatttatatagagttgtgatttacggaaggtatttaaaattgaagttaaatgattatatataatatatagttatatttttaaagggggaaaaaattttatttaaatgagagtaagtttaaaagtaagaagtaacgggttttttagatgagaagaaattagtataagtattttggaagtacgaaaaattagtattttgatatgtttaaaggattatattagttttttagtaatggattttaattaatataaaaattttgaaataataaataaagaatttaagatatgagttgtaaggaagtttaatgagatataagagaaagttgaaaattaatataaggaaattagaaaaataatttaggatattaatgaaaaatttataaaagagatagagattaaaaaataaaaattaaatagaatttttagaaataaaaatttattgaaggaattataaaatatagttgaaatttttagtaaaagattagattaagtagaagaaataattttagagtttgaaggttagttatttgaattaatttagttagatagaaatatagaaaaaataaatttttaaaaatgaataaagattttgaaaaatatagaattatataaagttattaaatatataatatatagatatttttgagggagaagaaaaaaaattaaaagtttggaaaatttatttgagggaataatttaggaaaatttttttggttttgttagagaattagatatttagataggagatgtttagagaatatttggaagatgttttataagagaaattttataaaggtatatcgttattagattatttaaagttaatgtgaaggaaaatattttaaaagtagtaagagagaaatgtttaatttatataggaaaatttaatagattaataatggattttttagtagaaattttataagttagaagagattggggttttatgtttaatttatttaaataaaaattttgttagttaagaattttgtattttgttaaattaagttgtataaatgaaggagaaataaagttttttttatataataaatgtaaagggaatttgttattataagattagtattataagaaatgtttaaagttttaaatatggaaatgaatggataatattttttattataaaagtatattaaagtgaaaaatttatagattatataaagtaattatataattgagattaaaaagtaattgggtaataattattatgataggaataaaatattatatattaatattaattttgataataaatggagtaaatgttttatttaaaagatatagattggtgttgggtatgatggtttatatttgtaattttagaatttcggtaggttgaggtaggagaattgtttgagattaggagtttgagattagtatgggtaatagagtgagattttatttttgtaaaaaattaaaaagagaaattagttaggtgtgattatgtttatttgtaaagaggttgaggtaggataattatttgagtttaggagtttgaggttgtagtgagttataaatgtattatggtattttagtttgggtgatagagtgagattgttttaaaaaaaaaaaaaaaatatatatagattaaaagattggataaaagtagtattagtttaggggttttaattagttataagaatagtgtataagataaatattagttaagatggtagggagaataagtttgaataaggtaaggtagaggtttgttaagggaaatttattttataaaagataagtaaggtaggggttttttgaggtttagagtagtatgtaaaagagtaattttttttaggtggtagttttttagttgttgtttttatatgttgttgtttttgtagttattttatttgttttatttttgtttaggtattttaagtagtttttagtttttttttaatatttgggtagtgttgttgagataaaggaagaggagaagtggatatagtaggttttggtttttaagatttgtagttgtgagttttttttgtaatcgttgtaggttattgtgtaatttgttggtttttggatttttgatttttagatatttataaaatatagatattgatgatgttatttaatttatagagttgtagtgagaaaggtgtagatgagtttaaggtttgatagtgttttgtaaattatagtgatggatgtgtatagtattgtgaatattagtggtaggtttttagaacgtaggtggggataagagtgagtgagttaataaagaagaaaattgttttattttttgaagggagtttttggggttgggtagtttagggtatagggtaggtataaatagtgagtgtttgttaagtaaaggttagtttgtttggagtttttggggtttaataaaaagaaatttgtaagtgtttttgtttttgttttttttttattttttttatattttataaatatttttttgtcgatttgggtaatttaatttattggtgtggagggtttgtgtagttgttttggtttaggaggtatgggcgtaggaggtggggagtataggaggttttatggtgtttttttgttttttatttagtggttttagtttaggggaggatttgttttttgagttgggggtgtatagggtggaagagtgggtgtgatattatttagatttgggatgttatagtgtggaagttttaggtggaaaaatgtaatgttaatttatttttaggtttttttttgtattgatttttttagaaaggatagtggaagagagataaatttaggtatttataggttggggttttaaatttattttggtgttaatagtttgtggaaaagtagggtaagtttgttttttttatagttttaggtttttattttaaaaaatatatttattggagtaggtttttgattttttaatttatgtttagaggagatggtttttttaatgaaattgtattttgaaagtttagtataaattgggtattgtaggggttgagggggattataattttgtttattttatttgttgttttagttaagatgttttatttgaattttgggtttgaaaattcgggtttgttttttttaagtgttttttaagttatagtggttgttggtgttttttgtgttattttgagtttgtagatagaatgtttattgttttttatttttttttagaattagatatagggtttgaggggtgagggagttgcggggtatagaataatgtttttgttttggtttgggtttggtttttgttgtttatgattgagtttttgttagaataggtgtaataaggtagtcgttgttggtagtgagtttatttaggtgtttttagagattattaggatatttaaggaagtggtgattttaaaattgaaagaggttagtgagaaataggggttatttatagtttagaattattagtagttaaagaagaaggtatttttttgggtaggaagttttttatttgttattattttagttggtttggtgatttttttttttgtataagtttttttggttttgtttttagtttttgcgaatttgattagttttttttatttttataattttacggttttttattgagagaaaagatatttaaaataggtaatgttttaggttttgtttttattttggttttagtttttgattattttagatagtaaatgggtgttttgttgggtagttgtttttgtttatttataatattagttttttgtttgattgagtttatttggtatgttttttttttatataagatttttttttttttttgagatggagttttatttttttgtttaggttggagtgtagtggtacgatttcggtttattgtattttttatttttcgggtttaagagatttttttgttttagtttttcgagtagttgggattatagtacgtattattatatttggttaattttttatatttttagtagagatggggttttgttatgttggttaggttggtttcgaatttttgattttaagtgatttgttcgtttcggttttttaaagtgttggggttataggtatgagcgattgtgtttagattttatatattttttttttaaatttttttaggttttagaagaattttaggtgttttaggattttttttattgttagtttagtgtttttgaaaatttttatttgggttttttttgggatttttttttagagatagtatttgttcgaggaatggtaaattgttaggtaaatgtgtattatatttttagtttgcgtttaggaaggatattattaagtatttaggattttggttgtatttttagattagtattattagtattagtgttagtttatgtaaggtagtaagagagaagaaataggtttgttttgtttgagttaagttagttgttttagtggtatagatagggagatggtttagggagtgggcggggggtgttttgtttagaggtatttaatgaattttttttgatgtgatagatggttttagtgaggaatgttatattttagttattgtgttaaatttagtgtttaagggaaggtataagaagggaagatatgagtatttgggaatgggggatgttgttgttaatttatgttagagttttagttgggtaatttatgttttttatttagattttgtgttttttttgtttttaaattgtttttggatttttgttgttttaggttttatagtagaggatagaaggagggaatgggggttttttgttatttttagaagttgagttaagttttaaattatgtttatgaagtataagtatgttttttttttttttgtttatttttttaggttatgttgtttttttttttttttgtattggttttgtttatatagtttttgggttatttggaagtagaaatgaagatttatttttatagaataacgtttagtgtttgtattttggttatgtgtagtttagtggagagtggtttgtttggtcgcgatggacgggatgggagagagggttttcggggcgagaagggggatttaggtagggtggggttttgggtttattttgttggggaggaatggttattggaattgtaattagtttagtaattttgggtattttgttatggaagtttggagacgtgttttttttttttaagaaggcgagttttatattgttttattagttggtaaataagtggttgtgttgagtttttatgtgttttttttagtatttaattgttttagttttttttttaggattttcggattttttttattttaagagtaagtaaatagtggtaaattattgatatttggggttttttagagttttgtgttagtagttagtagttgtttattttaattaaatgatgtttgtgtagggtattaaatattttaaatatttaattaaatattattgtatgaagggtgggaaaaaaatggggttttatggttttatttttaagtttaattaagaggatttgttttaatatattatacggggagaaaaggtatttatatttttttgtttatttttgtgtttgggtatttattggagtagtttatttaatttttttaagagttttataggggatatattaatttttttcgataggtaagaaaatgatgatgtagagaggttaagtagtaattattttggaggtggaaaggacgaaggttttgtattagattggtttgggttttatttttatattgggagagttttttagtgttattgagtttgttttttttatttggtaatgggaatgatatttattatttagtgatgaattattgagttaaaggttttatttttttttgagtttttgggataaagttgtattttttgttgtatttaataggtgaattattttgagtttagtagaggtattgatgagtaagggaattgtttttggaaatattgtttttcgtttgtagggaaagatttaggttttattggtaagaaaggagaattttattagttagtagtatgaattgagggatttttatgatattgggtagggttttaaagggattagatatagtttttaattttttggaaagacgaagtaatatttttaggttttgtggggtaaggggtaagtaagtatttgtttattttttatagatagaaagtggtttttaacgtgaatgggatggggtttggggagggttgtttaggggggattttagaatgggggtggggtttattttggtagtttttttttagagatttttaatttagtttggtttttagtggggtttcggatttgaattttagggattttttttataatggttttgggagtttgttgtttgaagtatggttaaggttttttttttttatatatgtgttttaatttatgtatattttaggtttggttttgggttagtatttggatataggatagaatacggtggggttataggatgaggttttattttggttttttaatcgtagtttttttagttattttattgttataggtttgagggttgggtttttttagaatttttagtatttttagaatttatttagaataggtttttgtgggttaaagtttgtgtttgtgataattatttttgtagagttggaagtatgtggtttttagaatttgttacgaggaaaattggggtttgaaagaagagatttttgagtaggggtggagggtgaagtttgagttattttggtgatattttcgacgtattatggagggtaaatatgatttagattttgtttttgtggggaataattttttattttttagtatttttagtatttttgtttagtaatatttcgtgggggagttttattagggatgttcgttttttttggataaattatatattttatagtagtttatgagtttcggtaggattattttgtatttttgtatttttgttgtttttttgaatttggtgttgttatttttatttagttttaattatatagtttttttttggttttcggttacgtttagttttttttttttttaggggtttgttatttgttttttttatagttgtttttgtagtttatattttattttttttaggattttattttcggattatttttttagtgaggtatttttcgattattttattaaaaatagattttatttttaatatattttatgttttatttttttttgtggtattatatttaatatattatatgttgtatatttttaatgttttattatttgtttttatgagatagagttgaagttttttagagaagggttgtttatttttagtatttaggatagtgtttggtatgtattagaggttttagagatatttatggagtgagtgaatggaagttggaaggggtggaggaattttaggagttaaaataggtaaaaggttgggttataaagttttattttaggtggtattcgggtgtaggtttaggtttttgggtatattacgatatatagtgagtgttttgaaaggtatgggtgtagtatttggggaggtgttttttttttattttggtgtttttatggtttttatagtttgtgtattaagaataagtgggttttaatatttttttttggagagtgatattttttttttggtttatttttttgttgttgatttggtttgggtgaagtttaagtaaggttttatatggggttagggtattttgttttgaggaaaatgtgttgttgggtgttagaggtggggtttattttataattttttgtgtttttattttatttttaataaggattgtaattagtggttggatttagggtacggaattttattgggtatggaatttagatgtttttaggtggtggtgttgttgggatacgttagtatagatttttttatttatttagtaaatttatttataattatatgtttattttttatggaggtttggttttttttgttacgggagtatggtttttaagtttgaaatgttattttttttttgtaaatttttttcgattttttttgtttttaaaattttattttttttttgaagaagaaagttttgagtgtgtgagtgttggggtggggacgtttagatgagatgagggatattttatgtattgtttttttttttttttgttttatagtgtattatgaattttttgttgagtaggatttgaggttaagtttagatttgtattttgtttagtgttaggtataaagtagatgttgtatagatggtttttagtgaataaataaatgagtaaatcgattaataattgaatgaataagttagtattatttgtttggtgttatttttggttggtttttttaatatatatatatggaatgtaagaagtttatgattataggtaagagttgataaattgtttgttattaatatagtggttttggggtaggggaaggagtatcgtatagaaggttaggtaggttttggttttaattcgtttttaattttggaaggttttttttttatttataaaatggggatgttgatatttattttttggattattattgggtttgggtgtgtgacggtggaagttttatgttttgtagaattttaaaggaatgttaggggttgattttgtaggaggttggttttttttgggtttagggttaggtttttgtttattttttttgttgttatagg

SEQ ID NO: 1660 - DNA, 8781 bp, Artificial Sequence
  chemically treated genomic DNA (Homo sapiens)
tttgtagtagtagaagaaatggataaagatttggttttagatttagaaagggttagttttttgtaggattagtttttagtatttttttaggattttgtagagtatgagatttttatcgttatatatttaggtttagtggtgatttaggaaatgggtattaatatttttattttatagatgaggaagaagttttttagagttggaggcggattaaagttaagatttgtttgattttttatgcggtgtttttttttttattttaaggttattgtattgatggtaggtaatttgttagtttttatttgtgattatggattttttgtattttatatatatatattagggaagttaattagaaatggtattagataggtggtgttaatttgtttatttagttattggtcgatttgtttatttatttgtttattaagagttatttatgtagtatttattttatatttagtattaggtaagatgtaaatttgagtttagttttaggttttgtttagtagggggtttataatatattgtgagataagggagaggaaggataatgtatgaagtgttttttattttatttgagcgtttttattttagtatttatatatttagagtttttttttttaaagagaaagtgggattttaagagtaaggagaatcgagggagatttgtagagaggaggtgatattttaggtttggaagttatgttttcgtggtagaggaggttaggtttttatggggggtgagtatgtggttgtgggtaaatttgttggatgggtggaagaatttgtgttggcgtattttagtagtattattatttggaaatatttgaattttatgtttagtggaatttcgtgttttgggtttagttattggttatagtttttattagggatgaaatggaagtatagagggttataggatgggttttatttttgatatttaatagtatattttttttaaggtaggatgttttgattttatgtggagttttgtttgggttttatttaggttaagttagtagtaggaagatggattaagagaaaaatgttattttttagaagagagtgttagagtttatttgtttttggtatataaattatggaggttatgagagtattagggtggaggaggggtatttttttaaatgttgtatttatgttttttaaaatatttattgtgtatcgtagtgtatttagagatttagatttgtattcgagtgttatttgaagtggagttttatggtttagttttttgtttgttttgatttttaaaatttttttattttttttagtttttatttatttattttataaatatttttggagtttttaatatatgttaggtattgttttaaatattggggataaatagtttttttttggggagttttaattttattttatagaaatagataataaaatattaaaaatgtataatatatgatatgttagatataatgttatagggaaaagtaaagtatagggtgtgttgggggtagggtttgtttttggtagggtggtcggggagtgttttattgagaaggtgattcgggagtaaagttttgaaggaggtgaagtatgagttgtagggatagttatgagaagagtaaatggtaagtttttaaagagggaggaggttgagcgtgatcgggggttagaaagaagttatgtggttggagttgagtaggggtggtagtattaaatttagaggagtagtaggggtataggggtatagggtggttttgtcgggatttatgggttgttgtaaggtgtgtgatttgtttaagggagacgagtatttttggtgggatttttttacggaatattgttgagtaggaatgttgaaggtgttgaggaataaggaattgttttttataaaggtaggatttgggttatatttattttttatgatacgtcgggggtgttattagagtgatttaagttttattttttatttttgtttaaagatttttttttttaagttttaatttttttcgtagtagattttgggaattatatgtttttaattttgtaggggtggttgttataagtatagattttggtttatagagatttattttgggtagattttgaggatgttgaggattttgagggaatttagtttttagatttgtaatagtggagtgattggagagattgcgattgagaagttagagtggagttttattttgtagttttatcgtgttttgttttgtgtttaagtattgatttaaagttaggtttggaatgtgtatgggttgaggtatatatgtggggaagggaggttttgattatgttttaggtagtaagtttttagggttattgtgggaaagatttttgagatttaaattcggggttttattggaggttagattgagttgggaatttttgagaaagagttgttaagatgaattttatttttattttgggattttttttggatagttttttttaagttttattttatttacgttgggagttattttttgtttgtaagggataggtagatgtttatttgttttttattttataaagtttggggatattgtttcgtttttttagaaagttaaagattgtatttgatttttttgaagttttgtttaatgttatagaggttttttagtttatgttgttggttgatggaattttttttttttgttagtaagatttagatttttttttataagcggggagtagtatttttagggataatttttttatttattagtatttttgttaagtttaagataatttatttattaggtatagtagaaaatgtaattttattttaaagatttaagaaaaaataaagtttttggtttaatgatttattattgggtggtagatattatttttattattagataaaaaaaatagatttagtgatattgaggggtttttttagtgtggagatggagtttaggttagtttgatgtagagttttcgttttttttatttttagaatggttgttatttagtttttttgtattattatttttttatttgtcgaaggagattaatatgttttttgtaagatttttgggaggattaaatgaattattttagtgaatgtttaagtataagggtggataaagaaatgtgagtgtttttttttttcgtgtaatgtattagagtaaatttttttgattaggtttgagaatggagttatggagttttattttttttttattttttatgtagtagtgtttaattaaatatttaaaatatttaatgttttgtataggtattatttaattggaatgaataattgttaattgttggtatagggttttagaaggttttagatattagtaatttattattgtttgtttgtttttgggataggaaggattcggggattttagaggaggagttagggtagttgggtgttggaggaggtatatgggggtttagtatagttatttgtttgttagttggtggagtagtgtggaattcgtttttttgggaggaagaaatacgtttttagatttttataataaagtatttagagttgttgggttagttatagttttaatgattatttttttttagtaggataagtttagggttttattttatttgggttttttttttcgtttcgagggtttttttttttatttcgtttatcgcgattaggtaggttattttttattgagttatatatgattagggtgtaagtattgggcgttgttttgtgggagtaggtttttatttttgtttttaggtagtttaggggttgtgtgagtaggattagtgtagagaggaggaagagtagtatggtttggagaggtgaatagaaagagaaaagatatgtttatgttttatggatatggtttagggtttggtttagtttttagaggtgataagaagtttttattttttttttttgttttttgttatggggtttagagtagtaggaatttaaaagtagtttaaggataaggagggtataaggtttggatggagagtatgagttatttagttggaattttgatataggttgatagtagtattttttatttttaggtgtttatgttttttttttttgtgtttttttttgggtattaagtttggtatagtggttaggatgtagtattttttattggggttatttgttatattaagaagggtttattgagtgtttttgggtaggatatttttcgtttattttttagattatttttttgtttgtattattgaggtaattggtttagtttagataaggtaagtttgtttttttttttttgttgttttgtatggattagtattggtgttgatagtgttggtttgaaaatgtagttagagttttgagtgtttagtaatgttttttttgagcgtaggttgggagtgtggtgtatatttgtttggtaatttgttatttttcgagtaggtgttgtttttagagaaaagttttagagggaatttaggtgaaagtttttagagatattaaattagtagtaggagaaattttgagatatttagagtttttttaagatttgagagggtttggaaaagaagtatgtggagtttgggtatagtcgtttatgtttgtaattttagtattttgggaggtcgaggcgggtagattatttgaagttaggagttcgagattagtttggttaatatggtaaaattttatttttattaaaagtataaaaaattagttagatgtggtggtgcgtgttgtaattttagttattcgggaggttgaggtaggagaattttttgaattcgggaggtggagggtgtagtgagtcgagatcgtgttattgtattttagtttgggtaagagagtgagattttattttagaaaaaaaaagaagttttatatggaaagaggatatgttaggtaggtttagttaggtagaaagttagtgttgtgggtaagtaagagtaattatttaatagggtatttatttattatttaagatggttaggaattgagattaggataagagtaggatttgggatattatttgttttgggtatttttttttttaatgagaaatcgtaaagttatgagagtgaaaagagttgattagattcgtagaggttaggaataaagttagagggatttgtgtaaagaaaggggttattaggttaattggggtggtggtaagtggggggttttttgtttagaggagtgtttttttttttgattgttggtgattttgggttgtggatgatttttattttttattagttttttttaattttgaaattattatttttttgggtattttggtagtttttagaaatatttgggtgagtttattgttagtagcggttattttgttatatttgttttggtagaggtttaattatgagtagtaagggttagatttaggttagagtaagggtattgttttgtgtttcgtagtttttttattttttaggttttgtgtttgattttggggaagaatgaaaggtaataggtattttgtttataggtttaagatggtatagaaggtattagtagttattgtggtttgaaggatatttggagagggtagattcgggtttttaggtttaggatttagatgaggtattttagttggggtagtagatggagtgggtagagttgtggttttttttaatttttgtagtgtttagtttatgttaagtttttagagtataattttattgaaaaggttattttttttgaatatggattggaaaattagagatttattttagtaagtatattttttaaagtaaagatttgaagttatgagaaaaataggtttgttttgtttttttataggttgttggtattaggatgggtttagaattttagtttgtgagtgtttgggtttgttttttttttattgttttttttgaagaaattagtgtagaaaagagtttagagataaattagtattgtatttttttatttgaagtttttatattgtggtattttaggtttagatagtgttatatttatttttttattttgtgtatttttagtttagaaagtaaatttttttttgggttgaggttattgaataaggggtagaagagtattataagattttttgtgttttttattttttgcgtttatgttttttagattagaatagttatatagattttttatattaataggttgaattgtttaggtcggtagagggatatttataggatgtggagaaaataaaaagaaggtaagaatagagatatttataggtttttttttgttaggttttaggagttttaagtaaattagtttttgtttggtaggtatttattatttatgtttgttttgtattttgagttgtttagttttaaaaattttttttaagaagtggggtaatttttttttttattgatttatttatttttatttttatttgcgttttggaaatttgttattgatatttataatattatgtatatttattattatagtttgtagaatattattaggttttgaatttatttgtattttttttattgtagttttgtgaattaagtggtattattagtgtttgtattttatagatgtttagaaattaggagtttagagattagtaggttgtataatgatttatagcgattgtaaaaggaatttataattgtagattttaagagttaagatttgttgtgtttattttttttttttttttgttttaatagtattgtttagatattgggaaagagttgagagttgtttggaatatttgggtaggggtggggtaggtagagtggttgtagaggtagtagtatgtgggggtagtagttagggagttgttatttggaaagagttgtttttttgtatgttgttttaggttttagagagtttttgttttgtttgttttttgtgggatggattttttttagtagatttttgttttgttttgtttaggtttgttttttttgttattttagttggtgtttgttttgtgtattgtttttgtaattagttaggatttttgagttgatgttatttttatttaattttttagtttgtatgtattttttttttttttttgagatagttttattttgttatttaggttagagtgttataatgtatttatagtttattgtagttttaaatttttgggtttaagtgattgttttgttttagtttttttataggtgagtatgattatatttggttaatttttttttttaattttttatagagatggggttttattttgttgtttatgttggttttaaatttttggttttaagtaatttttttgttttagtttatcgaagttttgagattataagtgtaagttattatatttagtattaatttgtattttttaagtggaatatttattttatttattattaaggttaatattgatatgtgatgttttgtttttgttatgataattgttatttagttgttttttagttttaattatgtaattgttttatataatttgtgagttttttattttaatgtgtttttatgatgaggagtattgtttatttatttttatgtttagaattttaagtattttttgtagtgttggttttgtggtgataaattttttttgtatttgttgtatgggaaaaattttattttttttttatttatgtagtttagtttagtaggatataaaatttttggttggtaggatttttgtttaagtagattaaatataagattttaattttttttggtttgtaaggtttttgttaagaagtttattgttagtttgttgggtttttttgtatagattagatattttttttttgttgtttttaggatgtttttttttatattgattttggatagtttgatgacgatatgtttttatgaggttttttttgtaaagtattttttaggtgttttttgagtattttttatttggatgtttaattttttagtaagattagggaagtttttttgaattatttttttaaataggttttttaagtttttaattttttttttttttttttaggaatgtttatatattgtatatttggtaattttatgtaattttatattttttaaagtttttgtttatttttaaaaatttattttttttgtatttttgtttgattaggttaatttaaatgattggtttttaggttttgaaattattttttttgtttggtttagttttttgttaaaagttttaattatattttatagtttttttaataaatttttatttttagaagttttatttggtttttgttttttaatttttattttttttgtaaattttttattaatattttgaattatttttttgatttttttatgttagtttttaatttttttttgtattttattgagtttttttataatttatattttaaattttttatttgttattttaaaatttttatattggttaggatttattgttagggagttggtgtgattttttgggtatgttaaaatattggtttttcgtatttttagagtgtttatgttgatttttttttatttagagaattcgttattttttatttttgaatttatttttatttgaatgggattttttttttttttgaaggtgtgattgtatgttgtgtgtgattatttggttttaattttgggtgtttttcgtgggttatagttttgtatgagttttttggttatagatagtttttgtgtggtggttttattatgttgtatagatagtttttgtgtggtggttttattatgttgattgtagtagtaatgtattgggtatatgagtaggaatattattttttgaggggttgggaatgtggaagtttttgaaagtttattttattttttagtattatattttttgttagtttgttttttatttggtt

SEQ ID NO: 1661 - DNA, 9646 bp, Artificial Sequence
  chemically treated genomic DNA (Homo sapiens)
ggcgtttttattttttatttttttagttttgttagttaaatgtaatggtaaggttatggttttgtgaaaatttttcgaggaggagtaagtttaggatatattaagttattgtagagatatagtggatatggtttattttgtaagatgtttttaagtatattaggagagggatatgggatagtacgagatagtttttaggatgagtgatgttgaaatagattttttttagtatttttaataaatatttattggatttttagtgtgatataattatttgttttaagtatggatagaattaagtttagtttttgttttttagaattttataatttatttaagaaagagaaaagtaattatattttaatgttgttagttagagtagataaacgttttgcggaaataatgattttttttttgtttttttttttattttttgaaaaaggattagggaaagttatagaaaggtaatgtttagagtttgttttggaaggatggagagacgtttattaggaagagaagagtaatttgaaataggaagaattatagtaaagaggtatgaaattgaatggaggggtagaaaatgataaatagtagtttaatgtgattatagagtagttagggaattagagataagattgtaaagatagttttggttttaattatgatgggttttatgtattaggttaaaggaattgatttttattttataggtagtggggaggtagtaaagggttgtaaatagaaaaattgtatgattgggttttttttatattatattggaggttatagaggttaagtatggaaggggtagaattggatttttgaaagagtatttagaagatatagagatgagggttagtttagtggttttttttggggtatggtatggtgagtattagatatcgatgttagagatatttagatgttagtaatattttttatttaatagaaaaaattaatttaatatttattagagttattaagtatgtattatatatttggtttttaatgtgtttaggatttagagtaatatggaaaataataatatattatttttgttttgtaaggaatttagtttaattagaagtaaattgtatatgtatgaaaagtaaagtaataagatattgtattaagtattaaatgggtgttatagtaaattagtgtaataatagttaaaaggaaagaggaataaggattggttgtgattgttaggaggaggtaggattgaggttggttttgaaaaatgggaagaatttggagaggtatgaatttatagataattaaaatagatggataaataaataaattttagtatagtgtgatgtgataatagtagtatgtttggggattatagagaggtttatataaattagaaatgtatgattgggagaaggtttaagaaaggttttttagaaaagatattttttgatttgagttttagtggataagtagagatagttagattaaaaggagaaagagttatatatgtaaaggaatagagttattaagaatttgagttcgggtaagtagatgggggttgtaaatattgtatagggataaagggatagattattttgtttttgattttttgatttttttgtagttacgttggatgtgtgtgtgggataggtaggaaataaggttagaaaggggtagaaggattaaaagtttttaattttttggtgaaggattaaaatttggtgaaggattaaatataaggagtttaaattttattatgaaaggtattggagtatggtaagtttgagggtgaggagtgatatgattagatttgtattttagaaagattattttagaaatagtatagaattattttgaggtgtttgattagatggtgatattatttattaagggaatataggaggattagattgggaagaaaggttttgagtttaaattttttatgtgttgaatttgaagtgtgtatttgtaatatataaatttggtggttttaaataatagaaatttgttgttttatagttttagaggttagaagtaagaaattagagttttttggaggttttaagcgtatatttgttttattttttttttttagtttttggtagcggttggtaattattggtattttttgtttagtagagtgattattttaatttttgtttttatgtttatattattttagtgtatgttgttattttgtttttttataaggataagggtttattttaaatttagagtgattttaagatttttaaaaatatttgttttagtttatttgggttgttataatagaatatggattaggtggtttataaataatagagttttattttttatagttttggaggttgggatatttaagattaatatgtttagagatttagtgtttggtgaaggtttgttttttgatttatagatgttattgtgtttttatatggtggaagaaataaattaatttttttggatttattttataaaggtattaattttatttatgagaattaattatgaatagtgatagttaattatttattatttttttttatgatgtgaatgtgtttttaaaaatttatgttcggaaatttaatttttaatgtaatagtattgggtggtgttgttttttgagagttgtttaggttataggggtttggtatttttttttttaggatgataaggtgtttaaggtaatattttggaaatagagattagatttttattagataattgaatttgtttggattttttagtttttagaattgtgggaaaataattttttgtgttttataaattttttatttttagatggtttgttatagaagtataaagtggattaagttagtttttaaaggttttattttttaatattattatattgggggttaagatttttatatgtgaaatatttaggggagatataaatatttattttatagtaatttgtaaagattttgttttaaagtaatattacgtttatagatattggaggttaggatttggatatgtttttttgtagggtattatttaaattattgtaaagtgaataaaggtgtaagtgtttttataatttgatttatattttagttttggggatttgtgttttgtgtttttaaatgttaatattatgtaatagttaaaagaaagagtaaaattaaaggttgtgatgtatggtagaaagagtaaagattagttagatggatttagatttaatattggttttttaggagttgaaaagatggttagttatttaatttttataagttttgatttttttatttgtaaaagaggtattgttaggtatagagttgattttaaatgttattattttaggggaaaaaaggttgataatagtatatttgaaaataatttatattaaaatgtggttatgtgagtgaattggatttttttaaaagagaatagaaattggtattaagaatagtgggatgttttgttagagatggatattagcgatgaggaaagaatttaagagaaggtgatatttaaatagttaaaggagtatttggttttaggaaaattggttattaggtattttattatttaagtgggagggaggttggtaaaattaagttagggtttagaaattgggatattgggtagatttttaagatatttattaagtttaattattgtgttagatattggagattaaacgatgagtaagatatttattttttagatagaatatattattttttgaatgaaattagtaggtagataagataaaaatataatgtaatttgaagtgttagaaaaggttaggtatatagttaaggaatagatttgtgggagtttttgaagtttttagagaaaatatgacgtttgaatagaatagtttttgaaggatgaataagagtgcgcgtgttagggaagaagaatttttttagtagagagaaaaacgtaaagtttaggaattaaggattagaagataggaatttagaattagttaaaagtttagttgtgtaaattgattaatgagattataggtagaatattaatatagagttttattgttgatttttgtattattgggttttaatttagaatttttttgtttaaaatgtatgtttgttttatagatttagagaggagtgagtttagagatatgagttaagtggttttagtatttaggaaaaaagaaatgtagagagattgatgattagttaggtattgatttttattgaattagatagtattagggtttaaaggtgtttattagaagtgatttagttatatgaggaatagttgttattgattttattgtatttttttttagttaaaataattattggattatatttataatagggaataatgaatgtttatttaagtaattcgtatatttgagtggtttttcggtgtttagtaaatgttcgtttaattaggttttcgaggatatatatggtaatattatttttaatattaaatgaaaaatttatttttagtatcgtaggataaaaatattagattttataggttttcgaagttaagtagttcgaaggatttaacgttttttttgaggatttttagtttttaagattttagttatttaagtgattattcgtttatttttgtttacgtagttattacgtcggttcgcgtttatttgtggtttcgatatcggttttttttattttagttaaggagattttggttcgagaaataaagagagttttatagtttcggatggtatcgattttttagcgatggggaataaaggggaaggggagaagcgttttcgatttttgagggtgttttttttgaggaatttgtaggcggttcggggtggagcggaatttttataggttttttttggtttttgtgtaatataacgcgttttaggttaaggttttaggtgtaggggtcgtcgtagagtttgagttcgtagggttgggatgcgggtcgttagggatgcgggttggggaggggagggtgtgagtagcgggtgtttttagttttcgttagggcgtaagcgtaggcgcgtagggtgcggtcgcggaggggcgggtatagtcgggcggggagttcggcggcggcgggcgcgggaagatggcggtagcggcggcggcggttgtagaataggtttgtgagtatcgtcgcggtcgcgggttggaggagcgggggaggtcgcgttttgtcggttgggttcgcgggagttttggtcgggggtgcggggggcgcgggtcgtagggtttgggttcggcggggtcgatcggggcggggcggggcgggaggagttgtgtttcgtcgaggatgttggtataagttagggattaggagttaggggcggtttcgggttcggttcggtttggttgattttcggagggggtgaggaggggttttttttcggagagtttgggaggcggtcgagttagtttggaagtttgcgttgggacgtgttagggacgtatttcgtttagtcgttagtagagatttggataaaaataatcgtagttttagcgagaaggttttttttataagaaacgggttagttgttgtttcggtgttagtttgttatttttgttttttgtttttgttatttttaatatgtagatattttagatttttttttacgttttggtttttgaagatttagttattagtttaaaattattttttgtttatttttaaaaatgatttatttaagattttttgatttgtattgtaaatttgtaatttagaatggtttaaaaggttttttatttttttaaaatttagttatacgtatgtatatatgtatatgtatatgtgtgtgtgttaatatatatatatacgtaatcgttagggtgatttattgtaatatagataatttttagtaatttttttttttatttaatttattttttttttgaataattatagtagtttttttttaaaaagttttattttaaaatattgttgaaaaaaatgagttaagttttgatttttggaacgatttttttagataattaattttttagagatttattagatatatgttattggagggtttattttgaagataaaagacgtaaaatttttttttaaggagtttaaagttatatagttaaatatatgtagaaaaaattagttaaagataataggtaggttgtagatttgtaatagtaaaataaaatatagaggaatgagtgaaattgaaaggagataaaattttttggagttggtatttaaattgtgttttggttttttttatttttcgtttaagttattagtttttgttttagatgattgtttttttatttggttttatttttgttttatatataagtggggtagtttgattcgttatttagtttttattttaaatttacgtattacgtttttagttttgaatttaattgaattttttataggtattttaaatttaaaaatgtttaaaattggattttgttatatttattattaaaaaggttataattatttatttatttgtttaatttagttagaaatttaggattaaggttattttaagggagttgagaaggatttgtatttggtttaatgttttgttgttttgggtttgagatttaaatagtgagttttatatttttttttttttttgggttttataaattatatagttagttttatttgggagttattttcgatttttttgtgttatatttatatttaaataattacgagattttgatagttttattttttaatatttttttttagattttagttttaaagttaaattttagttagtattttattgggatttttagagaaatttgttgttgatatttttatttttaggttttttagttttagtttatttttttttggagtgattttattataatgtaaatttgattgtataggaaatttattttaattttttagtagtttttttttgtttttaggataaagtttattgtttttgttatggtatttatgttgtttattggtttttaagtatattttttattgtattttttgttttatttttatatttattttttttattatttatataaagtgattaaaattagtttttttagagatggttgttttttaaagtttttatgtttttttttttgtttagagtgatttttttagtttttttgtttggttaatttttgtttattttttaagagttaatttaatttttagttttttttagaaattttttttgatgtttttgtttgttaggtggagatgtattttttttttgtattttttttgtattgtatgtattgttttattatagtatttgttatgttttgtgaattgttagttattttgtttgtttatttgattggtttgtaattaagttttttgagggtggatattatgtttattttggtagtttggagaatttggtttatagtaattatttaataaatgttaaatgtattaagatgaagatagtaatgtgtatggtttggtagagaagagtaaaagttacgttttaggagggatgaattttgtttttttttttttttatgtggatttatatttaaattttggttaatatttttaagttgtttatttgttagggttgttagaagtttgaggtttttttttggaatttgattataaattttgttaagtttttttttaaagtatttatttaatttttttttttttattttattttagtttaggtttttttaattttaattttttattattataatatttttagtagtttatttattggtattttttttttttttttttcgtataaatgtttatatttttaatattttgaatttgtgtttaaaaatttttagtgatttttaattaaatagaatataaagattagaatttgtattttgttgtttaagaatttttataatttggttttatttttttaatttttttttttttgttttgttatatttgatttatttatttttttttatttttttaataattttaggttattttgttttttttttttttgaattttgtagtgtgtattgtttagattattgattttggtatttgaatatatagagtgttttattgtattgttaaatattttatgttaatatgtatataaattatatttgttaatatatagaggataaggatttttttttatagtttttttgtatttttatttatggaattagtgtttaagcgtaaagtgtttaatatatgcgtatttaataattgaatttttttagagttttaagaaataagtaggatagtatttatttttgtttattttttttgtgtttttgatatttaagattattatttaaaatgttatttaattatagtttaggttagaggtttttaaattattttggttttaggttttttttatatttttaaaaaatggaggattttaaagagttttggtttatgtgggttatatttattgatatttattataggagaagttaaaatggagaaatttttaaagtatagggttatataagtatatattttgttgagtgatgatgttattatattggttatgtagtttttatatttatgggtttaggagagtaaaaatagtaaatagtattttagtgttattttaaaaatatagttttttaaagggtttgtggaatttttttaggattttttattttgtatttgaaaattattgatttagggtaatgtgagttttagttagtgaaattataagtaataaattatgttagttttttcggttttatttttatataaatgaaaatatatatcgttgttttttaatatttatgggggattggttttaggatttttaaaggatagttaaatttattgatgtttaagttttttatataaagtggtgtagtttttgtatgtaatttttgtatatttttttgtatattttaaatttatttgtagattatttataatattgaatataatgtaaatattatgtaaatagttgttatattgtattgtttagggaataatgataaggaaaaagtcgtatatgttttgtataaatgtaattatttatttttttttttttttttttttttttttttgagacggagtttcgttttgttatttaggttggagtgtagtggcgcgattttggtttattgtaattttcgtttttttaggtttaagtaattttttgttttagttttcggagtagttgggattataggtgcgtgttattatgtttagttaatttttttgtgtttttagtagagatagggttttattattttggttaggttggttttgaatttttgatttcgtgatttattcgttttagttttttaaagtgttgggattataggtttgagttatcgcgtttggttttaaatatttttgatttatagtggttaaatttatggatatggattttatggatatggagggttagttgtatacgtaaaaaaattaataaattattaataaaagtagttatttattataggatacgtatgataattttgtttagaaataagttgtatattttgatagtgggattgttgaaagtagagaggaaaaatattagatagtgattttgaagttttttttgtattttttttttaagtatagttatgtttttatttggaattgtaatttaatgtgatttgtagtttatttatggaaaatgtgttagtaattaatttagtttgttatagttatgaatttgtatttaatagataaatgtattaaaacgagagggtatagttgttttattatgttgtattttatttttagt

SEQ ID NO: 1662 - DNA, 9646 bp, Artificial Sequence
  chemically treated genomic DNA (Homo sapiens)
gttaaaaatgaaatataatataatggaatagttatattttttcgttttggtgtatttatttattaggtgtaaatttatagttatagtaagttgaattggttattgatatattttttatgaataaattgtaaattatattgagttgtagttttaaataagggtataattgtgtttagaaggaaagtatagaagaaattttaaggttattatttgatattttttttttttgtttttaatagttttattgttaaagtatatagtttgtttttgagtagagttgttatacgtattttatagtgagtaattgtttttattaataatttattaatttttttacgtatataattggttttttatatttatgggatttatatttatggatttaattattgtggattaaaaatatttgaggttaggcgcggtggtttaagtttgtaattttagtattttgggaggttgaggcgggtggattacgaggttaggagtttaagattagtttggttaagatggtgaaattttgtttttattaaaaatataagaaaattagttgggtatggtggtacgtatttgtaattttagttatttcggaggttgaggtagagaattgtttaaatttggaggggcggaggttgtagtgagttaagatcgcgttattgtattttagtttgggtgatagagcgagatttcgttttaaaaaaaaaaaaaaaaaaaaaaaaaaaagtgaatggttgtatttgtatagaatatgtacgattttttttttgttattattttttaaataatatagtataataattgtttatatagtgtttatattgtgtttagtgttgtaagtaatttgtagatggatttaaagtatataggaggatgtgtagaggttatatgtaaaaattgtattattttatataagggatttgagtattaatggatttggttattttttgggggttttgagattaattttttatagatattgagggataacggtatatatttttatttatatgaaaataagatcggaaaggttgatatagtttgttatttataattttattgattagagtttatattattttagattagtagtttttaaatgtagggtggggagttttgggagggttttataaattttttggggggttgtatttttgaaataatattgagatattgtttgttgtttttatttttttaggtttatgaatgtaaaggttatatgattaatgtgatggtattattatttaatagaatgtatgtttgtatagttttgtattttaaaaatttttttattttaattttttttatagtaaatattaatgaatataatttatataaattaaagttttttggaattttttattttttaagagtgtaaagagaatttgagattaaaatgatttgagaatttttgatttagattatggttgaatgatattttgggtaataattttgaatattaagagtataaaagaaatgggtagaaatggatattgttttatttattttttaaagttttgagaaaatttagttgttgaatacgtatgtattaagtattttacgtttaaatattaattttatagataggaatataaaagaattataggaaagggtttttattttttatgtattaatagatatgatttgtgtatatgttaatataaaatatttaataatgtaataaagtattttgtatgtttaggtgttaaaattaatagtttaggtaatatatattgtagagtttaaagggaggagagataggatgatttggagttgttagggaaatggggagaagtagatgggttagatatggtaaggtagggaagaggaagttggaaaagtagggttaggttgtgaaggtttttggatagtagggtataaattttagtttttatgttttatttaattgggagttattggaggtttttgagtataaatttagagtgttaaaggtgtgggtatttgtacgagagagaagaaagaggagtattagtaagtaagttgttggggatgttgtagtaatggaggattgaggttaagaggatttaaattaaagtgggatgaaaaaggagagattaagtagatattttaagagaagatttaatagaatttgtagttaggttttaaaaaagaattttaggtttttgatagttttaatagatgggtaatttaaaagtgttagttaaagtttgaatataggtttatataaaagagagaaaggataaaatttattttttttgagacgtagtttttatttttttttgttaaattatgtatattattgtttttattttgatgtatttaatatttattgaatagttattataagttaggttttttaagttattaggatgaatatagtgtttatttttaaggagtttaattataggttagttaggtagatagataaggtgattaatagtttataaagtatgataagtgttgtagtggagtaatgtatataatatagaaagggtatagaagaggaatgtatttttatttagtaggtaagggtattagggaaagtttttaagaaaagttgaaggttgagttaatttttgaaggatggataggagttaattaggtaaaagagttaagaaggttattttaggtagaggaagaagtatggagattttgagaggtaattatttttgggagaattaattttggttattttatgtggatggtgagaaggataggtgtagggatgaagtaagaaatataatgagagatgtgtttaggggttagtaagtaatataaatattatgataagaataatggattttattttgaaggtaaaggggaattattgaagagttaaaataggttttttatataattagatttgtattgtagtaaaattattttaaaaagagatgaattggaattgaagagtttagaagtgaagatattaatagtaggtttttttaagagttttaatgaggtattgattgaggtttgattttgaagttgaagtttggggaaaggtgttaagaggtagaattgttaggatttcgtgattgtttggatatgagtgtggtataaaggggtcgaagatgatttttaaataggattggttatataatttgtggggtttagggggaaaagaaaatgtggggtttattgtttaaattttaagtttaggatagtagaatattaaattaagtgtaggttttttttagtttttttaaaatggttttggttttaagtttttggttaggttaaataagtgaatggatggttgtagtttttttaatagtaagtatgatagagtttagttttgaatatttttgagtttgaggtgtttatggaaaatttagttaagtttagggttggagacgtaatgcgtaaatttgaagtggagattgagtaacggattagattgttttatttatgtgtaaagtaaaaatagaattagatggaaaaataattatttgaaatagaagttgataatttaggcgggaaatgaggaaagttaaggtataatttaaatattaattttaagaagttttgtttttttttagttttatttatttttttatgttttattttattgttataaatttgtagtttgtttattgtttttagttgattttttttgtatgtatttggttgtatgattttaagttttttgaagagagattttacgttttttatttttagaatgagttttttagtgatatatatttaataggtttttaaaaagttaattatttaagaaaatcgttttaaaggttaaaatttgatttattttttttaataatgttttagaatgagattttttaaagagaaattattataattgtttaaaggaaaagtaagttaggtaagggggaaagttattgaaaattatttgtattataataaattattttagcgattacgtgtatgtatatattaatatatatatatatgtatgtatatgtatgtatacgtataattagattttggggggatgaggagttttttaaattattttaagttataagtttataatgtaggttaggaaattttggataaattatttttaaaagtgaataggagatagttttagattggtgattaaatttttaaaaattaaagcgtgaggggaaatttgggatgtttgtatattggagatggtagaaataaaaaataaagatggtaagttgatatcggggtaatagttgattcgttttttgtaagaggagttttttcgttggggttgcggttatttttatttaaatttttgttggcggttgaacggggtacgtttttggtacgttttagcgtaggtttttaggttggttcgatcgttttttaggtttttcggaaggagatttttttttatttttttcgaggattagttaggtcgggtcgagttcgaggtcgtttttggtttttggtttttagtttgtgttagtattttcggcggggtatagtttttttcgtttcgtttcgtttcgatcggtttcgtcgaatttagattttgcggttcgcgtttttcgtattttcggttagggttttcgcgggtttagtcggtaggacgcggtttttttcgtttttttagttcgcggtcgcggcggtatttatagatttgttttgtagtcgtcgtcgtcgttgtcgttattttttcgcgttcgtcgtcgtcgagtttttcgttcgattgtgttcgttttttcgcgatcgtattttgcgcgtttgcgtttgcgttttggcggggattgggggtattcgttgtttatatttttttttttttagttcgtatttttgacgattcgtattttagttttgcgggtttaggttttgcggcggtttttgtatttaggattttggtttggggcgcgttgtattgtataggggttagaaggggtttatggggatttcgttttatttcgggtcgtttgtagattttttagaaagggtatttttaaaaatcgaggacgttttttttttttttttttgttttttatcgttgaaagatcggtgttattcggagttgtgaggttttttttgtttttcggattaaggtttttttggttagggtgggaggggtcgatatcgagattataagtggacgcggatcggcgtggtgattgcgtgggtagaagtgaacgagtggttatttaggtggttggagttttgaagattgagagtttttaaggaggacgttgaatttttcgggttgtttgatttcggaggtttatgaagtttgatgtttttattttgcgatattggggatggattttttatttagtgttggagatagtgttattatgtatattttcgggaatttaattgaacggatatttattgaatatcgggaagttatttaaatgtacgagttatttgagtagatatttattgttttttgttgtagatataatttaataattattttagttgaaaaaaaatgtagtgaagttaatagtaattgttttttatgtagttgaattatttttaataagtatttttgggttttagtattgtttaatttagtgggagttagtatttagttggttattagtttttttgtatttttttttttttaaatgttggaattatttgatttatatttttagatttatttttttttgagtttgtgggataaatatgtattttaggtaggaaaattttaagttaaagtttaatgatgtaggagttagtagtaaggttttgtgttaatattttgtttgtggttttattgattaatttgtataattgggtttttaattgattttgagtttttattttttagtttttaatttttaagttttgcgtttttttttttgttgggaaagttttttttttttggtacgcgtatttttatttattttttaagaattattttatttaaacgttatattttttttaaaggttttagaggtttttatagatttgttttttaattgtgtgtttagttttttttagtattttagattgtattgtatttttattttgtttatttgttgattttatttaaaagatggtgtgttttatttggaaggtaggtgttttatttatcgtttaatttttaatgtttagtatagtaattaaatttaatagatattttagaaatttgtttagtattttaatttttaagttttgatttgattttgttaattttttttttatttaggtggtgagatatttggtagttaatttttttgaaattaaatgtttttttggttatttgaatattatttttttttggattttttttttatcgttgatgtttatttttgataggatattttattatttttaatgttaatttttatttttttttaaagagatttaatttatttatatgattatattttaatgtgggttatttttaaatgtattattgttagtttttttttttttgaaataatgatatttaaagttaattttgtgtttggtaatgttttttttataaatgaagaaattaaggtttgtagaggttaaatggttgattatttttttaatttttaaagagttagtattgaatttaggtttatttgattagtttttgttttttttattatatattatagtttttaattttgtttttttttttgattgttgtatgatattagtatttggaagtataaaatataggtttttagggttggagtatgagttagattatgaagatatttatatttttgtttattttgtagtggtttgaatagtgttttgtaaaaaggtatatttaagttttaatttttagtatttgtgaacgtggtgttattttgaaatagagtttttgtagattgttatagaatgaatgtttgtgttttttttgaatattttatatgtggaaattttagtttttagtgtgatgatattaggaggtagggtttttagaagttgatttagtttattttgtgtttttataatagattatttgagagtgaagaatttataaagtataaaaaattatttttttatagttttggaggttgagaagtttaagtaggtttagttgtttgatgagggtttggtttttgtttttaggatgttattttgaatattttgttattttgaggggaggaatgttaagtttttatgatttgaatagtttttaaaaggtaatattatttaatgttgttgtattggagattaaattttcgaatatgaatttttggggatatatttatattatagaaggaaatgatgggtgattagttattattatttatgattagtttttatgaataggattagtgtttttataaaatagatttaagagaattggtttgttttttttattatgtgaggatatagtgatatttatgaattaggaaataggtttttattagatattaaatttttaagtatgttgattttggatgttttaatttttaaaattgtgagaaataaagttttgttgtttataagttatttagtttatattttgttatagtagtttaaatgaattaagatagatgtttttaaggattttgagattattttgaatttaggatgagtttttatttttataagaggatagaatggtaatatatattaagatgatatgaatatagaagtagagattggagtgattattttattaggtaaggaatattaataattgttaatcgttattagaagttaagaaagagggatggagtagatatacgtttagagtttttagaaggttttgattttttatttttaatttttggaattgtaagataataaatttttgttgtttaaagttattaagtttgtgtgttataaatatatattttaagtttaatatatgaaaaatttgaatttaaaatttttttttttaatttggtttttttgtgtttttttagtgaatgatattattatttagttagatattttaaagtagttttatattatttttggaatgatttttttaaaatataaatttgattatgttattttttatttttaagtttattatattttaatattttttatgataaaatttaagttttttatatttggttttttattaaattttggttttttattaaaaggttagaaatttttggtttttttgtttttttttagttttgttttttgtttgttttatatatatatttaacgtgattatagaggagttagggaattagagataaagtaatttatttttttatttttgtgtaatatttgtagtttttatttgtttgttcgaatttaagtttttaatggttttgtttttttgtatatgtggttttttttttttttaatttagttgtttttatttgtttattaaaatttagattaagggatattttttttgaaaagttttttttaaatttttttttaattatatatttttgatttgtgtggatttttttgtgatttttaagtatgttgttattgttatattatattatattgaaatttatttatttgtttatttgttttagttatttgtgaatttatgtttttttagattttttttattttttagaattaattttagttttatttttttttgataattatagttagtttttatttttttttttttttaattattattgtattaatttgttgtaatatttatttgatatttagtgtagtattttgttattttattttttatgtatatatagtttgtttttgattagattgagttttttataaagtagaggtaatgtgttattattttttatgttgttttaagttttgaatatattaagaattaagtatataatatatatttaatagttttgatgaatattaaattaattttttttattgggtaaaaaatattattagtatttaagtatttttgatatcggtatttaatgtttattatattatattttagagaaggttattagattaatttttatttttgtgttttttaagtgtttttttaagggtttagttttgttttttttatatttaatttttgtgatttttaatgtgatataaaagagatttaattatatagtttttttatttatagttttttgttgtttttttattgtttatgaaataaagattaatttttttagtttgatatataagatttattatagttgaaattaggattatttttgtagttttatttttgattttttgattattttgtagttatattggattattatttgttattttttgtttttttatttaattttatgtttttttgttatgattttttttgttttaagttgtttttttttttttggtgaacgtttttttatttttttaaaataggttttaaatattatttttttatgattttttttgatttttttttagaagatgggaaaggaggtaaaggaggagttattgttttcgtagaacgtttatttattttaattgataatattgaagtatggttgttttttttttttttgaatagattatgagattttagggaatagagattgagtttaattttgtttatgtttaaggtagatggttgtgttatattagaaatttagtaaatgtttattaaaagtgttgaaaaggatttattttaatattatttattttagggattatttcgtgttattttatattttttttttgatgtgtttaaggatattttgtaaggtagattatatttattgtgtttttgtaatagtttgatatgttttgagtttattttttttcgggggatttttatagaattatgattttgttattgtatttagttagtagagttgaaaagatggagggtgaggacgtt

SEQ ID NO: 1663 - DNA, 6103 bp, Artificial Sequence
  chemically treated genomic DNA (Homo sapiens)
agaatatattttattgtttaacgttggtttgatttttatttatttatttatttattgaataaatgtatatttatttatttattgaataaatgttttgttaaaaaatgtatttgttttatttttattaaaataaatatgataataaagtgaattatataaatgtttgggttttatagtgtagataaagtttatgtttatattgtagtattttattgtgtaatagtattatatttaaaagtatatattataatttaaaaatattttattgttaaaaataattgggataagaaaaaattaaaaatattaggaatataaataagttaataatatgaatatatatttagaatgagaaaggaaattaaattattaatttttaaaagatgatattataaaattaggaaggataatattgttaataattaattgttttatatatattttttgtattttttggttgtatagtttttaattgtttttttatatgatagttatatgttattattattttttgtatggataatggaaagataattatttttatggtaattttgataaaattttttaaatattgatggttgtaatgtagaatgtatataattttatataaagttatatatggtatatataatttataaatttaagtattttggttaattatattttttataatttttatataaaataaaatatatatggaatatttatgattatatatgttaaatttaatgtataatgtattattgatagtagagtatttgttttgatgaggtattaatgatagttgaattttatatttgatattttatatattttatgattattaaataaatttttgattagtttttgttttttttattatttatgtatttttggtgttgattattgtaggtcgtgtttatatcgtatcgtgttttttggttttttttttttatgttattatgtttggtgaattggagttatgggtggaaggagtatttttagaagatatttttatattaggagagttagtagtaatgtatttttattgggaagtgttgtaaattatataaatatattttgtatttaaattataggaattattaagttaatttttttttagatttttaaaatgtatgtaaattttttagagttaatacgaggggaagttagaatagaaaaagatagggtttagcgagttgtagttaaaatattttttaaaaatgttataaaattgtatgattattgttatgatttattggggttttttttggggtttttaaaggtttggggtttgtttaagtgaggaattaacgttttaattttaatttttcgggtagtatatttgtttcgggaaggaataagaagaatgatagattggagattgttatttatttttgtttttattttttaatatgttttaatttttgattagaaaaatgaacgtatttagtatatttaatttttttttttatgtaggattttttataatagatgtatttattattatatgtttgtatggaaaggtttttttttataattatttgttaaaaagtgtttattttttttattgttttttttttatgtattttaatgagttggagattggagtattttgttttatgggatttattaaagagggtgtggtggagatgatatgtaataagttattatacgatgtagtaaaagatttaagttataatttttgtttagtttttaatttgttgtgtgatttgaaaaggagttgtttttttttggttttgatttttatagttggttaattttgttttggataaaattagtagtttttaggagtaaaggattttgtagagatgttttaaaggtagttagattttgttttaagtagaggaattttattttttttattttttattttattttattttatttttttgttattttatatattagagttttttgtaagattttgttttataatgattattttatgaaaaaaagtgaaagttattttttagatgttgttttaaatgtttagaattatttgggagattttttataatgttttattttgagttttagattttgaaaatggagtttaaaatttgtattatatttgtttagttttttttgtgtttcggtgtataattagggttgagtggtattattttagattaatggtatgtaattttgtttatttttagaattatttgggaagttttaataaatattgatgtttgggtgttatttttgtgattgttatttaatttgagtatagatgtgtgtttttaaaattttatttatttatttattttttgagacgaagtttttattttgttgtttaggttggagtgtaatggtgtaattttggtttattgtaattttcgtttttcgggtttaagtaattttttttgttttagttttttaagtaattgggattataggtatttgttattatgtttagttaatttttgtatttttagtagaaatggagttttattatgttggttaggttggtttgaaatttttgattttaagagattttttttttttggtattttaaagtgttgggattataggtgtgagttattatgttcggttgagtataaatgtttttaatagttttattagtaattttgatgtgtatttagggttgagaatttttagttaagagaattattgtattttgttaagttttattagtatgtgtatgaaaataagaaattataagtatgttatttatatttttatttttttataaatatttattgaatatgttatttttattttatagttacgtttatgtaatgatattatcgattgggttgaatgatagagaaaaggtaattgatatagtggtaatattattagtttttgtatatttatttgtaaagaattttttattgtttattttgtttatgataattttagattattgtttaagattttattttgttataaattttttagttttgtataagtaggttaatttttttaattttaatttggtttatttataattagttgattaatattaaaggaaattgtatacgtgattttaagattttgtgattatttttttattttatagaatatgatttgatggaaaataaaaatttaatttattttaggtttataaagtattatttttatttttatttgatttttatgtttaaaaaggttagtgattgatgattttgttgtgttttcgtttttttataatatatttttgatttgtagaggaattattagaagttgagatttaaaattgagatttttttatattataaattttattgtttggttgggaatttagtgttttgggagtttgaagtgaaaatttgtaagtatataaataagaatttgtttatggtatttagtttaaatttttatatatttttagatagtagtagagttggtagtagatgggaaattatttattgggttattatttatgtattttgttttttatttaattattttatatatatattttaatatatattaggtattgatttcggtattagggtatgtgtttggaatgagatagatgttatgtaggtttttatggagtattttagttagttataaggaagaatttatttagttttttaaatggaattttattgatgtttaacggttatgagttttttaggggatttttagattttatgtgtttattttaatgattatttaaaaattaaaaaaaaaaattatattgtgaattatttggaagatattttaataattaaggatgtgattttagggtttgtattttggtttttattatggttattttggtattatatattattaatttattgttattggttgagaagaaaataaatggagtaggttttatttgtagggaatgtagtgtgtttatatgatagttaaatgaagtaaaaataagggttgtattattatttgaatggagataggtagtgggggttttgttattatatggtttatgatagagtagagatgttgtgtttaggagattttgtgttagagattttggtattatatttatatgatttagtttaaggtaaattattttttgtagtattttgttattttttagtttgagtgataggtattttttagttttatttatatttaattttaaaatttgttttggttttagaattggatagaagtgatatgtttatttatatttgtgttgataattagtaattttagtataaagataatttgtgttaatagtagggatttggaaaattttttttatttaaagggtattaacgtattattttataatatattgataaatttttttttaatttttttttttttattgtgtttagtatttaattagtttatttttttattagtttacgagttaatgtttatattttatttgattttgatttttttttatgttttttaaataagttgtttgataacggttagaattgtttaatttataaagattaatttagggggtagttaggtatttattagattattatttgttgaagatttttaaattaagtggggttttagttgtgtgtttgtaaggattttttttttaaatttgaaatagaggagtagttaaagttgttacggttgttattgattggtaatatagaatgatagtgtttaaaattttttaattatttttttaaataaattgtttgaataatatttttatattattaaggtgaattgttggggttattttattttttttagtaattttaaatttttttttcggtttggtagatttttgagtattttttttataaagatgttggaattttgagttatttggaaaatggttttttaggagtttttttttatttattatgtgtgtgattgtggttgtattagtgtatattagaagttatggttgtgttaaatgagaagttttttattttttagcggtttaatgtgagtgttttttttttgtttcgtttattttagatgttttaggattagtatatttattatcggagtattatgtttggttttgtggggttattaggtatatatagtggggatttattggtatggcggtaaatcgatgtttgtatttttttgttttgttttttttagtgattttaatattggtgaatttggttatgattatttggatttttaaagttatgaattttataattgtaagtaaaattatttaggtttgtttagttttttttcgggaggggaagcgtggggtaagatgatgaaggaatgtggaaaagtgatattattatagtaggatttaaaaaatttgtaatttcgtgttttggtgaaagagtatttttgtttagattgaatatggatattgatttttatttaattttagtttttcgggggttaatattttaatttaaagatattttttttttttagaattttttgtatgttatttttttattttgataattgtttttgtagtttgtagtttttaagtattttgattaaataattaagtaatagagaataaatttaaagtattaagtttttagtaagtgtagtgattataaaaggttttttgaagtagagagttgaaatatttgagtaaaattatattgtgagtattatttatttaaaaattttaattatttatgtttgattatttattattttggttagttaagaatattttgggtttttcggaggacgattttttttgttattagtttgggtaagatggaaattagaggaatgtagttgtgttttatttttttttttaagaattgatgtttatgtttttttaatgaaatttttgttattggtgtttggggtttttgtatagattggatatttattgttgtagtttaaatgaaaagaaaattttgaaaaatgatttttggagttatttagaggttttatatttagaaattttgatttatattagtaatgtaagtagtttagtttattaatgaggaaatattgggtagtagtttgttgtattgagtataatttttttttttgttttgatgttaaaagtgagtaatatagattggtaataaaaataatttttaggttaggtatattggtttatgtttaaattttaggattttgggaggttgagttgggaggattatttgagtttaggagtttaagattagtttgggaaatatagtaagattcgatttttgtaattaagtaaataaataaa

SEQ ID NO: 1664 - DNA, 6103 bp, Artificial Sequence
  chemically treated genomic DNA (Homo sapiens)
tttgtttgtttgtttggttgtaaagatcgggttttgttatgttttttaggttgattttgaatttttggatttaagtgatttttttaatttagttttttaaagttttggaatttaagtatgagttaatgtgtttgatttaggagttatttttattgttaatttatattatttatttttgatattagaataagaaaggaaattatgtttaatatagtagattgttgtttagtatttttttattaatgagttagattatttatattattagtatagattagaatttttaggtataaaatttttaaataattttaaaagttattttttaggattttttttttatttgaattataatagtaaatgtttagtttgtatagggattttaaatattaatagtaaaagttttattgaagaaatataaatattaatttttaaaaaaaaaaatgaaatatagttatatttttttaatttttattttatttagattagtggtaaagaggatcgtttttcgaaaaatttaggatatttttaattaattagagtgatggataattaagtataaatagttaaaatttttagatagataatgtttatagtataattttatttaaatgttttaattttttattttaaaaaattttttataattattatatttgttgaaaatttaatattttgaatttattttttattgtttaattatttaattaaagtgtttgaaagttataggttatagaaatagttattaaaatggagggataatatataggagattttaaaggagggaaatatttttaagttggagtattagttttcgaagaattgagattagatagaagttaatatttatatttaatttgaatagaaatgtttttttattaaaatacgaggttatagattttttgagttttattgtaataatattatttttttatatttttttattattttgttttacgttttttttttcggaagaaagttaaataaatttagatggttttatttataattgtgaagtttatgattttgagaatttagatggttatggttaagtttattagtattaaaattattagaggagataggataaagaaatataggtatcgatttatcgttatgttagtaaatttttattatgtatatttagtggttttatagagttaggtatggtgtttcggtggtgagtgtattgattttgaggtatttgaaataaacgaggtaaaagagaagtatttatattaaatcgttgagagataggaggttttttatttaatatagttatgatttttgatgtgtattgatatagttatagttatatatataatgggtggaaagggatttttaggaggttattttttaaatgatttagaattttaatatttttgtgggggagatgtttaaagatttattaaatcgaaggaaaaatttagaattattgaagaaaataaggtaattttagtagtttattttagtaatataaaaatattatttaggtaatttatttgggggggtggttaaaaaattttgaatattattattttgtattgttagttagtggtaatcgtggtagttttgattgtttttttattttagatttaaaaggggggtttttatagatatatagttggaattttatttgatttgggaatttttagtaagtgatagtttagtaaatatttaattattttttgagttagtttttgtgagttaggtaattttaatcgttattaggtaatttatttaagaaatataaaggagggttaaagttaagtaaaatgtgaatattagttcgtaggttaatgagaggatgaattagttaaatgttaagtatagtagagagagagaaattagaaaaggatttgttaatatattataaagtaatacgttgatgttttttaaataaggaaggttttttaagtttttgttgttgatataaattatttttatattagaattattaattgttaatataaatgtaggtaaatatattatttttatttaattttaaaattaaaataaattttaaaattaaatataaataaagttagaaaatgtttattatttaaattggaaaataataaagtattataaaggatgatttgttttaaattaaattatatgaatgtggtattaaggtttttggtataaggttttttgagtatagtatttttattttgttataagttatgtgataataggatttttattgtttatttttatttagataatggtatagtttttatttttattttatttggttgttatgtagatatattgtattttttataaataagatttattttatttattttttttttagttaatagtaataaattagtaatatgtggtgttaaagtggttataatgaaaattaaaatgtaggttttaaaattatatttttggttattaggatattttttagatggtttataatatgatttttttttttggtttttagataattattaaaatggatatataaaatttaaaaattttttagagaatttatggtcgttaggtattagtggaattttatttgaaaaattgagtgaatttttttttatggttaattgaaatgttttatgaaggtttatatggtatttgttttattttaaatatatattttagtgtcgaaattagtatttagtatatgttggaatatgtgtgtggaatgattgaatggaaaatagaatgtataaatgatgatttaatgaatgattttttatttgttattagttttgttgttgtttgggggtatgtaaaggtttaagttaaatattatgggtaagtttttgtttgtatatttgtaaatttttattttaggtttttaaagtattgggtttttagttaggtagtgagatttgtggtgtaagaggattttagttttaaattttagtttttgataatttttttgtagattagggatgtgttataagaagacgggaatataataaagttattaattattggtttttttaaatatgaagattaaataaaagtaaaaataatgttttataagtttgaaataaattaggtttttattttttattagattatattttatgaaataagaaaatgattatagaattttagaattacgtgtgtaattttttttgatattaattaattaattgtgaatgagttaaattaggattagagaagttaatttgtttgtgtagggttaaaggatttgtggtagggtaaggttttgaataataatttggaattgttataggtaagataaatagtgagaaattttttataaataagtgtgtagaagttggtgatattgttattatattagttgttttttttttgttatttaatttaatcgatggtgttattatataaacgtagttataaaatggaaatgatatgtttaataaatgtttataagaggatggaggtataggtagtatgtttgtgattttttgtttttatatatatattggtagaatttggtagaatgtagtgatttttttgattaagggtttttagttttggatgtatattagagttattgatggagttgttaaaaatatttgtatttagtcgggtatggtggtttatatttgtaattttagtattttgggatgttaaggaagggggattttttgaggttaggagttttagattagtttggttaatatggtaaaattttatttttattaaaaatataaaaattagttgggtatggtggtaggtgtttgtaattttagttatttgggaggttgaggtagggagaattgtttgaattcgggaggcggaggttgtagtgagttaagattgtattattgtattttagtttgggtaatagagtgaagatttcgttttaaaaaataaataagtaaataaaattttaaaaatatatatttgtatttaggttaagtaataattatagaggtagtatttaggtattagtatttattaaagttttttagataattttaagagtagataggattatatgttattggtttagaataatgttatttaattttaattatgtatcgaaatataaaagaaattgaataaatatagtataaattttgagttttatttttagaatttggagtttagggtggaatattgtgaaaaattttttagatgattttaagtatttgggataatatttaaaaaatggtttttatttttttttatagggtaattattgtaagataaagttttgtaagaaattttagtgtgtaaaatagtaaaaaaataaaataaaataaaataaaaaataaaaaaagtggagtttttttgtttaaagtagggtttggttatttttgaggtatttttgtagaattttttgtttttgggaattattaattttgtttaagataaaattgattagttgtggaagttaagattaggaggaagtagtttttttttaagttatatagtaaattagaagttgagtaggaattataatttggattttttgttgtatcgtatagtggtttattgtatgttatttttattatattttttttaatgagttttatgaaatagaatattttagtttttaatttattaaaatatataagaaagaaatagtgaaggggatgagtattttttgataaataattataaaaggaggtttttttatgtaaatatatggtaatggatatatttgttataaagaattttgtatggaaagggaaattagatatgttgagtacgtttatttttttaattaaaaattaaaatatgttgaaagataaaaataaagatgaatgataatttttaatttattattttttttattttttttcggaataaatgtattgttcggggaattgaagttaaaacgttaattttttatttgggtagattttaggtttttgaagattttaggagaggttttagtaaattatgataatagttatataattttataatatttttaaaagatgttttaattgtaattcgttaaattttatttttttttattttgattttttttcgtgttagttttggaggatttatatgtattttggagatttaagaagaagttggtttagtggtttttatagtttgaatgtagaatatatttatatggtttgtagtattttttagtagaggtatattattgttagtttttttggtataggaatgttttttaggaatattttttttatttatagttttaatttattaagtatggtgatatgaaggaagaggattaaaggatacgatgcgatataaatacgatttataatggttagtattagaaatatatgggtagtagaaaagatagaagttagttaaaagtttatttgataattatgagatatgtaaaatgttaaatgtagaatttaattgttattgatgttttattaaaataaatgttttattgttaataatatattgtatattgaatttggtatatataattataaatgttttatatgtgttttattttgtatgagaattgtggaaaatataattaattagaatatttgggtttgtaggttatgtatattatgtgtaattttgtgtaaagttgtgtgtattttatattataattattaatatttaaaaagttttgttaaaattgttataaaaataattatttttttattgtttatatagaaagtgataatggtatatagttgttatatgaagagataattaaaggttatataattagaaagtatagaaaatgtatgtgaggtagttaattattagtaatattattttttttgattttgtgatgttattttttaaaaattaataatttaatttttttttttattttaagtatatatttatgttgttaatttgtttgtatttttaatatttttagtttttttttattttaattgtttttagtagtaaggtatttttaagttatggtatgtatttttagatataatgttattgtataatagaatattatagtataaatataaattttatttgtattgtgaaatttaaatatttatgtgatttattttattgttatgtttgttttaatggaaataaagtaaatgtattttttagtaaaatatttgtttaatgaatgaatgagtgtatatttgtttaatgaatgaataaatgaataaaaattaagttaacgttaaatagtaaagtatatttt

SEQ ID NO: 1665 - DNA, 6436 bp, Artificial Sequence
  chemically treated genomic DNA (Homo sapiens)
tagatttatttataaagacgtaatatttttttgtgttgatagtatattttgagggtttttatttaggataaagagaggcggaaagaagattttgtcgcgatttaaaggtaattggttgatgaggttaaataagtatatgatgatttatttgtgtgttaggtgttaaggtgtgggatgtgaagagttatatttataaattaaaatgaggtagattatagggtagacgttggtaagtgatgaatgtgaaagaagttaatgttagaaatgatatattttttgaggtaaattagaagttatattttttgtagagggttttttttataaagggaaaaaagagggggaaaggaagggagttaattaggtgttaggtatttttttaggttttgggtgtgttaagaggaatatgatattatttttgtttttcgggagtttataggttagtaggagaaaataatattgtgtatttgttaggttttaggtatatcgtatatattattatatttatttttatggaaaaagataaaaattaatgaggagtggtttttatttggtttagaaaatatttaaaaaggagaatggggtgataagattttatttgtgtatttaggtttttttaggagagaaaatattcgtattattttaaaaataaaataaaataaattaattaaatttaaattatttagtgttttgttattttggatggatgagtttatgattttgtttttagatttataaatttaggaaataaaatttgattgtgaattgaagatttttttaagatatagtaaataaagagaatgaggttaaaatagtatatttgatttgataagatatatagttatatatagatatgttatgagttagggtatgggattagttgatatttgaaatgtaagaagaatattttagaagtttagattatagtcgttagataggagattgaagtttgagtaatttagtgtagtgattttagaattaatgttgggaggtagaagaggatagtggtgaagtgtataggttttgtagttagtggtttgtgtttatattttgggtttgatattgattagttgtgttattttgaataggttatttaggttttttgggttttagtttttttgtcggtaaaatgagattaataatagtatttgttttatagggttgttgatataaataaatgagataatatatttaaagtgtttagtaggatgtttggaatatagtatgtagttaataaatattagttgttgttattatttcgagaatgaaattttagaagtatgtagagttttagttagaatgagggaattttttttgagttacgaaggaggtaaaattcgtgtaataaaaaaaaaaaaatttgtatatagtagatagaaagataaaaatattttttatttcgaatagattgtgcgagttagaatataagttgagttagatatgttattattatgtttttagagttttatttttttttttattttagtttttgttaagtgaattataattgtttgtttgtttgtttgttttttttattggatttatgagttatttaggggtagatattgtatttttttgtaatttaagtatttattataatgtttggtatatggtagatgtttataagtgttggttgaaataataaaaatatttaagataggtttaaataaatatatataataattttgtttttggttttttatttaaaaagggtatttagaaagattggttttataggtaaatttagagattattaaaaggaggtgtttttttgtaaaaaaaataatttttttttttaattatttttgtaaaggaagtgaattttagtaagtgttgagagaatgtgtaaatttattataggtaatattgttataatattgttataggagaatttatatttataaatgagttagtggaagaataaagttagttttgaaaggttagagaaaaagattttgaaatgttagagttattttataaaattgattatttttggtattatttttttaatttatttgggtttgagaatagtttagggtatttgaaatgaagataattagtattttagatagggtttttatatgtaaaattttgttattttttagagattttaggagttgataagtttggttaagaagatatttttaattttggttggtagtttttttaaaattttaatgtttttataatttgatttaaatggtatttatattttaaaaggttgtaattgtgaagttttttttttttattttatgatttttttttttaagttattgtaaaatgttaagaatgaaaatattttttttattgagggagattgaggaaataggtttttgtttttgtgtataaataagtttaatttattttttttttgtttttttttaaaatatatttggtttttgtttagagaatagaatgttaaatttagacgtgattttaggggttatttggtttaattttatttgatagatggagaaaatgagatttagagagaagtgatttagtggtaaaatatggtatatattttaatttttttatttattggattattgttttttttaatttattttgttattttaaagacgattataggtatgtagaattaatattgtgtgtgtgtgtgtgtgtgtgtgcgtgagtgtaaaagagaattttagtatttttttttttattgagagtattaagtttatttatttatttatttatataataaatatatatagtatttattatttgttagatataggatatagtggtgagtaaagtatataaaatttttttattatggattttatattttagtgggggatatagacgataaattattaattaaataattttgtttttaagtggtttatatttgtatttggggtttattttttttaattttttttttgttggtgtttttattatttttattgttttttttttttatttttttttattttttttcgtgtgtatggggagagaaggaagagagttattttaattttttttttttttacgttttaagtttagtgtgaagttttgaatttgttaaagttaggtttagtattggtgtaggattagagtgaagatgttagtattttttattaatattgtattagtgggttggttcggttggtttagttgttagtttgtttgtaagatgataatgaggtattggatgtgaaagttgtattattattttataatttatttgttttttagtgtaattttagttgtgttgaatttcgttatatttggttgttttgataggtgtgttattttagtaatatggaataaaatagagaaagaaaaaaagagtgtatggtacgtttgtgttgttagatttaggttgttttgtttttaagtttatggatgatttgtttagagttgttaagagataaaaaaaggttaggttttgtttttatttatgtgatattgaatgtttttatagtttattttataggttagttgttgtttatatggattgatataaagggatttttttttttgttttttttttatttgaaattttattattttgattaatttttttgggttaattatttgtttgtttaatatatggagagtttaaggtggataattttttaaatttttaatgttggagtatgtatttatatattagattaattttttttttgatttaaagtatgaaaaggggtaagaggtggagttggttaaaaatatgtgaggaaggaagatgataaaataatattggttttattttttagagttatttttaaatgttattttgaatgttttaaaaaaaaatttttaatgttgaaaatgattagtaggagatttatgtttatattttgtatattaaggttggatattttttaattaagaagaaaagttgttattagttattattgaaattttagaggattgtttttaattttagtagatgaagagtaaatatttgtttttggtgtaagttagttttgtatatttaatttattggtaagatatgtgaggaattaagtgtcgttttcgttattgagtttttagttttgttatatttttaaagaattatatattgaagttgtagaaagtatataatagacgatatagttttagttatttaaatttaaattttaaaagtattttatataatttaaaggtatatgtataagattatttagttttagtaataaataaagttttattttagtgaaaatgtaggaagttttgcggaaatattatttagtatattttgaaatagaagtaatgttttattttagagaagaaaatgaaggttgaaaggttttaaaatattaaagatagtttagttttaatcgaagaaataatattttttagaaataatagagaataaaagttataataaaattattaataatttgtaaatgatttaaaatagattttatggataaaatgttgaaaggtgggttttgtatattaaagggtatatataaatttatataaaggtaaagtattagttaaatgatttatagttttatttaaagtttattaaatagatatatttggaatatttttggatgtatattgtgatttttgtattttaattagtattttgggattttggataaggtgttaggaaagaaattaatatttgtttaggattaagattttttaagatgattgcgtgaggtagaaggaagagggagaagaagaatttgtttagagtttattgtttatttattatgtttgattttgtaggagtttttatggttatgtttagtaatgattgtatattgatagtattgataaaattattagtgttttgtttttagagtttttggtttttttattttgttagtgtgtttttgttttacgtagtgggtttatatattaatagagatatgtataatttgtttttattattaattttttatgggttagttgagttaagttatttttggtggtttttgagtaaatcgtaagaatagaagtattattaagtattttcgtttgagtgtaagggtgtgtgttggtagtatagttttaattttgtaaaattttttttttaatgttttttttttttttgtatgaattttgtgttggggggtagaagatggaagtttttggtaagttcgatcgaattaagttattaaattgttgagttcgttttaattgaagtgtgagaaggaggtttaaggtaagtagataatattttgttgttggggtgttttttttttttttgtatatttggttgaattgggagttaggtggttgatttgtgtttggttgtagtagtagcggtattttttttgtatagttttttttttcggtttgtttaagagtttattaggttatggacgtagtggttgtgtattatggtaaaattagtagggaaatcggcgagaagtttttgtttgttattgggttggatggtagttatttgttgagggatagcgagagcgtgttaggcgtgtattgtttatgtgtgttgtgagtatgatacggtggatatgggtttgttgagggtgtgggcggtgggtaatagtagttggggttagggtggaggtcgaggtaggtaggggcgtcggcgttagtagttcgtcgacgtttttttcgtggtttatttttaagtttagtttagggtcgtggtggaatatattttcgttttaatttttcgttggggattttattttttgggttttttgttttttagaaggtttttattagagttttttggggtagttgtagagaatgttatttcgggtggtgaaatgtggtttatagtttattttcgtttcgggaaagatttaggttttttatttttattttgatttttatcgggtggcgttttgcgagttttattttagttttttttaaacgatttttgaagtgttattttaaaggaagagtatgatatttagagagaggaggtatattaagaaatagagttaattattttaagaatgtaatgttagttaggtcgagatgttgagagaggagggggatgtgtgttagtaaaattatttttttggatttgttgatgtagtattttttagaaaagtagtggggggtggggaggggtaggggattttagaaataggattttttttgataaacgttaggatttataatagttttaaagggaatggagggaaaatatttttgttatgatttagttttgttatttgtttaggtatgttttattttaaggttttattttgaattaaatttatttgcgtttttgttttagggtttcggagttaggtagatttgagattttgttttgtgttcgttagatgttaggtttgtgatttgggtaaattaattttttagttttttagtttttttatttattgaataggtattatattattgtttattttataggattgtaagattaagtgttataatgtagtaaaaaaattagtattggggtttgatatttagtaaatgtttaataaatgtaagttattggtattattattatatt

SEQ ID NO: 1666 - DNA, 6436 bp, Artificial Sequence
  chemically treated genomic DNA (Homo sapiens)
ggtataataataatattaatagtttatatttattgaatatttattaggtgttaggttttagtgttaatttttttattgtattatggtatttaattttataattttatgaggtaggtagtaatatgatatttatttaatggataagaaaattggggaattgagaggttaatttgtttaagttataaatttaatatttgacgagtataggataaagttttagatttgtttgatttcggagttttggagtaaagacgtagatgaatttgatttaaaatgaagttttagaatgagatatgtttaggtaaatggtaaagttgaattataataagggtgttttttttttattttttttaagattattgtgagttttaacgtttattaagaagggttttatttttgaaattttttgtttttttttattttttattatttttttaaaggatgttatattagtagatttagagaggtgattttattgatatatatttttttttttttttagtatttcgatttaattggtattgtatttttaaagtaattgattttgttttttaatgtgttttttttttttgaatgttatgttttttttttgggatgatattttaaaagtcgtttaaagagagttagagtaaggttcgtagggcgttattcgataggggttaaaatggaagtggggagtttgggtttttttcggagcgaaggtaaattgtggattatattttattattcgaaatggtattttttgtagttgttttaaaaggttttggtgagggttttttggagagtaggaggtttagggaatgaaatttttagcgagggattgaggcgaaagtgtgttttattacggttttgggttggatttgagggtgggttacggaggaggcgtcggcgagttgttaacgtcggcgtttttgtttgtttcggtttttattttggttttagttgttgttgtttatcgtttatatttttagtaggtttatgtttatcgtattatatttatagtatatataggtagtatacgtttggtacgttttcgttgttttttagtaaatagttgttatttagtttagtggtaagtaggagtttttcgtcggtttttttgttgattttgttatgatatatagttattgcgtttatggtttggtggatttttgggtaggtcgaggaggagaattgtgtaagggagatgtcgttgttattgtagttaggtataagttaattatttgatttttagtttagttagatgtgtaaaaaagagagaagtattttaataataggatgttgtttatttgttttaaattttttttttatattttagttaaaacgagtttagtaatttagtagtttggttcgatcgagtttgttaagggtttttattttttgttttttaatatagggtttatatagagaggggaggaatattggaagaaggattttgtaagattggggttgtattgttaatatatatttttgtatttagacggggatgtttagtaatgtttttgtttttgcggtttatttagaggttattaggaataatttagtttaattagtttataaggagttgatgatagaggtaagttgtatatgtttttgttggtatgtggatttattacgtagggtaaaaatatattgataaaatgaaaggattaagagttttgagaataaaatattgatagttttattagtattgttagtatgtaattattattgaatatggttatgaagatttttatagaattagatatagtagatgaatagtgaattttgggtaagtttttttttttttttttttttttattttacgtagttattttgagaagttttgattttgagtaaatattgattttttttttaatattttgtttaaggttttaaagtgttagttgagatataaaagttataatgtatatttaaagatgttttagatgtatttatttgatgggttttagatgagattgtgaattatttaattggtgttttgtttttatgtggatttgtatgtgttttttggtgtatagggtttattttttagtattttgtttataaaatttgttttgaattatttgtaagttgttgataattttgttgtaatttttattttttgttgtttttagaaaatgttattttttcgattgaggttaaattgtttttaatattttaaaattttttaatttttatttttttttttgaaataaaatattgtttttattttaaaatgtgttaggtaatattttcgtaaagttttttgtatttttattagagtaagattttatttattgttgaagttgaatggttttgtatatgtatttttagattatgtaaagtatttttaaaatttgaatttaaataattgaagttatgtcgtttattatatgttttttgtaattttagtgtgtagttttttgagaatatggtaaggttgggaatttaatagcgagaacgatatttaattttttatatgttttattaatggattggatgtatagagttgatttgtattaaaggtagatatttgttttttatttattaggattaagaataattttttaagattttagtggtagttggtagtaatttttttttttgattgaagagtgtttagttttagtatgtaaagtataaatataagttttttattagttatttttagtattaagaatttttttttaaagtatttaaggtgatatttggggatggttttggggaatgggattaatattattttattattttttttttttatatgtttttgattaattttattttttatttttttttatgttttggattaaggaagaaattaatttgatatatgaatgtatattttaatattaaggatttgaaaggttgtttattttgggttttttatatattgagtaggtaaatggttagtttagaggaattaattaaaatggtggaattttaaatagaaaggagatagggaaagggatttttttatattagtttatatgagtaatagttgatttgtgaggtgaattgtgagaatatttagtgttatataagtgaaaataaaatttaatttttttttgttttttaataattttgaataaattatttataaatttaggaatagagtaatttggatttgatagtataagcgtattatgtattttttttttttttttttgttttgttttatgttgttaaaatagtatatttgttaaagtagttaggtatgacggggtttagtataattaaaattgtattaaaaaatagataaattataaggtaatagtataatttttatatttagtattttattgttattttataagtaagttgatagttgagttagtcgagttagtttattagtgtagtgttgatgaaaaatattgatatttttattttaattttatattagtattaaatttgattttagtaaatttaaaattttatattgagtttgaagcgtagagaaaagaggaattgaaatgatttttttttttttttttttatatatacgagaggaaatgggagaaaatgaaagaggagagtaatggagatagtagaggtattaatagagaaagagttaggaagaatggattttaagtataagtataaattatttaggagtagaattatttaattaatggtttatcgtttgtgttttttattagaatgtaaggtttatgatggagggattttgtgtattttgtttattattgtattttgtgtttggtaagtagtaggtgttatatatatttgttgtgtgaatgaatgaatgaatgaatttaatgtttttaataaaagaaaaaatattgaaatttttttttatatttacgtatatatatatatatatatatataatattggttttatatgtttatggtcgtttttgaaatgataagatgaattggaaggagtagtagtttagtaagtaggagagttgaaatatatgttatgttttgttattaaattatttttttttgagttttattttttttatttgttaaatggaattgaattagatgatttttaaggttacgtttaggtttaatattttattttttaaataaaagttaaatgtgttttagagagaaatagaggggaaatgaattgaatttatttgtgtataagaataaagatttgtttttttaattttttttaataaaggaaatatttttatttttgatattttataataatttaagggggaaaattatagaatggaggaagagagttttatagttataattttttagaatatagatgttatttaaattagattataaaagtattgaaattttagaaaaattgttagttaaggttgaaagtatttttttaattaaatttgttaatttttgaggtttttgagaggtgatagaattttgtatgtggaagttttgtttgaggtgttaattgtttttattttaaatgttttaggttatttttaaatttaggtagattaaaagaatgatgttaagggtggttagttttatagagtggttttgatattttaaaatttttttttttgattttttaaaattaattttgtttttttattagtttatttataggtgtgaatttttttgtgatagtgttatgatagtgttatttgtggtgagtttatatatttttttagtatttattaaaatttattttttttataaaaatgattaaagaaaaaaattgttttttttataaaagagtatttttttttgataatttttgggtttatttatgaggttaatttttttaaatgttttttttaagtgagaagttagagatagggttgttgtgtgtgtttatttaagtttgttttaaatatttttattattttaattaatatttatgagtatttattatatgttagatattatagtaggtatttaggttatagaaaagtatagtatttgtttttaagtagtttataggtttagtgaagaagatagataagtaaatagataattataatttatttaataagagttgagatagaggaaaggatggggttttagggatatagtagtggtatatttaatttaatttatattttaattcgtataatttattcgagatggaaagtgtttttatttttttgtttgttgtgtataggtttttttttttttattgtacgaattttgtttttttcgtgatttaaaggaagtttttttattttagttgaaattttgtatgtttttgaggttttattttcggaataatagtaatagttaatatttgttaattgtatattatattttaggtattttgttaagtattttgaatgtattattttatttatttatattaataattttgtgaagtaaatattattattagttttattttatcgataaagaaattgaaatttagagaatttaggtagtttatttaaggtggtataattggttaatgttaggtttaggatatgaatataggttattgattgtagagtttgtgtattttattattatttttttttgttttttaatattaattttgaggttattgtattggattgtttaggttttagttttttatttagcgattgtaatttggatttttagaatattttttttatattttaagtgttaattggttttatgttttgatttatagtatgtttatatataattatatgttttattaaattagatatattattttagttttattttttttatttattatgttttggaagggtttttagtttatagttaagttttgttttttgggtttatgggtttggaaataggattataagtttatttatttaaagtaatagaatattgagtagtttgggtttggttggtttgttttgttttgtttttaaagtgatacggatatttttttttttgggaagatttggatatatagataaggttttattattttatttttttttttgaatgttttttagattaaatgaaggttattttttattagtttttatttttttttatgaagatagatgtgatggtatatgcggtgtgtttggagtttaataaatatataatattatttttttttattagtttgtgaattttcggaagatagagatgatgttatattttttttagtatatttagaatttaaaagagtatttggtatttagttagtttttttttttttttttttttttttttttttatagagagaattttttgtagagaatgtggtttttaatttgttttaagaagtatattatttttgatattgattttttttatatttattatttattaacgtttattttgtggtttgttttattttggtttatagatataattttttatattttatattttggtatttgatatataaataaattattatgtatttatttggttttattaattagttgtttttggatcgcgatagaatttttttttcgtttttttttattttgggtgggggtttttagggtatgttattagtataagaaaatattacgtttttgtaaatgagtttg

SEQ ID NO: 1667 - DNA, 10717 bp, Artificial Sequence
  chemically treated genomic DNA (Homo sapiens)
agttttatgttaggtttagtcgggtagacgggatttaaggtatataggtattaagtaggattggggagcgtttaggggttggggggttaagtagacggagtattcggaggttggggagtgttcgcgggttgggggagtagtagggggtttggagttggtagttgtatttatattttttttttttacgttcgtttttgggttttgggatttttattagggaagttagtaaaggagaaattttgatttgagtgttcgggagtgaggttttagcgcggtttgtcggtttttttttagtttttaggtgaggtttatgtgcgtaagggtttaatgtattaattgtttggggtatttgttttttaattaggttttaagatggaagtaatgatggttttgtggaaggatttttaggtagttggggtgtaaggagtagtatgtagacgtagggtttttttttttttgggtacgaggttatttgtttatattgtgtttttttttttaatttttaaatgtagttttaggtttttttgataacggtgttagagtattttgaaattgtatagaggtatatatttgaggtattatttagatttaagaagaggtgtttattatttaaaatgaagacgaagtgatttaataaaggtaggtaatggtttaaagagagaaaattagtttaaaggtatatagtaatatagtttaggttgtacgtttatattcgagttgatcgtttgttttaggatgtttatttcgatagagttggttgtgtgatttttttagcgtttttagaaattgtagggtttttattttttagagtttgtagtttttatgtatgtgagtcgggtttttacggggttttacggggttttacggggttttacggggtttggtgtgtaggcggataggtatgagggtaggaattttagttattaaagtgttttttgtattttgttttatagagtggtttaggtcgggaagaagttaggttgtatttatagttatggggtttgtggtagtttgggggtggtttcgtgttcgttgtatagtattattgagaaacgttgtatagtgggtatttagcgtagttggttttatatgttagttatggtttttcgaggttttgtgtgttttggtagttgttttttagcgggtttgtttttagcgttggtgttatgaggatgtggttgtaggagtttagagagttttgtagttattttaaagtttttgggttttggtacggagaggatagtattgttttaatttatttgtagttaggttataattagggtgttgtgtagagtgtggttggattttttgggttatttagagtttgagttttttaggaagttggagatttatatttttagggttcggggatggggaggattatggagttagggaaagggggttaaggtgtagaattttttttaaatttaaaaggttttggatgtaattataagagaattggagtgtagaagttttatcggttaaaatagggaaaatttagaaagaagtggagattggatggttggatggaaagagattgcgtggaattattataaggaagaaaaattaaaggggagaaggatatgaaagattagaggttaattttagagattagaaatagaggtagtatttggagatgttaggtaggcgggttttataattgtagagtttagcgggtataaatttgggaaaggaaagaggggatgaggggggcgtagaaattgttgacgggattaggggaggatgaacgaaggaggttgtttggttttcgggtttttcgatttgggattgcggggattttttaaatcggttaagttcgagtcgaaggtagagtgaggaggttatttagcggtaggggtcggaaggaggggtaggggtagtgtttaggagggagtttgggggttggggtagaagaggaggtagtttttgtttttagtagggatgttgggtaaggggtggaggtgggggagggtgggggagggaaagttggaggaaggagcgagggagggatgcgcgtgattttaaggaagagaggtagagtttaggtagatgaataacggagttttagtatgttcggatgtttggttttgttagggaggttggtgtttggagtttttgttggtgcggggagggggttaaatggtttgggggggggggggaaggtaaagagatagagttatttggtttttggaggggaaggtagtgttgggtcgtggggagtaggtgggatggaaggatagggagtgaagggcgggagggtagagtagtagtttttttggggggtttagttagtagtttggtttataattgggattgttttttgcgtcgagttttttttaatttatgtagggggtaggttttttgaatttaggcgtgggggtaggttttttggtttattattattttattttggaggatcggttagtttataaggggggcggtttttgaggtgttttttagggtgtttagggttgtttggagatggaggggagggagggggttttacgttattttttagggtagggaggttttaggaaatgttttgagttatttaagtttaatgttaagttacgttttttttttgcgttttgttaagagggagttgatcgtatttgggggtattttacgtttagttgtgtttataaggaattttgtgtagtttaggtttttgtttttaaaagtatattttatttattttgttttttgtagaggtgagttgtgtgtatatgttatttttcggtagggttgtatatttaattttttaggttttagggtggtaattcgtgtggggggttttttgtttgtatttggaagggagtaagtagcggggaaagatagggggaggaggagggattggggtaagaggagatgttaagggtggaaggtagggtagttaaaagtttgtaaatgttttattgggttaggtcgttggtttagtttaggtattatttagtgatgtgatatttatatgttgtgtaggtagatatattaaataggtcggttttttttggagagaatacgggttttgttttgtgtttgtttttattgggaacgggataggtagcgtagatatatcgtttggagaatttttgggtttagttgagttttagtttcgtttagtggaggttgtcggggtttggttaagtggacgttgtttttttacggtgtttttttttagggattacgattcgttataaattatggaaaggaataagaaagagaggcgggaaggggagttcgggttaatttttttaaaggtatttaggttatcgagttttgttaacgtttagttttttatgtttaagatagatgtgttttaagatgttttttttttttttttttttattatatatataaaaagttgatttgtaaagggaatttttggaaatttttatcgtttgagggttgagttttataggggttttttttttttttattttaagggttcggggttaagggagagtgtttaattttatagggttatatttgtagtatttgatgattttttagggttaggattttttttttacgtaaataatttttattttttaattttatgttagaggaattattgtatatgagtgggatggcgattgagaaggggaagggtatgatttgtttttttttttttaaaaaaaaaaagaaaagtagggttgagagggagttttaaattttatttttttggtttatttaggatttttgagttttttttttttttttgtaaaaagtgaggtgattatagatttaaagattgttattttttgggtattgtgttttttttttaggaagtttttcgttaattagaatattgtttttttagggtttttgattttttgggttgtagtttttaggattggtggtttttgtgtttgaagattgttggtttgttgagtttttatataaggttagttttgtaaggagtttgaattttatatttagtttatttttggttttgtattttgttttgatcgatcgtgggggttgtgtgagtatagtttcgtttattcgtttgttttttttttaatattttgtaatggtttttatatatttagcgtatatattggtttttatttttttttttgtgttggggtgtagtttttagatttgttttgtttatttattttgacgttcgtagtttattttgtaattgtttttgagtacgtttttattttatttgtagagttttataaaaaaaaaaatgtattaattgaagtataataaaagagtagtatttttatatttttttaaggtatttaaagtattttaaatattagtgttttaagttatggttatttataattattttcggtttatagaggttgagtttttaggaggggtttagttttttttttttaaaatgtagggagagttagtttgtattataaagtttttggggaagaaaaattaaataatagttgggtagttgtgttttttaaatgtgtgagcgattttgtgtttgatgattgaagtttgcgggggtttaaattgttttttaaaaatttaagttggttttaattgaagtatttattattttagggaaagttagggggaaacgtaaggatgtatataaagtcgggagtaattgttgttattataagatatgcgtttttttttttcgtttatttttattttaggaaagatttttttttttttaattcgaattttttaggtgaaaataaagtaatagtagtaatagaaaaaaaaaacgtagttttttttagggttaatattagaagataagtttgtgcggttttggttaattagatgcgtttttggtagttataatatagtgttaaaggtagttttttttataagttttttaggtttgttattatttaaaattagattttttttgttttttgattgttgtttcgcgatttaatttcgatgtgtttcgttattagcggtcggtagtttgttattttagtttttgtttgggtggggagcggtggagagtttttcgtagtcgcggcgggtaaggttatataggaagagaaagagcgaggtagttagcgagggagagagcgagcgggcgagtcggagcgaggaagggaaagcgtaagagagagcgtatacgtatatattcgtcgcgcgtattcgcgtacggattcgtacggggatagttcggaagttattagttttatgggcgagatgttgttgttggcgagatgtttgttgttagttttcgttttttcgttgttggtatgttcgggattggcgtgcggatcgggtagggggttcgggaagaggaggtattttaaaaagttgatttttttagtttataagtagtttatttttaatgtggtcgagaagattttaggcgttagcggaaggtatgaagggaagatttttagaaatttcgagcgatttaaggaatttatttttaattataatttcgatattatatttaaggatgaagaaaatatcggagcggataggttgatgatttaggtaggaatttagcgtcggggcgtggaatgtgtggttttttagggggttacgagaagtcgaatatttttagatttaattttgtttgtttttcgggtagataggaaggtgattttattcgttttttttttatttatttgttcgttttttatttttttttttttttggaggagaatggaggttaagggtttagttggagaagtttagggtgtggtgggggtgaggacggtaatagacgtggtttattatggttttgatttgatgagttttgttataatggttttttttattttatttttgttttggtttgtaatttggggagatttttattttgggggcgtcggttttttttaagttaggagtggaaatggaaggagaggttgggaattttttttttataaatatgaagtggttttttggtattgtacgaacgaacgaacgtagttttgggtattggagtttagagtttttacgtttttcgttgtttttgtggtttttttttttattattatttttattttgtatttttttattaaagaatttttaattggaaaagttaggaggcggttttgataaaaggtaggggttttaggggagatttcgttcgtttttgggtggttggttgtatcgtagagttggttttgcgattgcgtgttcgtaattgtgtttattagagtgtgaatgtattgatatttttttaaggatgttttttcgtttttttaagttcgaggtattttaggggagggatttagaatttattggtattgtattattttagtttttaatttgtttgtataagaattaagagcgaataaatattagtgtggggggaggggaagttaagtaaaatatgaatttttttttttttttttattttttttgagatttttgagttgttaattttttagttaattttagattttttgaaattttatgtacgtataattgaagttagaaatgggtttttttgtaaatataggttaatattttttttattgttttattaaaatatttaagttttatttttagggttaggtgcgtatagcggttgatggagtggcgttggtggggcgtaagtgtagggggagggtattgacggtagagagagaggagttattttcgtgtcgttttgtttttcgattcgatttttaggtttgtttgaggtcgagaaaggcgaggggtaggtaaggtagtttgttttagttgtcggaagggagaggaatgggaaatggttttgatttttttgtttttttttatttgttttcgattattttaaatttggatcgcgagtgtggacgcgcgcgttagtgttagatagtagcgcgatttataattaattttgtacgggttatggggtgttcgttgcgtgtagttggttggagggagtttttcggttagttcgaggcgtttattttttcgttatttttatttttcgcggaggaggggttttgttagggtttttcggaattcgagaggagggaggtattgcggagagagcggcgggggcgtggatattcgaggttttagagttagagtgggttagtttttgttttgttttgcgggaggttaatatcgtagaaggggttttgggttcgtatatttttttagggtttgggttttgtagttttgttgtaaagttgtaagcgtatagagtcgcgtagcgaggtagacgtttgtagttttatttattttcgggttatcgatttttcgcggttagggttttagtgcgcgaggggttgggttggagtcgtcgggttttgttgttttacgcgcgggagcgtaggtatcgtaggagttaatagtagcgtcgggttcgttgtagtgttttcggcggcgggggcgcggagatgggggcgttcgcgtaggggtcggggcgtatcgcgggtttcgtcggtttgttttgggacgcgtttttatttttagttcgtcgtttgtttggtttttaggttttcgcgttttagtcggagtttttagttcgggggttttttttcgattttcgttcgttttgtcgggggacgtagggtttagcggtttcgcgttcggttattttcgtcgtcgcgcgtataggtagtatttgaatttttgattttttgttaattttttttagacgaacgaaacgaaaataaatatttttttttttgggtagtggttattttcgtttttaatataaaaggagggggaaggacggtttaagtgggggttgggtgaggagagttaggtcgggattattaggtagattttataaaggttttttaaaatcgaggggggtaggggttggtagtttgtgaggtattttcggttgattttttttttattttttttttttcgattttaggagttaagggtgggggaggaagggatggggaaggcggaggttcgggtgttgagggtaggggcggggtgtaggaggcggtaggggagttttaggtcggcgggaggtttggggagtttgttcggtcgtttttattttaaataattatttaggttttgttttaggtgcgtgattttttttttttgtttttttttttgtttttgggtttttaatgtgattgtcgtttaagttttttaattatggcgagatcgtttttagtggaattttcggagtagtttcggaacgtaggagttgtcggttaatattaattcgggagaggaaagcgtagatagatacgtttttttcgcgcgggtttaggtgttaggcgagggtgttggcggttagggggtttttaaggggtaggaggttagagggtcggatttgaagtttggagtggggtttcgagtcgttatattaaatagatttaatgtgcgttttggggtcgttaggaaagacgtttaggtatggggttggggaggggttgttttattaagtttgggggaaaggatagtggagagaggtgcgtttaggggttggggttgttttgaagttgggacgttttcgttttcgcgttgggggaagtttatcggttgttggcggtgatattcgtcggcgcggttcgtagattagggaggtaggcgggagtttaggcgtggggaataatttggttttcgtcgatataaagttcggtttcggcggttttgttgggttttacggtggttgtatagagtcgggtttgattcgcggtatacgatttaatgaattaataatcggtttgggtttttcggttttgtttgcgataatttcgtttagcgcgggcggaggagaggtcgttagtcgaggtcgcgcggagttcgggtcggaggagggcgtaaggggcgggggcgttaattttagtaattttcggttttcgttttttattcgcgtagttatttttcgtcgcggttcggttggattcgggtttttttgttcggggttttttatgtttgtttaagtggcgtagtttatagagttgggggttaggttatttttattttgtcgttttttttttggttgtttttttgggaagttgtttaaagttttttcggtatagttttaggggagggagttgcggtggggtggggggtttgtatgggggtttttgtgcgtgttggtggtgtgcgtttgcgcgtaacgggttttatattatagttttatattgattttggtttattgattgatttttatgtaaaacgcgtttaatttttaagatgattttatttaaattttgttttttcgatttttttttttaattgttggtaggtttataaatatgtaggtattgatttgttattagggcggtttttagttttattttatttttagttgttgtatgttgaattttataattatattattgggttttattgttgttagatatataggattttttttgttgcgtaatttgttacgtttttttaaagcgtcgtagtagtggggttagcgttttcgttttattttttcgaaagagtttttttaatttacgttatagttagggttttggatagaagttgtttttttatggcgataattagattttaagtagagtatttttttagattggaggaggttagaggttagtttcgttttttgtagaagttattttgaaattgtttttcggtttttatttggcgtagttttttgggggatgttattatcgttatttgtgttagttttttttttttaaattttatgttttattagtagtagtagggtaaatatttaggaagtaagttagtgtttttataaatatatatagtggatttaattgttttttgtcgtatttttatttgagggtgattttagaattttaggggaatttttataatttgaattttaggtaatttcgtttgtatttgtttagttagtgttttttgtttttttttaggtaattttttgggaaattttttaggcggaggatttcgagattttaggtttttttgttttttttttttttttttttaaatttttttttttttttttatttttttagtttgttttttaaatttgttggacgttattttatgttggggttaagaatataagagcggaggaagggaataggttaaagaaaataagaaatataattagattatagaaaagttaggtagaaaagggttcgacgggtaaaaagaatgtggttgtttagataaagaatgtttgtttcggtttcggtttgtgttgtaagtggtaatttatttagtcgtttgttatttaggttttcgtttatcgcgtagtttcgttagcggtttttcgttttttttttgtttcggatagggttagggtttgaggtaaataaatgtaaggtttttaattttttaagtagtgcgtagtgtatttttttttatttttgggaatttgcgtttaggtttttgttaggtttgttgtgagggattttacgcggggagaaggtggaggttgcgtaggtggagaaaggggttttagaaggggggttagaagtggagggtaacgtgggggcggggcgggtattttagagggtgtttttggagggttttgtagttgatgttttaaatatgtaggttatttgttttagagaaattttatttgttttttaggtttcgttaggagtatcggttgttttaggatttggagaaaggtttttagttttattttgagaggacgtgtttttttacgttttttcgtaaatgttgttttttttttttagtttagggttcggtttttcggtgtgtttgggttattttaattttcgtttttttattttttcgtatggttttcgcgttttgagattgggtagggtaggttgatggaggggtcgggaggggtggcggttgtttaggttaacgtgttcgtcggtgggggtttttttgttttcgtaga

SEQ ID NO: 1668 - DNA, 10717 bp, Artificial Sequence
  chemically treated genomic DNA (Homo sapiens)
tttgcgaagataaggggatttttatcgacggatacgttagtttgggtaatcgttatttttttcggtttttttattagtttgttttgtttagttttaaggcgcgagggttatgcggagaggtggggagacgggggttggaatggtttagatatatcgaagagtcgggttttgggttggggaagagggatagtatttgcggaggagcgtggaggagtacgtttttttagggtagagttgggggtttttttttaggttttgaaatagtcgatgtttttagcgaggtttaagaagtaaataaagtttttttgaaataagtgatttgtatgtttaagatattaattataggattttttaggggtattttttgggatattcgtttcgtttttacgttgttttttatttttagttttttttttggggtttttttttttatttgcgtagtttttatttttttttcgcgtagaattttttatagtaggtttgatagagatttgggcgtaagtttttagaaataaagaaaaatgtattgcgtattgtttggagaattgaaggttttgtatttatttattttaggttttaattttattcgaggtagaggggaggcgagaagtcgttggcggggttgcgcggtgggcgggagtttgggtggtaggcggttaggtgagttgttatttgtagtataggtcggggtcgggatagatattttttatttggatagttatattttttttgttcgtcgaatttttttttgtttggtttttttgtggtttgattgtgttttttgttttttttaatttgtttttttttttcgtttttgtgtttttggttttagtatagaatggcgtttagtaagtttgaagagtaaattgaagaggtggagggagggggaggggtttgagaggagggggaggggagataggaaggtttgaggtttcggagtttttcgtttggggagttttttaggaagttgtttgggaggaggtaggaaatattgattaggtagatgtagacggggttatttgggatttagattgtgggggtttttttggaattttggggttatttttagataaggatgcgatagaaagtagttgaatttattgtgtgtgtttgtgggggtattgatttgttttttggatgtttattttgttgttgttggtgggatatgggatttaaagagggggaattggtatagatgacgatggtggtattttttaagaagttgcgttaagtggaggtcgaggggtaattttaaggtgatttttgtagagggcggggttgatttttaattttttttagtttggaaggatgttttgtttggagtttggttgtcgttatggagggatagtttttatttagggttttaattgtagcgtgggttggggggattttttcgagagggtggggcgaggacgttggttttattgttgcggcgttttaaggggacgtgataaattgcgtaataggaaaagttttgtgtatttggtagtaataaaatttagtaatatggttgtagagtttaatatgtaataattgggggtggggtagggttgggggtcgttttggtaataggttagtgtttgtatgtttgtgggtttgttagtagttaaaaaaaaaagtcggaagggtagagtttgagtgaggttattttgaggattgaacgcgttttatatgaaaattaattagtaaattagggttagtgtagagttatgatgtgaggttcgttgcgcgtaggcgtatattattaatacgtatagggatttttatgtaagttttttattttatcgtagtttttttttttggggttgtgtcgaagaagttttaaatagttttttaggagggtagttagggagagggcggtagggtgaggatgatttggtttttagttttgtgagttgcgttatttgggtaggtatggaggatttcgggtagggagattcgggtttagtcgggtcgcgacgggaggtggttgcgcgagtgaggggcggaggtcgagggttgttggagttggcgttttcgttttttgcgttttttttcggttcgggtttcgcgcggtttcggttggcggtttttttttcgttcgcgttgggcgggattgtcgtaggtaaagtcgggaagtttaggtcggttattaatttattgggtcgtgtgtcgcgaattaagttcgattttgtgtagttatcgtgaagtttagtagggtcgtcggggtcgggttttgtgtcggcggaggttaagttgttttttacgtttgagttttcgtttatttttttgatttgcgagtcgcgtcggcgagtgttatcgttagtagtcggtgggttttttttagcgcgggggcgggggcgttttagttttaagatagttttagtttttaaacgtatttttttttattgtttttttttttaagtttggtggaatagtttttttttaattttatatttgagcgttttttttggcggttttagagcgtatattaaatttatttagtgtagcggttcgggattttattttaggttttagattcggttttttggttttttgttttttaggagttttttggtcgttagtattttcgtttggtatttaggttcgcgcggggagagcgtgtttgtttgcgtttttttttttcgggttaatattaatcggtagtttttgcgtttcggaattgtttcgaaagttttattggggacgatttcgttatggttgagggatttgggcggtagttatattagagatttagagatagggagggagatagaagaagagggttacgtatttggggtagagtttaggtggttatttaaaatgagggcggtcgagtaggttttttaaatttttcgtcggtttggggtttttttgtcgttttttgtatttcgtttttgtttttagtattcgagttttcgttttttttattttttttttttttatttttaatttttggaatcgggagaaggaaggtaggggagggattaatcggggatattttatagattgttagtttttatttttttcggttttaggggatttttgtggggtttgtttgataatttcggtttggttttttttatttaatttttatttgggtcgtttttttttttttttttgtgttgggaacgggaatagttattgtttaaggaaaaaagtatttgttttcgtttcgttcgtttgagggaagttgatagaaggttagaagtttaaatgttgtttgtgcgcgcggcggcgagagtggtcgggcgcggggtcgttgggttttgcgtttttcggtagggcggacgggggtcggggggaggttttcgggttgggggtttcggttgggacgcggaggtttagaggttaggtaggcggcggattggggatgggggcgcgttttagggtaggtcggcggagttcgcgatgcgtttcggtttttgcgcgggcgtttttattttcgcgttttcgtcgtcggggatattatagcgagttcggcgttgttgttagtttttgcggtgtttgcgttttcgcgcgtggagtagtagagttcggcggttttagtttagtttttcgcgtattgaaattttagtcgcgggggatcgataattcgggagtaagtggggttgtaggcgtttgtttcgttgcgcggttttgtgcgtttgtagttttgtagtagggttgtaaggtttaagttttgggaaggtgtgcgagtttaggattttttttgcggtattggtttttcgtagagtagggtagaagttgatttattttggttttgggatttcgggtatttacgttttcgtcgtttttttcgtagtgttttttttttttcgggtttcgagggattttggtaaggtttttttttcgcggggagtgagggtgacgagaggatgggcgtttcgggttagtcggagaattttttttagttagttgtacgtaacgggtattttatggttcgtgtagagttaattgtggatcgcgttgttgtttggtattggcgcgcgcgtttatattcgcggtttagatttaaggtggtcgggagtagatgagggagagtaaggaaattaggattattttttatttttttttttttcgatagttggagtaggttattttgtttgtttttcgtttttttcggttttaagtaagtttgggaatcgggtcgggaagtagggcggtacggaggtagtttttttttttttgtcgttagtattttttttttgtatttgcgttttattagcgttattttattagtcgttgtacgtatttagttttaaaggtaggatttgaatattttaatagggtaataaaaaggatgttgatttatatttgtaaggaaatttatttttggttttagttatacgtgtatggagttttagaaagtttagaattggttgggagattggtagtttagaaattttaaaggaggtggggagagagagaggaatttatattttgtttagttttttttttttttatattaatatttattcgtttttaatttttatgtaagtaggttgaaaattaaagtgatgtaatgttaataagttttaagttttttttttaaggtatttcgggtttggaagaacgaaagagtatttttaaagaaatattaatatatttatattttgatgggtataattgcggatacgtaatcgtaaagttagttttgcgatatagttagttatttagggacgggcggagttttttttggagtttttgttttttgttagaatcgttttttggtttttttagttgagaattttttggtggggaggtgtagggtgggggtagtggtgggaaagaaaattatagaggtaacgggaaacgtgggggttttgagttttaatgtttaaggttacgttcgttcgttcgtatagtattaggagattattttatgtttgtgggagggggatttttagtttttttttttatttttatttttgatttggaaagggtcgacgtttttaaagtgaaggtttttttaagttataagttagggtagaggtaggatggggaaggttattgtagtaagatttattaaattagggttataatgaattacgtttgttatcgtttttatttttattatattttaaatttttttagttggatttttgatttttatttttttttaggaagaggaagagatggggggcgggtaggtgggtggggaaggagcgggtgaaattatttttttatttgttcgaagagtaaatagagttaagtttggaagtgttcggtttttcgtaattttttggaaagttatatattttacgtttcggcgttgggtttttatttgagttattagtttgttcgtttcggtgttttttttatttttaaatatgatgtcggggttgtaattgggggtgagttttttaaatcgttcggagtttttggagattttttttttatatttttcgttggcgtttagggttttttcggttatattggggataaattgtttgtaggttaaaggggttagttttttggggtgtttttttttttcgaattttttgttcggttcgtacgttagtttcgagtatattagtagcgaggagacgaggattagtagtagatatttcgttagtagtagtatttcgtttatggaattgatgattttcgagttgttttcgtgcgggttcgtgcgcgagtgcgcgcggcgggtgtgtgcgtgtgcgtttttttttgcgttttttttttttcgtttcggttcgttcgttcgttttttttttcgttggttgtttcgttttttttttttttatataattttgttcgtcgcggttgcgggggattttttatcgttttttatttagataggggttggaatggtaggttgtcggtcgttgataacggaatatatcggagttgggtcgcgagatagtaattaaaagataaaaagagtttgattttaaatggtagtaagtttggagagtttgtgagagaggttgtttttagtattatattatagttgttaggggcgtatttgattggttaaagtcgtataagtttgttttttgatgttaattttgaagaagattacgttttttttttttgttgttgttgttgttttatttttatttgaaggattcgagttaaaaaaaaaaaaattttttttaagataaaggtgggcgggagggaggagcgtatgttttgtggtaatagtagttattttcggttttgtgtatatttttgcgtttttttttgattttttttggaatggtaggtgttttagttaaaattaatttaagtttttaaaggatagtttaaattttcgtaagttttagttattaagtatagagtcgtttatatatttgaggggtatagttgtttagttgttatttaattttttttttttagggattttatagtgtaggttggttttttttgtattttgaagaaagaggattgagttttttttgaagatttagtttttgtggatcgaggataattatgagtgattataatttaaagtattggtatttgaaatgttttaagtgttttagaaaaatgtaaaaatattgtttttttattgtgttttaattaatatatttttttttttgtagagttttgtaaatgggatggaggcgtgtttaagggtagttatagagtgaattgcgggcgttagggtggatgggtaaagtaggtttgggggttgtattttagtataggggagagagtgggggttagtgtgtgcgttgggtgtgtggaggttattgtagggtgttggggggggggtaggcgagtgggcgaagttgtgtttatataatttttacgatcgattagagtaaagtgtagagttaggggtgagttgaatgtggaatttaggttttttgtaaagttggttttgtgtgggggtttagtaggttagtagtttttaggtataggagttattagttttaggggttgtagtttaaggggttaggggttttgggggaatagtgttttggttaacgaggggttttttagaaagagggtatagtgtttaggaggtggtaatttttgagtttataattattttattttttgtagaaaaaggaaaaaaatttaaaagttttaagtaaattaggaaaataaaatttgaagtttttttttaattttgtttttttttttttttttaaaaaaaaaaaaatagattatgttttttttttttttaatcgttattttatttatgtgtaatgatttttttagtataggattagagagtgagggttatttacgtggaggggaaattttgattttgaggagttattagatgttgtaaatgtggttttgtgaagttaaatatttttttttgatttcgggtttttggagtggagggggagaggatttttgtgaagtttagtttttaaacgatggaagtttttagaagttttttttgtagattaattttttgtgtgtgtggtgggggagagaaggagaggagtattttaggatatatttgttttgggtatgagaggttgagcgttaataagattcggtggtttgggtgtttttggggaggttgattcgggttttttttttcgttttttttttttgtttttttttatggtttgtgacgaatcgtgatttttggaggagagtatcgtgggggagtagcgtttatttgattaggtttcggtagtttttattgagcggagttggagtttagttgagtttagggattttttaggcggtgtgtttgcgttgtttgtttcgtttttagtaaaaatagatataaaataggattcgtgttttttttagaggaggtcggtttgtttgatgtgtttatttgtatagtatgtggatgttatattattgggtggtgtttgggttggattagcgatttggtttagtgggatatttgtaaatttttgattgttttgttttttatttttggtatttttttttgttttagtttttttttttttttttgttttttttcgttatttatttttttttaaatgtaggtagaaggttttttatacgggttgttattttggggtttgagagattgggtgtgtagttttgtcgggaggtggtatgtgtatatagtttatttttgtaaggggtagggtgggtggggtgtgtttttggaagtaaaagtttgagttgtatagagttttttgtgggtatagttggacgtggggtgtttttaggtgcggttagtttttttttagtagagcgtagggagaagacgtggtttggtattgagtttgggtgatttagggtattttttgaaatttttttgttttaagggatggcgtgaggtttttttttttttttttatttttagatagttttagatattttggagagtattttaggggtcgttttttttgtagattggtcgattttttagagtgaaataatgatgggttagaaagtttgtttttacgtttaagtttagagggtttgttttttgtatgggttgaggggagttcggcgtagaaagtaattttagttatagattaggttgttgattgagttttttagagaagttgttgttttgttttttcgttttttattttttgtttttttattttatttgttttttacggtttagtattgtttttttttttagaggttaggtggttttatttttttgtttttttttttttttttagattatttggtttttttttcgtattagtagaggttttaaatattagtttttttgataaggttagatattcggatatgttggggtttcgttatttatttatttgggttttgttttttttttttggggttacgcgtatttttttttcgtttttttttttagtttttttttttttatttttttttatttttattttttgtttagtatttttgttgaggatagaagttgtttttttttttgttttagtttttaggtttttttttgggtattgtttttgttttttttttcggtttttgtcgttagatggtttttttattttgttttcggttcgggtttggtcggtttgggaaattttcgtagttttaggtcgggaggttcggaagttaggtagtttttttcgtttatttttttttggtttcgttagtagtttttgcgttttttttattttttttttttttttttagatttgtattcgttgggttttgtagttatggagttcgtttgtttggtatttttaggtgttgtttttgtttttagtttttggggttggtttttaattttttatgttttttttttttttgattttttttttttatagtaattttacgtaatttttttttatttagttatttagtttttatttttttttggattttttttgttttggtcggtggaatttttgtattttagtttttttgtgattgtatttagggttttttgaatttgggagggattttgtattttagttttttttttttaattttatggttttttttattttcgggttttggggatgtgagtttttagttttttggagggtttaggttttggatagtttaggaaatttagttatattttgtatagtattttgattgtggtttggttgtaggtggattgaggtaatgttgtttttttcgtgttaaagtttaggagttttggggtggttgtagggttttttggatttttgtagttatatttttatggtattagcgttgagggtaggttcgttgggaggtagttgttaagatatatagggtttcgggggattatggttggtatgtggagttagttacgttgggtgtttattgtgtagcgttttttagtagtgttgtgtagcgggtacggggttatttttaagttgttataggttttatgattgtgggtgtagtttggttttttttcggtttgggttattttgtgaagtagggtgtaggagatattttggtgattgggatttttgtttttatgtttgttcgtttgtatattaagtttcgtggagtttcgtggagtttcgtggagtttcgtggagattcggtttatatgtatgaaggttgtaggttttgagagatgaggattttgtagtttttggggacgttggaaagattatatagttagttttgtcgaagtagatattttaaggtaggcgattagttcggatgtgaacgtgtagtttgaattatgttgttgtgtgtttttgagttgattttttttttttagattattgtttgtttttgttgagttatttcgtttttattttaagtaatggatatttttttttaggtttaaataatgttttaggtgtgtgtttttgtatagttttaaagtgttttagtatcgttgttaggggagtttgaagttatatttgggagttggaaagggaggtatagtgtgggtaggtggtttcgtgtttagggaggaagggattttgcgtttgtatgttgttttttgtattttagttatttagagatttttttataagattattattgtttttattttggagtttagttaagaggtaggtgttttagatagttaatgtattaaatttttgcgtatatgggttttatttgggggttgagaaaaagtcgataggtcgcgttgaggttttattttcgagtatttaaattagaattttttttttgttgatttttttgatggggattttaaaatttaggagcgaacgtgggagggggagatgtgggtgtaattgttagttttaagttttttgttgtttttttagttcgcggatattttttagttttcggatgtttcgtttgtttggttttttagtttttggacgttttttagttttgtttgatgtttgtgtgttttgggtttcgtttgttcggttgggtttggtatggagtt

SEQ ID NO: 1669 - DNA, 6668 bp, Artificial Sequence
  chemically treated genomic DNA (Homo sapiens)
  unsure 4733: n is a or g or c or t
agatttttcgggatttttagttagtggtatagagtagtttttttgtttacgtttgtagaagtagatatgttcgggtggtttattttgcgtggttgggggcgtgggggtggttgggttgtcgtttgtttttatttttatttcgggtgcgttttttgtttcgtgcgttgcgggggagaagagcggggcggtgcgtagagttagagttgggtttcgggcgagagtttagttcggtcgagtttaggtttttcgttttaagtttcgtttcgggttaggaggttgagttgcgggtggaaatcgtttttttttgtttcgtttcggggttttttttttcgtatttcggttcgggtcggcgtttgaattttttaattagttcggttgtattcggattttttttaaattttttttttagatttttgtttcgtacgtttttgtttggagatttcgcgcgttttgcgtttttcgtttttttagttatcgcgggttaagttttttagtgcgcgtagggtatgatcggggcgtattttcggttttttaataggtagttttgggcggttagcgcgggcgttttattagtagggtgggatgaagggtttttcggagagacgtaaggcgagtttttatttatttatttatcgaggttttgagtatggataagcgtttttagttcgggtatcgtgggggatttttagggtcgtggtttcgcgggttggtttaggagcgtttaggagtttggggtaggggtgggggtgggggttttaggatcggtacgtgggggttttagaatttttgcgtttattcgcggggtcgagttgtttttttagaagtcgcgtttggttaggatttgggttttgttttcgcggaagttttgttttaggttagttttcggaggtaggaggatggggaggaggcggttaggtttgcggtataaattaggttattaatttttgtttgtttttagagaaggtaaagtttttgttttggaatacgtttttaaagatatagtttttggaaggggaagggaaaggatggagaggttgcgcggtgttgattttattcgataggtaatgttcgcgttttttggagtgggaggggtcggggcgatgagaaatttttgggggatcggggtaggtggatacgcgcgttcggagttgtttaaggtttggttttttcggcgatgattttatttaagagttaggtttttattttagggaattttttcgttttttggagttggggggatgggagcgatgggaaatttttgggggtttggggtaggtggataggcgcgttttgggttgtttaaggtttggtcgttttagggttggttttatttaagggttaggtttttattttaggttttagtcggggaggaaggcggtgaattaggtacggtgttttgtgcgcgtttttcgtttttcggaggttcggggtttcgtgttttcgtcgcgtttttgggtgttattcgcgttttgtcgaagtttttagttttgggaagtaaagtgtgtttttttttggttttgcgcggtggaggttttcgttttttttatttgcgttttgacgttggagagacgtggttaaagattgggagtttgtttgggagttttgtcgattttttaagtcggtgcgttttggggacgcgaatttcgcgtttggggtacgggtaggaggaaggaaggattagttttttttttgtttttttgcggaggttcgtgttagaagtggaaatgatagtcgaaatatatttttaagatgtgttttttagaatatgaatgatcgtagaaagggggttgaatttatttttggcgagggagggtcgttttttttttgtgtagcggtggtttttagtaaacggttttgttgggtttttttttcgtgataaaggtttttgttttttgaaaaatataacgttttttttaaataaataagagtttttttaaataaaatatagaggttttgtgattaaattcgaaaggaaagaggtttaatgtttattatatgttgtaaagtatatgttaaggtttaaaagagagagagagagagagagagagagagagagagagagagagaagtaaattttatagaaggtttttgagaaaaagtaaataacgtttttttttaggaagttttattttaaaaattgtaagtttgtatggtggggtattttagagatatttttttttgtatatatatatacgtaggtattaggatttgtagaaaaagcgagataaaatgaaataaatagaaaaaaaaaaaatttatagaaaaataaagttatatttttaaggtaggtttttagatatatatggttagttaggtttttagagagaagaaaaaattaattagggtttacgtgttttttttaaatattatagaggttgtttttgtttattggattagttttagttatttacgagttagattgataaattttattttaatgaaaatttattagttttacgcgggtaacgtggatgtttgcgttaattaataaatagcgtcggagggagtataaatttaggtttttgattttaaaaggggagggggaaggaaaaaaaaaataataagagttcgtttaggaaacgtgtcgagacgtttgtaaaattttgaaattttaaatatatttttatatatatttaatgtgcggggaggggttggtggttgttataggggtcgaattttggttcgagattatgaatatttattttttcgtgtttattatgaatagaaatggtttttcgaattatgtgtttaaaaaaaaagtgggttatatggaaggggtattttttgaaatagttgtaggagatatatttaacgttaatgacgagtttatgggtgtagtagattagtatggtatatgtatacgtatgtaattaatttgtacgttgtgtatatgtattttaaaatttaaagtttaataaaataaaataaaataaaataaaataaaataaaataaaataaaataaaaagaaaagtgttttttttttggttggaggatttaggaggaggttttagttttttggtgggggtgggcgtggagtagggggcggggaagggatgagggttttaggttttgtattgaagagggttggaggttttagagggtttcgtataaatgtcgttttgtaattaagagttttgggcgtgaaatttgatttaaagtaaatatattaggttttagagagcggagtttcgttggagttaaaattgaaaaaatataattaaagttatatttttcgggagttaaagaaattaagtgtttagtatttgaaggtttacggtttttattttttttggtgttgtaaatgatagagagagagagaaaggagagagagaaagaaaagagaagagagagagagagagaagatagaaagatagagatagagaagagagagaaaagatagagagaagagagaggatagagagaaagagagagagagaaagatagagagagagagagaagatagagagagaaagaaaagagaagagagagagaaagaagatagaaagatagagagagagaagagagaaagagagaggagagaagagagagaggagagagagaagatagatagagaagagagagaaaagagagagagaagagagagaagagagaggatagagagaaagagagagaggagagagagaaagatagagatagaagagagagaaagagagaagatagagagaaagagagagaggagagagagaaagatagagagagagaagatagagagagagaagatagagagaagatagagagagagagagaaagatagagagagagaagagagagaaagatagagagagagaagatagggagagagaaagagagcgagaagagagagagaaagatagggagagagagaagatagagagagagagaaagagagagaagatagagagaggagagagagaagatagaaagatatagagagagagaagatagagagagagaaaaagttagagagagaagatagagagagagaaaaagatagatagagaagatagagagagagaaaaagatagagagaagatagagagaaagagagagaagagagagagaagatagagatagaaagcgagagaaagatagagagagaaagttagagagaagagagagagagagtaaatgatttattttttaaaacgtatttaatttatatagaaaaagttagattatttgataaagtgggttagttttagagttttttttttttcgtagttattttaagcgcgtttttcgagtttttttttagtaggtgcgttttagaaagcgttggttaggacgtatggttgttttatagattttttggggacgggagtgagagacgtttggacgtttaagcgtaagtttttagtttttaaggttttataatagatatagtagttattgagttttttttttggtttttttttcgtttttggggagagaaaagagaaggggagaaacgttattattagtaattgtttttagttagtaagacgtacggcggggaggtcggggttggtcgcgttttgtagtttttgagttgcgtgtttgagttttttttagtttcgtttgcgtttttaggggcgaaataagaagtaaattttgttgggatcgagtttaggtcgaggaatttcgggattttttgtagttttagttttgtcgcgtttttcgtagtttcgggtttgttgcggggagttggggaggaatttagggaaggggggaattaggtcgggataagaggttntcggtttgttgtgggttgtatgacggggtgtaaaggcgaggagaagtttttgggatttttggtttgtttgttgcgggatttttagtttcggcgggcggatcgcggagagcgttgtttcggattcggagattcgttttttttttgcgattgcggggttggcgcgcgcgcgcgaggggttagtattttgggtattggggttaatgtaattagggtaggtttttggggggtttttaggagttaataggggtttttgagttattttgcggtcgtttgtttttgttcgggttttgagaataggggttttttatattttgttttttttttttggttttgttttatttcgttttcgcgcgtttttttttattgtaaatagaaatgggagggtggataggcgggtaggagcggattagacgtttaggacgtagtagttcgagttcgtatagggtttgcgggaggtggtgatcgcgttggggacgttaggacgcgaatgaattttcggggcgcgttcggggtttgcgtttagagtttggtgagttcggttttggaatttttttttttttttttagaaagttttgttttttttttttttttcgttcgttttttttttttttttttttttttttttttttttttttttttttttttttttttttttttttttttttttttttttttttttttttttatttggtaagattggttttggagtttttttttttttttttagaaagttttgttttttttttttttttcgttttttttttttttttttttttttttttttttttttttttttttttttttttttttttttttttttttttttttttttttttttttttttttttttttttttttttttttttttttatttggtaagattgtttttggagttgatttttttttgtttttatttttttgtttttttttttttttttgtttttttttgtttttttttttttttttttttttttatttttttttttttttgtttttttttttttattttttcgttttttcgtttttttttttgtttttttttgtttgtttttttttttttgtgttttatatatattttaatttatcgttatttatgtttttttattgttgtgttattttatataagtttatagtttagttgttattttgggtttttaggtttcgtcggggaggaagatgcgtcgtggggttacgggaggaaggggatttcgggttttttggtgttttattttatttgtagaaggtttttggtaggaatcgtgacgcgtttggtttttaggatttggaaaacgaattttaggtcgcgatggcgagtatcggttttttttgaagtatatttaatagcgagaggcgggagggagcgagtaggagtattttattatgaaaattaaaaatataagtattttttttattcggtaaatattttagacgttagggtgatagcgcggcgttaagggaggaggtttcgcgtcggggttcgtcgggatttggcgcgggcggaaagaatatagatttttacgaatcggatttttcggggatttgggtttttttttgcgggcgttggagattcgggaggcggtttcggggattttcggttttcgtcgtcgtcgttttttaagcgttcgcgtttcggtttggggatattcggttttttttttttattttcggggattttttagtcgcgttttattttattaattttttatttaagggcgcgtcgttattaatttggagtttatttttttttaagatcgtgcgttttcggggcgttcgggttttttttttcgttattttaatttcggcgcgattcgggcgttttttggaaagatttaggcgtcgggttttgcgtttttttcgggagcgagggcggtcggacgattgggatttttttttttttagtcgtgaattttttgtttttttgtttttttttgtagg

SEQ ID NO: 1670 - DNA, 6668 bp, Artificial Sequence
  chemically treated genomic DNA (Homo sapiens)
  unsure 1936: n is a or g or c or t
tttgtagagagagatagagagataaggagtttacggttggagagaggagggttttagtcgttcggtcgttttcgttttcgggaggagcgtagagttcggcgtttggatttttttaggaagcgttcgggtcgcgtcggggttgagatggcgaggggggggattcgggcgtttcggggacgtacgattttgggagaagatgagttttaagttggtggcggcgcgtttttggatggagagttggtgagatggaacgcggttggagaattttcgaaagtgagaagaaggggtcgggtgtttttaaatcgggacgcgggcgtttgggaggcggcggcggcggaggtcgaggattttcggggtcgtttttcgggtttttagcgttcgtagaaagaagtttaggttttcgggagattcggttcgtaaagatttatatttttttcgttcgcgttagatttcggcggatttcggcgcgaggtttttttttttagcgtcgcgttgttattttggcgtttggggtatttatcgggtgaaaaaaatatttgtgtttttggtttttatggtgggatgtttttgttcgttttttttcgtttttcgttattgaatgtgttttaggggaagtcggtgttcgttatcgcgatttgaaattcgttttttaagttttggaaattaaacgcgttacggtttttgttaaggattttttgtaaataaagtggggtattaggaggttcggagttttttttttttcgtaattttacggcgtattttttttttcggcggggtttggggatttaggatgatagttgagttgtgaatttgtgtgagatggtatagtagtggggggatatgagtgacggtgggttggggtgtgtgtaagatatagaaagagagagatagatagggagaggtagagagagaaacggagagacggggagatggagagagagagatagggagagagagagatggagagagagagagaaagagagagataaggaaagatagagagaaagggagagatagagggatggagatagagaaagattagttttaaaagtaattttgttaagtgaaagaaagaaaagaaagaaagaaagaaagaaaggaagaaagaaagaaagaaagaaagaaagaaagaaagaaagaaaagaaagaaagaggaagagaggaaggaaggaaggaaagaacgaaggaaggaaagaaggtaaagttttttggaaaagaaaaggaaagttttaaaattaattttgttaagtgaaaggaagaaagaaaagaaagaaagaaagaaagaaagaaagaaagaaagaaagaaaagaaagaggaagagaggaaggaaggaaggaacgaacgaagaaaggaaagaaggtaaagttttttggaaaagaaaaggaaagttttaaaatcgagtttattaagttttgagcgtaggtttcgagcgcgtttcggaggtttattcgcgttttggcgtttttagcgcggttattatttttcgtaaattttgtgcggattcgggttgttgcgttttgggcgtttgattcgtttttattcgtttgtttatttttttatttttgtttgtagtagaaagagacgcgcggaaacgaaataaaataaaattaaaaaaaaaaaataaagtgtggggagtttttgtttttaggattcgggtaaaagtaggcggtcgtagggtgatttaaaaatttttattggtttttgggggttttttagggatttgttttggttgtattgattttaatgtttagggtgttgatttttcgcgcgcgcgcgttagtttcgtagtcgtaaaggaaaagcgaattttcggattcgggatagcgtttttcgcggttcgttcgtcggggttgggggtttcgtagtaaataagttaaggattttaggggttttttttcgtttttgtatttcgttatgtagtttatagtaagtcggnagttttttatttcggtttggttttttttttttttgaatttttttttaatttttcgtaataggttcgaagttgcggggagcgcggtagggttgaggttgtagagggtttcggagtttttcgatttgaattcggttttagtaagatttgttttttatttcgtttttggagacgtaggcggggttgggaaaagtttagatacgtagtttaggagttgtaggacgcggttagtttcggttttttcgtcgtgcgttttgttggttgggagtagttgttggtggtgacgttttttttttttttttttttttttttaggggcggaaaagaaattagagaggagatttagtagttgttgtatttgttgtaggattttggaggttggaggtttgcgtttgggcgtttaggcgttttttattttcgtttttaagaaatttatggggtagttatgcgttttgattagcgttttttagaacgtatttgttggggggaaattcgaggaacgcgtttaggatggttgcgaagaggaaggaattttgagattggtttattttattaaataatttggttttttttatgtgaattaggtacgttttaaggaataagttatttgtttttttttttttttttttttgattttttttttttgtttttttttcgttttttgtttttgtttttttttttttttttttttttttttttttgttttttttttgtttttttttttttttttgttttttttgtttgtttttttttttttttttgttttttttttttgattttttttttttttttgttttttttttttttgtgtttttttgtttttttttttttttttttttgttttttttttttttttttttttttttgttttttttttttttttgttttttttttttttttttcgttttttttttttttttttgttttttttttttttgttttttttttttttttttttttttgtttttttttttttttttttgttttttttttgttttttttttttttattttttttttttttgttttttttttttttttttttttttttttttttgtttttttttttttttttttttttgtttttgttttttttttttttttttttttttttttttttgttttttttttttttttttttttttttttttttttttttttttttttgtttgttttttttttttttttttttttttttttttttttttttttttttttttttttttttgtttttttgttttttttttttttttttttttttttttttttttttttgttttttttttttttttttgtttttttttttttttttttttttttgtttttttttttttttttgtttttttttttttttttttgtttttgtttttttgtttttttttttttttttttttttttttttttttttttttttttttttttttttttttgttatttgtagtattaaggggaatagaagtcgtgaatttttaaatattgaatatttgatttttttaattttcgaaaagtatggttttgattatatttttttagttttagttttaacgaagtttcgttttttggaatttgatgtatttattttaaattaaattttacgtttagagtttttaattgtagagcggtatttgtacggggttttttggggtttttagttttttttagtgtagaatttaaggtttttatttttttttcgttttttattttacgtttatttttattagaaaattgggatttttttttgggttttttagttagggaggaaatatttttttttttattttattttattttattttattttattttattttattttattttattagattttaagttttagggtatatgtgtataacgtgtaggttagttatatacgtatatatgtgttatgttggtttgttgtatttatgaattcgttattgacgttaggtatattttttatagttattttaagaaatattttttttatgtggtttattttttttttaagtatataattcgaaaggttatttttatttatgataagtacggaagggtgggtatttatggtttcggattaaggttcggtttttataataattattaattttttttcgtatattaaatatgtataaggatgtatttagggttttagaattttatagacgtttcgatacgttttttagacgaatttttgttgttttttttttttttttttttttttttttaaagttagaaatttggatttgtatttttttcgacgttgtttattgattgacgtaaatatttacgttgttcgcgtgaagttaatagatttttattaaagtgaggtttgttagtttggttcgtgaatggttgagattgatttagtggataagggtaatttttataatatttaaaaagggtacgtaggttttggttggtttttttttttttttagaggtttggttgattatatgtgtttaaggatttgttttgggaatgtagttttgtttttttgtgggttttttttttttttatttgttttattttatttcgttttttttataagttttagtatttacgtgtgtgtgtgtgtaggagagggtgtttttaaaatattttattatgtaaatttgtaatttttaaagtaaaattttttaggagaaaacgttgtttgtttttttttagggattttttgtggaatttgttttttttttttttttttttttttttttttttttttttttttttttttaaattttagtatgtattttgtaatatatggtgggtattagattttttttttttcggatttaattatagggtttttatgttttatttaagaaaatttttatttgtttaagaaaaacgttatgttttttagggagtaaaggtttttgttacgaagaagaaatttagtaaggtcgtttgttggaggttatcgttgtataaagaaggggcggttttttttcgttaggaataaatttagttttttttttgcggttatttatgttttgaggaatatattttggaggtgtatttcgattgttatttttatttttggtacgggttttcgtaaggggatagaaaaagaattggtttttttttttttttgttcgtgttttagacgcgggattcgcgtttttaggacgtatcggtttaagaaatcggtaggatttttaaataggtttttagtttttggttacgtttttttaacgttaaaacgtagatgaaaggaacgaagatttttatcgcgtagagttaggaagaggtatattttgttttttaagattagaagtttcggtagaacgcgaatggtatttaggggcgcggcggggatacggggtttcgagttttcggagagcgaggagcgcgtatagggtatcgtgtttggtttatcgttttttttttcggttgaggtttgaggtgaggatttgatttttgggtagggttagttttggggcgattaggttttggatagtttagagcgcgtttatttatttgttttaagtttttagaggttttttatcgtttttatttttttaattttaaggaacgggaggattttttgaggtggggatttgatttttgggtagggttatcgtcggggagattaggttttggatagtttcgagcgcgcgtgtttatttgtttcgattttttagaggttttttatcgtttcgattttttttattttaaggaacgcgagtattgtttgtcgggtggaattagtatcgcgtagtttttttatttttttttttttttttttagaagttgtgtttttggaaacgtattttaggatagaaattttgttttttttaggagtaggtaggaattaatggtttaatttgtgtcgtagatttggtcgttttttttttatttttttgttttcgggggttggtttggaatagaattttcgcggggataaggtttaagttttgattaagcgcggtttttggagagatagttcgatttcgcgggtgagcgtaggggttttggggtttttacgtgtcggttttggaatttttatttttatttttgttttaggtttttgggcgtttttggattagttcgcgaggttacgattttaggggttttttacggtgttcggattgggggcgtttatttatgtttagggtttcggtgggtgggtgggtgggggttcgttttgcgttttttcggggaattttttattttattttattaatgaggcgttcgcgttgatcgtttaaggttgtttgttggggggtcggggatgcgtttcggttatgttttgcgcgtattggggaatttgattcgcggtggttgggaaggcggggagcgtagagcgcgcggggtttttaggtaggagcgtgcggggtagggatttgggggagggatttgggggaggttcgagtgtagtcgggttaattggggagtttaggcgtcggttcgggtcggagtgcgggggagggggtttcggggcgaggtaggggagggcggtttttattcgtagtttagttttttggttcgaggcgaagtttggggcgagagatttgagttcgatcgggttggattttcgttcggagtttagttttggttttgcgtatcgtttcgtttttttttttcgtagcgtacggggtagggggcgtattcggggtaggggtgggagtaagcgatagtttagttatttttacgtttttagttacgtaggataaattattcgggtatgtttgtttttgtaggcgtgggtaggagagttattttgtgttattggttgagggtttcgggggattt

SEQ ID NO: 1671 - DNA, 6084 bp, Artificial Sequence
  chemically treated genomic DNA (Homo sapiens)
  unsure 5435, 5439: n is a or g or c or t
ttaagtaattcgtttggtacggtggtttatatttgtaattttagtattttgggaggtagaggcgggtagattacgaggttaagagatcgagattattttggttaatatagtgaaattttatttttattaaaaatataaaaaattagttaggcgtggtggcgggcgtttgtagttttagtttttcgggagattgaggtaggagaatggcgtgaattcgggaggcggagtttgtagtgagtcgagattacgttattgtattttagtttaggtgatagagcgagatttcgttttaaaaaaaaaaaaaattaagtaatttatgaatttgtgcgtgtgttaagtattttttgaatgttaaatgtttttaaatgttagtttttttaagataatttggaaagaaagttaaatatttattaataatgaatgaaaggatgtaaaagagaaattggaaatagattttatagatcgtgatagttaagggtatggtttttgtttaatatttttttatttgtttaataaaaatgttgagggttttttatgtgttagttattgtgttaggtatagatggaaatatagatatgtattttgttttttagggatttattttatttattgttatgttatagtagtttaataaatatttaaattttttaaaaaggttaaggtcgcgtatggtagtttacgtttataattttagtatttggggaggtcgagatgggtagatggtttgagtttatgagtttgagattagtttgggtaatatggtgaaattttgtttttattaaaaatataaaaaaattagttgggtatagtggtacgtatttgtgtttttagttatttaggaggttgaggtgggaggattgtttgagtttgggaggtagaggttgtagtgattaagattttattagtgtattttaatttgggtgatagagtaagatttcgttttggaaaaaaaaaaaaaaaagaaaaaagaaaaaggttaaattttgataagtgtaaagaaaagatttggatttatggaaatgagtatttgtgggttgggtatgaggtaggggttgtatttaatgtattggatagttattattgtattttaatgaatttaagaataataattatttaaattaattgttagtattatttatttttattagttatataaaaattttaatgattttttaatttttttttttgatataaggattttgttttgttgtttaggttggagtgtagtggtgtgatttttgtttattgtaatttttattttttgggtttaagtgattgttttgttttagtttttcgagtagttgagattataggtatttattattatatttggttaatttttgtagttttagtagagacgaagttttattatgttggttaggttggtttttaaattttgattttaggtgatttgtaggtattggttttttaaagtgttgggattataggcgtgagttatcgtgttcggttttaattttttgaaaaatgtgatgtttagtatgtaattttttttttaaagaaatttgattatattgaaggaaaattatagttatgggcgaatttattttttaattatttgggtttttgggaattttttttagttattttttgttttatttttggatgtttatgttgtgtttttaatttttttattatgtttaggaaaatttgtttgggatattgtttaatatatttattaattttagatagtgattggtaataggtgtgtttgataaagaaaatattgtttttgttttgttgtaggtatgtttgataagttggggatttgtttttttttgtaaagtttataggagtttatttgggagggaggaatcgttttttagtttttaggttgaaaaagattttgtttcgttattagtagagttaggtttggaagggaatgttaatatgtttttagatttatttatttaagttgaatgataaatgggtattagtggtttaatgtaagaggagatagttatagttttttgggtaagagatatttgtgattgtttggaaataaatatagtttatcggtgatttaatagatgggtttggttttgtgaattggtttattgtaaaataattatattgatatgaagatatttggaaattatttgtttagttttaattagtttagttaattttgatagtattatttgagaggttgaggtataagaatcgtttgaatttaggagatggaggttgtagtgagtcgagattataaaataaataaataaataaatattaatttaatataaatttatagtaaaatttttaaataaagatatttttattagtgtttgttttatttatttatttatttttatgtttttagagatggagtgtttttttgttatttagatgggagtgtaggggtataattatagtttattatggttttaaatttttaggtttaagtaatttttttattttggttttttgattagatgagattataggcgtatattattttgtcgggttaatttttaaattttttatagggacggggttttgttatgtttttaggttggtttggaatttttgggttttaagcgatttttttgttttggttttttaaagtgttgggattataggtgtgagttatcgtgtttggttagtgtttgttttatttataagaggaaagtaatttatattattggtattttaattacgggttagatgtaggattagagcgttatgttttattgtaatagatggaattattatttgatgtgatttgaggggattaggaaggttttttatttagatgtggtttgaaaatatttgttatcgttattgaaattttattaattggaggattatttggataggttttatagtttataaaatgtttttttatggataaattgttaaggaagtagagttaattttttgtttagaaaaggtgtttagttatttttatagtggagttatttttttttaaatggaaggtatatttttttgagagggggagtaaattaaatttataatggtgatgtttatgttttatttatagttattatttagaattaattaaattagattgagtttcgtttaaatttaggtaggaatttttagagatggaattaattcgattaaatttgttttgtataaaagggaagtggggaaagtaagaagtaatttggatttttttagaggagagtaggtataaattaagttaagaaaagtacgtttgagaattttagaggtagaagttgtttttgggtgtttgacgttaacgatttagtattttaagattggtgtgcggtatttttaggggatattgtgttttgggtatttttgtagtttaagagaatttattagtttataaggtaagttttcgattgttagtagtgggttagagatagattgttatttttagatggataaatgttgttgggtagaggaagggatgcgggataaggaggataaaatttgattttggtaaagtcgggtgtttagaattttaatcgttacgttggtaagtttttttttagttcgtatttattttattgtttgtagagcggtttaggggttttgggggcgagaaatatattttattttagagttgtttttcgtttaggatagaatttttttgttttttacgattaggttaaggttatatggttatgttaagtatatagtttgtaaaaatggaaaatttatttttaaattgaagtgaatcgaattttattgattttttcgtgtattgaggagttataatttttttttaaaaatgtgaaagtaaaattgtagtttaaattatgtaattaggaatattgtaaattagtgttttgtatatataaattttattatatattgggaatttgtatatacgtgttcggtatgggatttttttatttttatttttatttttttgagatagagtttcgttttgttgtttaggttggagtgtaatggtttgatttttgttttattgtaatttttgtttttcgggtttaagcgatttttttgttttagttttcgagtagttgggattataggcgtgtattattacgttcggttaatttttgtatttttagtagagatagggttttattatgttggttaggttattttcgaatttttgattttaggtaatttatcggtttcggtttttttaagtgttgggattataggcgtgagttatcgcgttcggacggaatattattttaatagattttatatggaattttagttagggtttgtaaatgttttagatgtttgtttttgtttatagtatttattaaagaattgtaagtgatgttttttttttattattttaagaagtggaatgtagagtttttaattagggattttttagatgagtatggatataggaaaacgcgtgtttttttattatttattttttagttgaaataagtttttgaagttcgtttcgttgttgttgaggagcggtttaatttcgggagaggttgggattttttttaggggtggggtttcggtcggcgggtagggtagtcgttttttttttgggattgagtggagttgggaaggattcgtggaggcgttgggttaaattagtagataaaataagggggagggtataaggtcgcggcggcggttagtttggggttcgtatttcgttgggcgattttttcggtcggagtcgggggggttacgcggtttcggaataaagcgtcgcgggaggagttgttttgagtcgacgggtaagcgttagtttttcgcgggttagagcgttacgtgttaggattcgttgaatgcgcggtgtacgggcgtagtaacggtagtcgagtagttttcgtatttattgtcgtttttggagattcgtatagttacgttcgcggaggtcgtcgtcggtcgcgttaacgtttgtgcgtttgcgcgttcgcgaaagtttcgtttttttaggtttttagcgcgcggggtcgcgtttttttatggtcgtcgtcgtagtgtgtggtatttagcgggggcgcgcggcgggttcgaggacgcgcgaaacggcggcggcggcggcgtttaggggggagtcggggcggtcgttgcggggcgcgtttttaagaggcggcggcggtttagggtgtttcgtcggtttcggcgtcgggaagaggcggtggcgttgttcgcggtggcgggggttgtagacggagcgtgttggtattaggatcggggttcgaggcgcgtttttcgttataggtaatggggtttcgtttgagggaggaatcgtcgttaggggttttttaataggcggggttttagttcggtattggcgaaggtcgggaaaggcggtttcgttaggggttggataatataatggttggggggtatttttgtttttttcgggattgggtttttatgatgaaggtatcgtatttatcggtttattgatgtagcgttgcggaggttcgagggagggggcgggtgtttttttttatttaatatattanaaantttatataatatattcgtacggtacggattcgttatacgattatttttgtttatgacggtgggagggggtgcgcgggcgatcgtcgatttgtttataataaaaaatgaggattcgatgcgcgttttttgtgtgggatttattatagagaggcgtgggaggtatttattacgttttgtttaaatttttagacgagcgtcgacgggtatttggtttatgttttatagagtgtgtcgtatcgagcggaacgtaattttgttaaaattgagtatcgattttaggatggaataggtttgtaagtttatataggggtcgtcgttcgtgtcgttttaatatgattcgaggggagggggtgtttttttttgtattagaacgggttttaaacgtgtcgcgcgtgtaggtcgagaagggtttacgtgatgcgatttatttttcgttcgcgatttgagtttttatgtaattatttcgggttgatatgataaagatgaagagagcggtttggttttatggttagtcggtttgagtgaataagtcggttaatttgtcgtattgttttagtgtattatatagtcgacggtggtagcgataggtgtatttcgaggggcgtttgtaatttatgtttatgtgtttcggttatatggtttttg

SEQ ID NO: 1672 - DNA, 6084 bp, Artificial Sequence
  chemically treated genomic DNA (Homo sapiens)
  unsure 646, 650: n is a or g or c or t
taggagttatgtggtcgaaatatatagatataaattgtaggcgtttttcggaatatatttatcgttattatcgtcggttgtatgatatattagggtagtgcgataggttaatcggtttatttatttaaatcggttaattataaggttaaatcgttttttttatttttattatgttagttcggagtggttgtataaaaatttaggtcgcgagcgaaaggtagatcgtattacgtggatttttttcggtttatacgcgcggtacgtttagaattcgttttaatataaggaaaaatatttttttttttcggattatgttaaaacgatacgggcggcggtttttgtatagatttataaatttattttattttggggtcgatgtttaattttgataaaattgcgtttcgttcggtgcgatatattttatgaaatataagttaggtattcgtcgacgttcgtttagaaatttaaataaagcgtggtgagtgttttttacgtttttttatggtaaattttatatagggagcgcgtatcgggtttttattttttattataagtaaatcggcgatcgttcgcgtatttttttttatcgttatagataaaaataatcgtatggcgggttcgtgtcgtacggatgtgttatataagntttntaatgtgttgaatgaggaagggtattcgttttttttttcgggttttcgtaacgttatattaataggtcggtgggtgcggtatttttattatgggggtttagtttcgggggaaataaaggtgttttttagttattatattgtttagtttttggcggggtcgtttttttcggttttcgttaatatcgggttggggtttcgtttgttgaaaagtttttgacggcggttttttttttaggcggggttttattatttgtggcggaaagcgcgtttcggatttcggttttggtattaatacgtttcgtttataattttcgttatcgcgggtagcgttatcgttttttttcggcgtcgagatcgacgggatattttgggtcgtcgtcgttttttgagagcgcgtttcgtaacggtcgtttcggtttttttttgggcgtcgtcgtcgtcgtcgtttcgcgcgttttcgagttcgtcgcgcgttttcgttaaatattatatattgcggcggcggttatgaggaggcgcggtttcgcgcgttgggagtttgggggggcggggttttcgcgggcgcgtaggcgtataggcgttggcgcggtcggcggcggttttcgcgggcgtagttgtgcgggtttttaaaggcggtagtaggtgcgggggttattcggttatcgttgttgcgttcgtgtatcgcgtatttaacggattttggtacgtggcgttttggttcgcgagaagttagcgtttgttcgtcggtttagggtagtttttttcgcggcgttttgtttcggggtcgcgtgattttttcggtttcggtcggaggggtcgtttagcgggatgcgagttttaggttggtcgtcgtcgcggttttgtgtttttttttttgttttgtttgttgatttagtttagcgtttttacggattttttttaattttatttagttttaaagaaaaagcggttgttttgttcgtcgatcgggattttatttttaaagagagttttagtttttttcgaggttgagtcgttttttagtaatagcgggacgagttttaaaagtttgttttagttgaaaagtgggtaatggggaagtacgcgtttttttgtgtttatgtttatttggaaagtttttaattagggattttgtattttattttttgaaataataaaaggaaaatattatttgtaattttttgatgggtgttatgagtagaagtaagtatttgagatatttataagttttaattggaattttatgtaagatttattaaaatggtatttcgttcggacgcggtggtttacgtttgtaattttagtatttagggaggtcgaggtcgatggattatttgaggttaggagttcgagagtagtttggttaatatggtgaaattttatttttattaaaaatataaaaattagtcgggcgtggtggtgtacgtttgtagttttagttattcggaggttgaggtaggagaatcgtttgaattcgggaggtagaggttgtagtgaggtagagattaggttattgtattttagtttggataatagagcgagattttgttttaaaaaaataaaaataaaaatagaaaaattttatatcgggtacgtatgtataaatttttagtgtatgataaagtttatatgtgtaaaatattagtttatagtatttttaattatatgatttaaattgtaattttatttttatatttttggggagaagttatagttttttagtatacgggaaggttaatagagttcggtttattttagtttagaggtaaattttttatttttatagattatgtgtttggtatagttatgtggttttgatttggtcgtgaagggtagaggagttttgttttgggcgaggagtagttttggggtgagatgtgtttttcgtttttagaatttttgggtcgttttgtaagtagtgaaatggatacggattaagagagaatttgttaacgtggcgattaaagttttaaatattcggttttgttaaagttagattttgttttttttatttcgtatttttttttttatttaatagtatttgtttatttgaaaataatagtttgtttttggtttattgttgatagtcgaggatttattttataaattagtggatttttttaaattgtaggggtgtttaggatatagtgttttttgaggatgtcgtatattagttttgaagtgttggatcgttgacgttaggtatttagaagtaatttttgtttttggaatttttaaacgtgttttttttggtttagtttgtgtttgtttttttttagaagagtttaagttattttttattttttttattttttttttatataaaataaatttaatcgggttaattttatttttgagaatttttatttagatttgggcggggtttaatttgatttggttaattttgggtggtagttatgggtgggatataaatattattattataaatttaatttatttttttttttaaaaaaatgtattttttatttgaaagaaaatagttttattgtgggggtaattaagtattttttttgaatagggagttgattttgtttttttgatagtttatttatagaaaagtattttgtaaattgtaaagtttatttaaataattttttaattgatgggattttagtaacggtgataaatatttttaggttatatttggatagggagtttttttggtttttttaaattatattaaatggtaattttatttattgtaatggaatataacgttttggttttgtatttggttcgtagttaaggtattagtgatgtaaattattttttttttatgaataaaataggtattggttaggtacggtggtttatatttgtaattttagtattttgggaggttaaggtaagaggatcgtttgaggtttagaagttttagattaatttaagaatatagtaagatttcgtttttataaaaagtttaaaaattagttcggtagggtggtgtgcgtttgtaattttatttaattaggaggttaaaatgagaggattgtttgaatttgggaatttgaggttatagtgagttatgattgtgtttttgtatttttatttgggtgatagagggatattttatttttaaaaatataaaaataaatgaataaataaaataggtattgatgagagtatttttatttgggggttttgttatgaatttatattaaattgatatttatttatttatttattttgtaatttcggtttattgtaatttttattttttgggtttaagcgatttttgtgttttagttttttagataatgttgttaaagttggttaaattagttaagattgaatagatgatttttaagtgtttttatgttaatatagttattttataatagattagtttataagattaaatttatttattgaattatcgatgggttgtgtttgtttttaggtaattatagatgttttttgtttaggaaattatagttatttttttttatattaaattattgatatttatttgttatttagtttaggtggataggtttggaaatatattagtatttttttttaagtttggttttgttggtagcgaaatagaattttttttagtttggaaattggaaggcggttttttttttttaaatagatttttataagttttgtaaaggaaagtaggtttttaatttgttagatatgtttatagtagagtagaaataatgttttttttattagatatatttgttgttagttattgtttgaggttggtgaatgtgttaaatagtattttaaataaatttttttggatatggtggagaagttagagatataatatgagtatttaagaatgaaataggaagtagttgaaggaagtttttaaaagtttaagtggttgggaaatgagttcgtttataattgtagtttttttttaatataattaagtttttttaggaaaaaggttatatgttaggtattatattttttaagaagttagagtcgggtacggtggtttacgtttgtaattttagtattttaggaggttaatgtttgtagattatttgaggttaggatttggagattagtttggttaatatggtgaaatttcgtttttattaaaattataaaaattagttaggtgtggtggtggatgtttgtaattttagttattcgggaggttgaggtaggataattatttgaatttaggaggtggaggttgtagtgagtagagattatattattgtattttagtttgggtaatagagtaagatttttgtattaaaaaaaaaaattagaaaattattgaggtttttatgtagttggtggaagtaggtgatattgataattagtttaagtaattgttgtttttgagtttattggaatgtagtgataattgtttagtgtattaggtataatttttgttttatgtttaatttatagatgtttatttttatggatttaaattttttttttatatttgttagaatttagtttttttttttttttttttttttttttttttttaagacggagttttattttgttatttaggttggagtgtattggtgagattttggttattgtaatttttgttttttaggtttaagtaatttttttattttagttttttgagtagttggaaatataggtgcgtgttattgtgtttagttaatttttttgtatttttggtggagatagggttttattatgttgtttaggttggttttaaatttatgagtttaagttatttgtttatttcggtttttttaagtgttgggattataggcgtgaattattatgcgcggttttagtttttttaaaaaatttaagtatttgttgaattgttatgatatggtaataagtagaataaatttttggagggtagggtgtatgtttgtatttttatttatgtttagtatagtggttgatatataaagggtttttaatatttttgttgagtaaatgaagaaatattaaataaggattatgtttttaattattacggtttatggaatttgtttttagttttttttttatatttttttatttattgttagtagatatttgattttttttttaaattattttggagaaattagtatttagaaatatttagtatttaagaaatgtttaatatacgtataagtttatgggttatttaattttttttttttttgagacggagtttcgttttgttatttaggttggagtgtagtggcgtgatttcggtttattgtaagtttcgtttttcgggtttacgttatttttttgttttagtttttcgaggagttgggattataggcgttcgttattacgtttggttaattttttgtatttttagtagagatggggttttattgtgttagttaggatggtttcgattttttgatttcgtgatttgttcgtttttgttttttaaagtgttgggattataggtgtgaattatcgtgttaggcgggttatttaa

SEQ ID NO: 1673 - DNA, 7698 bp, Artificial Sequence
  chemically treated genomic DNA (Homo sapiens)
  unsure 4162: n is a or g or c or t
tggtgtttggattgtagaggcgagttatgggtaagaaagttagtttggagcgggtttgttttggtaaaggcgttgtttattagttttattttagggtggtatatggaatttttattattttattggttgttttgtcggttttaattcgttcgtgtattttggttatgttagttatttgttttttaaagtttttgtatttttgtttaatagggttttttaataagaggtttaggagtttttagttttgggtattatatgtgttcgtggtttttttttgaggcgaggtttgatggttgttatgttttagttgtttaaagggatttgtgatttaggtattttgaggtaggtttattattttagtttgtttttcggtttcgagatttggattttataatgttatgatggggaaggttcggggtttaggcggtagtttagtttgttttgttttattcgtttttcgttttttgtttatgtgatatttggatgttttcgcgttcggggttatgtttgtgtaggaatattagtttttgttgttatttggtttacgtgttgtataggtattgaaggtttatttgagggttatattatagtgtcggggttagttagaggcgggtgggggatagggtttagggtaggtggggttagttttattttgatgatttggaagttgaggtggtaaatgttgagtgtgatgattttgttttcgttgggggttgttatttgtttgagttttaattttttatataaacggggtatattttagggtagaggtaggtagatgttgtttgtgagtgttagttttagtataggattttttgttttgtaagtgggtgttttttggcggttttgttatttttttttggtttaggggaaggagttaatttgtttggttgtttttgagagttgagatggttttaggagcggggtattttagaaagcggattttagtttagttttggggaggagtttttgaatttttatgtttttttttttagtggttagggcgtggatttcgtttgacgtttgtttttttttttttagagtattatttattacgtgagtcgtttattaaagttggaggtgtggtttagttatgagggtattacggtagttttgaggtttgtgcgggtgtcggttatgtcgatttcggattttattttttcgttgagtgtggatgaggattatgattttcgtttgtttggtttttcgttgttttttttttgtgttgtgtatttcgagtggatttagtattgcgttttttagcgtaggttaggttttattatttgaggttgttatttggcgttgtgggattgggtttttttgttttttttttttttatttggtttttttttattttgagttttttttagtttgagttttagtttttattttaaggtttttgttttaggtttgagttgggttttgggatgggggtttttatgttatagttcgtggattaggattggaatttttcgttggttacgttgtgttttggtttgtgtgtgttgggtcgtcgggttttgggatagttttttatagtatgtttgtaaggtgagtgttcgggtgttcgcgggtttattgtcgtttttattttattttttttacgaagagtattgtggtttttggttatagtgttatagaaattgtagtggttttttttgttggggtatttttttttttacgggtagggtattttttggttatgattttgtttgttttttagtgttttgtgagagatatgggtagagattggtttttttgttaagatggggaaattgaggtttagcgtgaggaaaggtttttgtttggattattttgaagttttatttttgggttttcgatattttttttttttttttttgtttttttttttatttagtttggagttttttttttacggtttgtacgttttgtttaagggggattttcgtattatttttttacgtgacgagtgggtttttgtcgatatggatttgttttatcgcgttgtggcgtttggggttcgtatggtttttaagttttattaggttggggaggggtgtgttagtagtatgggtaggtgggggatgaagtttttttttagggtaggggtattgatttttgttttcgttttttttattaggattattttacgtttttagatgaatatgaggagttagtagttttatacgatgttattgcggttaacgaggagcggttggttattttatatgagggtgattagtatggcgtagcgttatttttagtaatacgttttttttgttggttgcgttatgttttggatgatgttttcgacgagtataagattattatgtttaatcggcgttattttagttttcgagttattaaggttgggtcggttttatttgttttaagttttgttttaaatttttttggtcggttttttgattttggcgtgtggtttttaggtgaatcgggagtgcgtgcgcggtttgtggtagttagttagtgagttggtgtttttgcgtaatcgtaatttcgagcgtggtagtatttagaacgttaagtaggcgttcgtaatatgattaattttttttgtgattagtcgttgggtattttatttacgtgtcgttttttattatttcgttggttggtagtatttttagttacgggtattgtggggtggttttattagtttgggtgttattgtttattggtttttgcgtatttgggagaggtgaggtttcgggaaggggtgacgtgtggcgcgggaggaagttgaggtgtagtacgttttttttgggttttagagggaggacgtgttggagttagggtttgaatttcgagagatgatttttttttagagttgatttgttttttttagatgttattttatttttagagttgatagtggtttttagttattaagtattgttgataacgtatttttaaaagattttgtaaagtaggtggtagttttttagaggggaggattttggggtttagaggtgttagatgatttgttttggggttgaggatttatgtttgtgaggttttttcgttagtcgtgttttttttgattttttttttatttttttatttttaggttttataagggttgtggcgtcggttgtaatagtggcgggaacgtggatgatttagattgtagtgggggcggtggttgattttttttagtaataattttttcgtggtatattttatatttgagaatacggtaggtgagtaggcgaggttgggttgaattcgtgggtgaggagtgtagtttagttgaggtttttgttgttttatttgttttttataggtaatggtgattaattttttttattaggttttggttggggtcgcggttttttttgagtggttttggtgatgggcggtttttatttttgttgtagtggtttttttttcggttttttggattattttttgtatcgtttatttttatagagggttttcggattttacggttttttggttcgggtttttttagttttgagggttttagtggaaagtggagtttggggggtcggaaggggttgggaggatttgacggggagttagttttagggagttttaaaggaggtatttttaaattttaggtaaggtatttgtgggagggttgggttttagaaggttaaggtttgtttattcgttaatttttttttttttttttaggcgtttttagattttagttttagttttagttttagttttagtttcgatgttagtattgaggttttattttttagagttttttaggatattttttgtttggatagtagtgtttttgagagtgtatatttatgggtgttttggcgattggtttgtttttattgaggagcgtgagagttcggtagtttagtttttgttggaatattagtattgagttatttggcgtttattggattattttttaggatttagtaacggatttgttttgttgtttttttgttggattatagaattgagtggttttggtttatatgtttgaattttgatttttggttgttttggttagagtattaaaattgagtgatttagatttttgattttgatttttgattttttttatttttagtttagggtttgggttttttagatgagtagttagttttttagttagttttaagagttaaattatgggttggttttatttggagtttggttaggattattttantttttgggtttattgtttgtaggtgtgttttttgtttgatttggggtttgaattgtgggaagggtggtttttttcgtgttttttttttttgtttttttttttttttttttttgtgtttcggagatattagaattaataatattatttttgattttggttggtagtttttttttttatttgggaatgggtatatgatagtataggcggttaagttgggatggataagtacgtagaggggtgaaggatgtggggttgaagtttagtagagattaagggtagattaaggtggggtttaggtagaatcgggttttttttatcgtatggttgttttttttttaagtttttatttgaagggtattgtttgttattttttattatatggttagatttttaggtttggtggtttttatatttattaggtttgtttttggttaaagtttttttttgtattttagttgttttagggcgtaaagagatgatatttatttaaggtgtttttagaataaatgagagcgcgttagtggaatggttgtttagggtttagtgtttagtaagtgttttataaaatagtggtagatttttgagtatttgttggtcgggagttggacgttaggtggttttcgttagttttttcggttggtttggaaggtaggtataagttttttaggagaggaaatggttttagaatgagtattgttcggtgttgattttcgttaggtttggaattttcgttgttggtttttcgtcgtagatagttttcggtcggtttcgtttttcggtatggtttcgttttttagtatggtttcgtttttagcggagtcggcgtcgggagcggtagcgggagagcggtagcgggattttagcgcgggcggcggcggttggcgggagttttagaggtattggcgggagtaggggacgggaggtattattgtcgggttcgataggggagaggtggtttagtcgtgggttcgggtgatgtgtatgggagtggggttttcgttacgttcgtcgttagtatttttttaattttttttcgggttttagtttagtttcgagttaatatgtttagttttttgtttttgattagtcgtttttattttttttgtgtgacggtttagtttggttagttagtcggtgagtggaagcggcggtttttgatttttggtggcggtattgtgatttttttttttttaatattgtaagtgtgtgcggggtttttttttattttgaggttttttttttttttaggcggtttttattttagtttttggtttggtttgggaggaaatatttgtcgcgttttttggtagtcgaaatggggttatgatttttagatgtgttgggaagtggttagtttttttttttggggtagttaggtttttcggatttgtgggggcgggtcggttttttttttttatttttagtgatataggttcggaggaatgttttagttttaatggattttgtgtgaagttttagggtggggtagagttcgagaatattttttaaggtagcgtagagtttggtattgggttatagtaagaggtagcgtataggttgggtgtatatatgtatagattttatttttaagcgtgtagagtttagtttataaggagcggggtttgtatagatttttttttttatgtttttttatttttttatatattatagtttaggttcgagcgttgaatgtgtttagagtttggtttatggattagggttatattcgttatatatatatatagttagcgatatttattttattttttttagttttttagtagttttgggaggggatagaaataattaaatttaatttttttttttgtttttttggagatagttttattttgtttcgtaggttggagtttagtggcgcgatttcggtttattgtaatttttgttttttaggtttaagcgatttttttgttttagttttttgagtggttgggattataggtgcgtattattatattcggttaatttttatgtttttagtagagatagggttttattatgttagttaggttggttttgaatttttgattttaggtgattttttcgttttggttttttaaagtgttgggattataggttatagttatcgtattcggttagttaattttattttagagatgagaaaatagaggtttaaggttagtatgggagtttatttaggagaaattaaggtagaagtatttgggttggggagtcgatttttgtttggttttggaggttttagacgaagggtgtgtggagttttttttttattttttttcggtttagtttcgtatgatgttgttggatgttgtatgaagatttattattagatgtttgtatttttagtggaggttttttagttttttgtttttattgtttattttatttagggtttgtttgggtgtggttttttttaagtttttatattattatttgtatttgtttttggcgttacgttttcgtatttagtaggtttttggggttttgggtgttttaattttgtattttgtgagattttgaattttagtttaatatttattttttaaaatttacgtatatagatagtagtgggtaggtgtagttttgtttagggtttggagatgggtagatttaggtttatattttagttttgatacggaattgttttaggtaagagtattttttttggattttatttgattatttgttatatggggtttagatttttttgtttgtattagtgagattaggtaggtagaggtttttatgggtttttgttattgtgattttttttgtttttaagtttgggtatagtagtttgtaagaaggtgagttggtttgttttttagggtagggtgattggggttttatgatagttgttgtgattttagtattttttttaggatgtgggggtttggtagagggttgggtttatagttggggttattttttgtgttgaaggaagtttttttgttatttttgttgttttgtcgttgtttttttgggaatttatgtgtttttgtggtattgaggttttgaggtttagggtattgagattagatttttttgggtgattagttttttagggattttgaaggaagtgggaggggtagggaggaaggtttttggggataggacgttttttttttgttaagtgggtaggatttagatattagtggtttttgggtttttcgttttagttaatataagttatttgttcggttgggttaggttttggtgggatttttattttgggtttaggttaaagttaaggtgtgtgggtggcgattgggggattttgtagttttagggttgtttaggttttaggatttttaggattaagatttaatagtttagtttttagttttgtttagttaagttggggagggggttggaaattttagttttaggtagataaggaagtggtttggaaagcggaagtagttttgatggtttcggaggggtcggaagttaatacgggtggtggaggattaggttgggggttgggtttttgttttttgtttaggtttttttgagtagttttttttttttttagg

SEQ ID NO: 1674 - DNA, 7698 bp, Artificial Sequence
  chemically treated genomic DNA (Homo sapiens)
  unsure 3537: n is a or g or c or t
tttgaaggaggagggggttgtttagaggggtttgggtagaaaataggaatttagtttttagtttggttttttattattcgtgttggttttcggttttttcgagattattaaagttgttttcgttttttaggttatttttttgtttgtttagggttaaagtttttagttttttttttagtttagttgggtaaggttagaggttgggttgttgggttttggttttgagggttttggagtttgggtagttttgggattgtagggttttttagtcgttatttatatattttagttttggtttgggtttagagtaagggttttattaggatttagtttaatcggatagatgatttgtattggttgggacgggaaatttaggggttattggtgtttgggttttgtttatttaataaagggaggacgttttgtttttagagatttttttttttgttttttttattttttttagggtttttggagagttgattatttagagaggtttgattttagtgttttggattttaaggttttaatattataaggatatatgggtttttagggaggtagcggtagggtagtaggaatggtaagaggattttttttagtataggaagtagttttaattgtgggtttagttttttgttaggtttttatattttgaggaaggtgttggggttatagtagttgttatgggattttagttattttgttttgaaggataggttaatttatttttttgtaggttattgtgtttaggtttgggggtaagaggagttataatgatagggatttatagggatttttgtttatttggttttattgatgtagatagggaggtttgaattttatgtgatagatggttagatgaggtttagaggagatgtttttgtttgaagtaatttcgtgttagagttaggatgtgagtttgggtttgtttatttttaggttttaagtagggttgtatttgtttattgttgtttgtgtgcgtaggttttggggggtgggtgttgggttgaggtttaaggttttataggatgtaagattgagatatttaaagttttagggatttgttaagtgcggaaacgtgacgttagaggtaggtgtaaatggtggtgtgagaatttgagggaagttatatttaggtaagttttggatggagtaggtagtgaggatagggagttggggaatttttattgggggtataggtatttaatggtgggtttttatgtagtatttagtaatattatgcggggttgggtcggaggggggtggaggaggggttttatatatttttcgtttggggtttttagaattaagtaagagtcggttttttagtttaggtgtttttattttgattttttttgaataaatttttatgttgattttgagtttttgtttttttatttttaaaatggggttaattggtcgggtgcggtggttgtggtttgtaattttagtattttgggaggttaaggcggggggattatttgaggttaggagtttaagattagtttagttaatatggtgaaattttgtttttattaaaaatataaaaattagtcgggtgtggtggtgcgtatttgtagttttagttatttaggaggttgaggtaggagaatcgtttaaatttgggaggtagaggttgtagtgagtcgagatcgcgttattgaattttagtttgcgggatagagtgagattgtttttaaaaaaataaagaaaaaaattgggtttaattatttttgtttttttttaaggttgttgagagattgagaagaatgaggtgagtgtcgttagttatgtgtgtgtgtgacgggtgtagttttggtttatgagttaagttttgggtatatttagcgttcgggtttgggttatagtgtgtgaaggagtaggagggtatgagggaggggatttgtgtaagtttcgttttttgtgggttgagttttgtacgtttggaagtgagatttgtgtatgtgtgtatttagtttgtgcgttgttttttgttgtggtttagtgttaggttttgcgttgttttgaggggtgttttcgggttttgttttattttgaagttttatatagggtttattgaggttaggatattttttcgggtttgtgttattaggggtggggggaaagggtcggttcgtttttatagattcggaaggtttggttgttttaggaggaggagttggttattttttagtatatttggaggttatgattttatttcggttgttagggggcgcgatagatgtttttttttaggttaggttagggattggggtggaggtcgtttaagaagaagaggagttttagaataagggggagtttcgtatatatttgtagtgttgagggggagggggttatagtgtcgttattaggagttaggagtcgtcgtttttatttatcggttggttggttaggttaagtcgttatatagagagagtaggaacggttggttagagatagggggttggatatattgattcgggattgagttggagttcggagggaagttgggagggtgttggcggcgaacgtggcgaggattttatttttatatatattattcgggtttacggttaggttattttttttttatcgggttcgatagtagtgtttttcgttttttgttttcgttagtatttttggggttttcgttagtcgtcgtcgttcgcgttggggtttcgttgtcgttttttcgttatcgttttcggcgtcggtttcgttgggggcggggttatgttgggaggcggggttatgtcgggaggcggggtcggtcgggagttgtttgcggcgggaagttagtagcggggattttaggtttggcggaggttagtatcgagtagtgtttattttaaggttatttttttttttgagaaatttgtgtttgttttttagattaatcgggagggttagcggaggttatttagcgtttagttttcggttagtaggtgtttaagagtttgttattattttatggagtatttgttaagtattgggttttgggtaattattttattagcgcgtttttatttattttaaaaatattttagataggtgttatttttttacgttttggagtagttgaggtgtagagaaaggttttggttaagaataagtttgataaatgtaggagttattagatttggaagtttgattatatggtgggaaatggtagataatattttttagataaaggtttgaaaagggagtagttatgcggtgaagaggattcggttttatttgaattttattttggtttgtttttgatttttattagattttagttttatattttttatttttttgcgtgtttgtttattttaatttagtcgtttgtattattatgtatttatttttaggtagaaaaagaaattgttaattaaaattaaaaatagtgttattaattttgatgttttcgaagtataaaaaaaaaaaaaaaaaagaatagaaaaaaaaggtacgaaagaaattattttttttataatttaggttttaggttaggtaaggggtatatttgtaggtagtgagtttaggggntgaggtggttttggttaagttttaagtgggattagtttatggtttggtttttagggttggttgggaggttgattgtttatttggggagtttaggttttggattggggatgagagagattaggggttaaggttagaggtttgggttatttagttttggtattttggttaaggtagttaaaggttagggtttagatatgtaggttaaagttatttagttttgtggtttagtagagaggtagtagagtaggttcgttattgaattttaggaggtggtttagtgggcgttaggtagtttagtattggtgttttagtaggggttgggttgtcgggtttttacgttttttaataggggtaggttagtcgttagggtatttataggtgtgtatttttaggggtattgttgtttaagtaaggaatgttttgggaagttttggggggtgaggttttagtgttgatatcggggttgaggttgaggttgaggttgaggttgaggtttagaggcgtttgggggaggggggagaggttggcgggtgagtaggttttagttttttgggatttaatttttttataggtgttttatttgagatttgggggtattttttttggggttttttgaggttggtttttcgttagatttttttagtttttttcggttttttaggttttattttttattggggtttttagaattgaggagattcgggttagggggtcgtgaggttcggggattttttgtggggataggcgatgtagggggtggtttagggagtcgagggggaggttattgtagtagaggtgggggtcgtttattattagagttatttagggaggatcgcggttttagttagggtttggtgggaggggttggttattattgtttgtaggagatagataagatagtagaggttttagttgggttgtattttttatttacgggtttagtttagtttcgtttgtttatttgtcgtgtttttaggtgtggggtgtgttacgggggggttattgttgagggaggttagttatcgtttttattatagtttgaattatttacgttttcgttattattgtagtcggcgttatagtttttgtgaagtttgggggtggagaggtagaaaagggattaggagggatacggttgacgaagaggttttataagtatgagtttttagttttaggataagttatttaatatttttgagttttaggatttttttttttaagaagttgttatttattttgtagagttttttgagggtgcgttgttaatagtgtttgatgattaaaggttattgttagttttgggggtaaggtgatatttaggaggggtaggttagttttgggagggggttatttttcgggatttaagttttggttttagtacgttttttttttgagatttaggagggacgtattgtattttagttttttttcgcgttatacgttattttttttcgaggttttattttttttaggtgcgtaggagttagtgggtaatggtatttaggttgatggggttattttatagtgttcgtagttgggggtgttgttagttagcgaggtggtgagaggcgatacgtagatggggtatttagcggttggttataggaggagttgattatgttgcgaacgtttgtttggcgttttggatgttgttacgttcggggttgcggttgcgtaggaatattagtttattgattgattgttataggtcgcgtacgtattttcggtttatttgagagttatacgttagggttagggggtcggttaagggggtttggggtagggtttagggtaggtggggtcggtttaattttgatgattcggaagttgaggtggcgtcggttgagtatgatgattttgtattcgtcggaggtattatttaggatatggcgtagttagtagggagggcgtgttgttgaggatggcgttgcgttatgttggttatttttatgtgagatgattagtcgtttttcgttggtcgtaatggtatcgtatagggttgttggttttttatatttatttggggacgtgaagtggttttggtagagaagacgggaataggggttagtgtttttgttttggagagaggttttattttttatttgtttatgttgttggtatatttttttttaatttggtgaagtttgagggttatgcgaattttaggcgttataacgcggtgaagtaggtttatgtcggtaaagatttattcgttacgtggggaggtgatgcgaaaattttttttgaatagggcgtgtaggtcgtagaggaagggttttaggttaagtgggaggaaaaatagggaggggagagaggggtgtcgaggatttaggggtaaggttttagagtgatttaagtagaggtttttttttacgttgagttttagtttttttattttgataaagaggttaatttttgtttatgttttttatagagtattgaggagtaggtaaggttatgattaggaagtgttttgttcgtgggagaagaggtattttaataggaagggttattgtagtttttgtggtattgtggttagagattatagtgtttttcgtggaagaggtggggtggggacggtagtaggttcgcggatattcgagtatttattttgtagatatgttgtgagaggttgttttagggttcggcggtttagtatatataggttaaaatatagcgtgattagcggggagttttaattttggtttacgggttgtggtataaggatttttattttagagtttagtttagatttgggatagggattttggagtgggggttggggtttaggttaagggaggtttagagtgagaggaaattaaatggggagaaggggagtagggaagtttagttttatagcgttaggtggtagttttaggtagtggagtttgatttgcgttgggaggcgtagtattggatttattcgaggtgtatagtataaaaggagggtagcgagaggttagataggcggaggttatagtttttatttatatttagcgagaaggtgggattcgaggtcggtatagtcggtattcgtataggttttagggttgtcgtgatgtttttatggttgagttatatttttagttttggtgagcggtttacgtagtagatgatgttttgggagaggaggggtaggcgttaggcggggtttacgttttggttattggaggagaaagtatggaggtttagaggtttttttttaagattgagttgaagttcgttttttgggatgtttcgtttttagagttattttagtttttaagagtaattaagtaagttggtttttttttttagattagggaggagtgataaagtcgttaggaagtatttatttatagagtaggaagttttgtgttggggttagtatttataagtagtatttgtttgtttttgttttagaatatgtttcgtttgtatgagaaattgaggtttaaataaatggtagtttttaacgagaataagattattatatttaatatttattattttagtttttaagttattaaggtggagttggttttatttgttttgaattttgttttttattcgtttttggttggtttcgatattatggtgtggtttttaggtgaatttttagtgtttgtgtagtacgtgggttaggtagtagtaggagttggtgtttttgtataaatataatttcgagcgcgggagtatttagatgttatatgggtagggggcggggagcgagtggggtagaatagattgaattgtcgtttgaatttcggattttttttattatgatattgtgggatttagatttcggggtcggaaggtaggttgaagtagtgggtttgttttagagtgtttgggttataggtttttttaggtagttgaagtatgatagttattaggtttcgttttagaaaaaagttacgggtatatgtggtatttaaagttgggggtttttggattttttgttaaaaggttttgttgggtaaaagtataggagttttggaagataggtagttggtatggttaggatgtacgggcgggttaaggtcggtagggtagttagtgaggtgatggggattttatgtgttattttaagatggagttaatgggtagcgtttttgttagggtagattcgttttagattgatttttttgtttatagttcgtttttataatttaggtatta

SEQ ID NO: 1675 - DNA, 18624 bp, Artificial Sequence
  chemically treated genomic DNA (Homo sapiens)
  unsure 8080, 8082: n is a or g or c or t
atgttttaatgggtaagttatttaatttttgtgagttttagtgaagagtagtgttaatattttttttaattttagtgttttatgaatgttataaatgtatttgaaaatttagagatttgaaatgaatgaggatttaagatattatgaaaagttttttagattaggagtttaaatttagagatttgaattttaatgttagtttagttaagaattagttttatgatttagaaagttatttaaagggaatttatattgtataataagaattaagaaatttattttgtatgtttttagtaatattgagagggttaattagatataatgaatgtgaaagtattttgtaaattataaaatagtatttaaatatattttgttattaatatttattgtttttattagtagtagtaatagagatttttaaattttaagaagtaatggtttagtgtaaattatttaatttttttagtattttattttttttaattgagaaataaaaagataaaattatatagttttaaattttttttaattataaatttttgattttttatgagttagaatggaggaatatagtaggagataaatataaaaatatttatgttttttgaaaatatagaattgtaaaatatattatgaaggaataagattaatattattaagaggtagtattaagttagttatttttaatttatttgatatttttataaattttttgagttggagattattatttttattttatttttaattttaattttgtagaagagaaattgaagttaagagaaattaattagttttttaaggttattatagttagggaatggttatgttagggattgaatttgggtagtttgatttttgttgtatttttagatattgtttttaatatttttatatagtttataggtatggttattgtttaggtttatggaattttaaaattagttgtttttgtgagattttttgatgttttttattttataatagatttagaatatatttgttattagttatggattttttggattaaatttttattttaaggaggttttttgtattttagttggtttaagagtgtaggtttggtatattttatagttagttagtaatttggtttaagaataggttattgggttaagtttaattgaatatattgaaaattgtgtgtgttaggaaattaggtttttttgttgattaaggtttttaaagtattagatgttttatttgttttttagagaagatatttattaagattttttattttgatgattagaataaattaaggttagatttttattttaaaggaagaaagatttttataattaagaaaattttatgaaatatgagtattgtttttggaagtttaatttttataagttttttaagtatattaattttattataatattatttttaaatttattaaagaaaaattttattaattaaaagtgtttttatttgtggtttttatttgtggtttattgggtgttttagtttttttggggggtggggtggtttgggggatagaaaagttagtatttgtatttttagaaatagaaagaatataaaaaatataaaaggttggttataatatgaaaataatatggaaattttatgaaatgttaatttttttaggaatagatgtttagtgttatagttggattagtttttagttttttttttttaaaagttttgttagagaggatagaggaaagatagaggagtatattttaagatagtttgtttttgttatttttttcgtttgtttgaaaggtttaaatcggatttattttttaaggttggttttatggatggtgttattttatttatattttttaaaattgttttttatttgttttaggatgtttgaatttttttaaaagagaataaagatttttattttatagtgagagataaaaggtttagaatgaaaatgtttggttgatataagattaagattaaaataaatttatattattttgaagttaggtagttagttagtaagaaaaaggaaattgattggtattagaggtatttatagttattggtagaggaaaaaggttgtagagtaaataagtggttttaaaaagggttggaggatgttagtttatggtttttgttttggtttggtgaatagaatttattttgggtgttagttttattttagttgttttttgttttgatttaaataattagttttatttagttgaatttgaaatcggatatttttatgttaaaatattttttatatgaggaattagaattttttgttgaatagataaatgttttgtattggtgatttttaagagtggaatgagttataggtatatatttgtaattttgtttttatttttgatatagttttacgatattagtttgattgattagtatgatatttatttaacgaagaggatttaaagggttttatttaggtgtttttagatatttttataattttgtattagtttattaatttatttttatatttattttttatagataaaatatttattttaatttttaatgatttattttataattttgtatgtgtttagtaaaaattttaagttaattgtaaatagcgttaaaatagtgaaagtaagtattaggtataaattgttgttgttttaaattttatatataaattaatttatttattttttaaaataattttataataaggtaggtataattataatttataattgtatttgtagatgagaaaattaaggtatagaaagattgagtaatttgattgagtttatatagatagtaagtggtagggttacgatataagttgggttttttgatttgagttttgtttttagttattatattatattataatcgagttatttagataattggaaattatttaaatcgttttttataagaaataaagaggatttatttaattattttgattgataattagtgatagatttgagggaggaattgtttgtagtgttaataattatttatttgtagatttgaaaaagaaaaattttttttttaataaaatttaaaaattgagttggataaaaaaatgtttttttagttggagatagaaaggttatttagtagtgttattgagatgtttatttatagtttggtttttgtttaaaatagttttttttgttgggcgcggtggtttatatttgtaattttgatattttgggaggttgtgtcgggtagattatttgaggtttggagtttaagattagtttggttaatttggtgaaattttatttttattaaaattataaaaaaatttagttaggcgtggtggtgggcgtttgtaattttagttatttaggtggtcgaggtaagaaaattatttgaatttgggagatagaaattgtagtgagtttgtattgtattaatgtattgtaatttgggtaatagaacgagattttatttaaaaaaaaaaaaattttttatattttttaaaatagaaatattttaaataaatattggttttatttttaatttgtttaatttttatgtaaaaaaagaaaggtaatgtttttttaggtaaaatgaaatttttttcgaatttatttgtttggttaaaaattagaaaaatgttttttgggaaattatttttgtaatttttttttaataattggagggttttttggattttttttgtaaatcggggaaattaattttttttttttttaaaagaataatggtaagggtattattttttgtgaaaaatgttgttaagtatcggtatttttgtatgagtagagataagtttttatttatatttattttatttttttagaattttttttgaaaagttaaattttaaggtattaataaggaaatataattttaaagtaagtgttttaagataggttagtattatgaaattgcgaaaattattgtgaagtttatttattttatagttaaatataaattttttaattattgaagatattttattaaaatgagttagtagagtatgattattttatttaaatatagtagaggatttttttaaggtatatgatttattttttatagatatatgatttatttttatatttatatttttttaaggttttatgttagtatttgtaaaataaataaatgtatgagtaaatgaaatatttggattttgtaaaagatttaagaatttatagagatattattttgatgggatgtattttttaaatgtatattttaaaatataattttttatttgttgtataggtaataaaatttggaatttataagttgaatatgtatagatttttataaattagtaagaatatattttttagaagttttgttttttattttatatgttgtatagtatatatttttaataattaaaatattttgtagttttagtatttagtattgttagtgaattgtgttttaggttgagaatatttttattagtttttattgtatttaataagtaaagttatattttttttaaagttatagtgaattttagtgtattgaatttaagtaaatattataaatataggtaatattttaatgattgtattggaagttttgtttgttggaatagttttttagttatttattattagatttaattatttatatgattaaggtttttggatagataaattttagtgaaatgagtttaaaattgtatgttttgtaaaataaaattgtttttttatattttatttttatttaaatatatttgtattatttggaataagtttaatttttttttttaatgatagttttgaagaatattttgaagattatatcggagataatatattaagaatttatttattgaattatttagaataaaagttaggagttttttaatggaagtatattagtgtttattttgatgaagaaatatatagattttttaaaataattataaagtagatagtttagtaaaaaattaattttggaagatgttattgaataatttttttaatgtatttttggatttagtgtttagtaatattaatcgtttttaagttagtgttataaatgagaattatgagagtagtgtagttgtagatgataatattgatttattatattatgaagaaattttttttggggatgaagtttagaaaagatttagaattagttttaggtttgggaattaggagtgttatgataattttttttaaagtggagaaattgttaaaatagatgttagtttttacgtttatgatttttatataaatatatattatttataaatttttggttataatattatggatgtcgtttttaagatagagtattttcgtaatatcggtagtattagtgggtttaaggttaatcgatttagtttgtttgagatttacgagtaattcgtaaaggtaagtttgaaggatataagtaagtttttttttttatttataattttagataattttttttttttttattatattatgaatgaatgtgaaatagttaaatggagaggtttattttaaatattatttattttatttataaaattgtttttagtttttagaaaagtgttttatagatgttttttttttggattttttttttttttgagataaagttttgttttgttatttagtttgaagtgtggtggatattgtagttttgaatttttgggtttaaataatttttttattttaattttttgagtagttgggattgtaggtatgtattattatatttgattaatttttttattttttgtagagatagggttttgttatgttgtttaagttggtttcgaatttttgatttaaagggatttttttattttggttttttaaagagatgggattgtaggtatgagttattgtgtttagttttataaatgttttttgatttaggatagagaattaaagaattaattttaaatgttaggtaatatgttgtattttgtatatgattatagtttatttaatttatatttggttaaatacgttaaattgaatattaagttggttttacgttagtattaatgtttttatgttaatcgtataaaaagtaaaatatttgtgtttgttgtagttaatattgtgggtgatagtttttagtgtgtaggggtattttttatattttttaaagaaagggtagagatttataagatttagtattttatttttttttttttaaaattttgtttgaggtttttgtaatgtgtttaagtatataaaaataattaaattaaagtatagaagtagtagaagtgattaaattttttattatttaagaaatatagttagggtttttaagtttgttagaagtgaggtagtattttttttaattttttttgagacgaagtatcgtttttgttgttcgggttggagtgtaatggtgcgatttcggtttatcgtaatttttattttttgggtttaagcgatttttttgttttagttttttgagtagttgggattataggtatgtgttattattatatttagttaatttttttgtatttttagtaaagatggggtttttttatgttggttaggttggttttgaatttttaattttaggtgatttgtttattttagttttttaaagtgttgggattataggtgtgagttattatgttcggtttttaattttagaatttagtagatttttttttttataattttttttaaaatatattgattatttttatttttttgtttttttagattagtttggaataaatattattttttataaaatataattatttgttaaaaagaatgattagatgttatatatttaaatgagtttatttttgtttaagttttgaggagaagaaaatgatttaaatagttttttttgtatgtatttatttattcgtttttttaatatttttttaaatgattatttatattcgagagtttaggaatattatttttaggaaagatgttaataaaggggaaaatttttttttagtttttgtttatttttttttttataagaaaatttatttttaaatcgtatttgttttggttgttagggtttttgattttgggttttattattagagattaagtgattttttgaggaggagtttatgtttttaattttgtttttttgttttttttttttattaaaatttgttagttttgtgtattaaatcggtaatagtttgttaaatggttggtttttttatagatttaagatttagattttatttggtatatttgatgttttaattaaaagaagttagtaatgcgataattttagataatatggtagtttttatgaagaattttgagaagggaggtaatttgaattgttgaaatttagttgcggtgttattgtttttttttgtgttaagaaaggaaaggaaaatggtagagagaaaaaggagaagagaaaggaaaagaaggttgatagaagtagtttttaggagtttttaagatatggaaagggtagaaataaatttagggtattataaaaagatattttaattgtttttgaagaattaaaatgaattaaagtttttttttaaaaagatttgaaattttattttataatattttattacgttatatatgataatttttaaatttgttttattttttaaagttagtgttataatttaaatattattatttatttatttttttaatttataataaaagaaaatagaattttaattttattaaaaaagaaatgggataaatttatattgtttttaggattgatattttcgatagagaaaagtagtttatttataattgtaaaagttatggtttatgtaaattttttaataaagggagaaaagttttgaaggaataggtgtttagaaagttatttaaagtttgggtgtggtggtttatgtttgtaattttagtattttgggaggttgaggttggtggattatttgaggttaaaaatttaagattagttatgattaattggtgaaattttttttttatttaaaaaaaaaaaaaaaaaaaaaattagttaggtatggtggtatatgtttgtaattttggttttgggagattgaggtaggagaattgtttgaatttgagaggtagaggttgcggtgagttgagatagtgttattgtattttagtttgggtaataggagtgaaatttaggttaaaaaagggtatttagntngatattcgaataattagttttttatgataaaagggagaaataaaggaaaaaaaggttgttaaaattagttttcgggggttttttagtttaggaaaaggtagaaataattttagggtataaaaaaagattatttaaagggttttaaatatttaaaagatgtaaagttttttttaaaaagaatttaaaatttgttttaaaaattttttttaggttattcgtttaaaattttaaattgttcgatttttttaagttagagttttaatttgaatattattattttttttttttttaattttattaaaagaaatgagaattttatttttattaaaaaagaatgggataatttaatattgttgttagaattatatttttagatagagaaaagtagtttatttataattgtaaaatttatggttattgtaatttttttaataaagggagaaaagttttgaaggaataggtgtttaaaaagtaatttaaagtttgggtgtggtggtttatgtttgtaattttagtattttgggaggttgaggttggtggattatttgaggttaaaaatttaagattagttatgattaattggtgaaattttttttttatttaaaaaaaaaaaaaatatatatattagttaggtatggtggtatatgtttgtaattttggttttgggagattgaggtaggagaattgtttgaatttgagaggtagaggttgcggtgagttgagatagtgttattgtattttagtttgggtaataggagtgaaattttattttaaaaaaaaaaagaaatagaaagttatttaaatgattatatagtaggaatgttatagttgtattagataaatgtaatagttgtttggaatattgtattatttttgaagatataaaatgaaattaaagattgaatttcgatttaaagtatttttttttttagatataaaggaatggtaaattaaaatattaaaaattaggtttaagttttgaataattattttgaaagtgtatagtaataagttatttttttatagatttgatgtttagttatttaggattttttattttgattaaattatgaagaggtatttatatagttaaattgggagtagaatttagatttaattatagaatttataatgtgtatatttttgtagttaggtttattttagtgttgttgaaattgtatggtttagtttggttttttatgtgtagtagtttgggttttttttaatttatttttttattgtttgttaatgaatttgatttagttattttttttatttttttttttttaaatataagaagtgaaaatttgtaatgtgttgtagttgtgttgttatttttttgtggtttttgatatttttatggtagttttttaaattataattagaaattattaatagaataaatattatgtgattatatttagattttttatagattttgtatgtaaaaaatataaataatagtgtttatttaaattatttaaaagtagaaggtaattgatatagtataagttagataatattttttgtaattatgattagaatgtttttaaaagttataatagtaatagtatatttatatcgaatggtagaatatggttagttagaaaattagttggattttgcgtaaattttggttataatttttaagtgagaaaaaagttatatgataaaattatattaataggtaaaataaaaaataggtttgaaagatattattttaaggttttattttaaatgaaattttagttgtgatagatattgatagaatttataattttaatgatttgagatcgtaattgaagaaattttttttattatttatgttagtaaagagttaaatatttatattggtgatcgttaattataaatttttgaaaattttatttaaaagtaggagaaataattgttttttatttgttttttataagttattgtatgaattatataatttttatttattttgtaagatgtttgtgaatattagtttttataagtataaagtttatttttataatgagtaagaatttaataaatgatcgatgatgatagtggtaatttttatattagttttttattttaatagaaaaataaatataaataaaatatttaataaatattaaaaaatatgtaataaaatgttttttttttaatattaatatttagttattttttttaggataattattattaatagttttttgtaaatttttttagaaatgttttaggtttatataaatatatatatatatttataaatatttggatttttattaatttaattttttgtttatatttatttttaaatatgtattagacgtattttttatattgttttgtattttgtagtttttattaaatatattttcgagattttttcgtattaaagtatatgtaataattatttgatatttggtaaagattaatttagtgtttttattttgtaaagagaattttgtttttagtatttagtttaatttttgtgattaattttttatatttaattttttattataggattaattaaaatggaatttttttttagttttattaattattattgttgttagtattttagaaaaatataatttaaaaggatttaaggaaatatatagattttttatcgaagttatgtgttattgaaataagttatttatgaaaagtataaaatattataaaattaagataaatattatttttaaagaagttaattttatagaaattaatttaaaaaaaaattaatgaaatgattatatttggattattatgttgttaataattataaataattcgtaaataaaagtattaattttaaatgtagtgtagtaataattaattttttgttgagaatttgttatgttttagatattgtgtttatatttaaaaaatttttatttaatttttaataataattttttaaggaaggtattattattattgtttttttatggatggtgaaagttttataaaatgttgtggattttttagaagagaaaataaaggtttgtaaaagttaatgaatttttaaggttaagaaattaaggttatatgtttataagttgaatttatgtttgtaggattttagagtttttgatttttagttttattttttatttttagtttgtttttttttggtattttttattaatttatttaatagttgtagagaatggtgggatttaggtacgaagaagaaaattatattttgttatgatgggttgagtaggaggtatttttttgttttagtttttttttttgagattgtgataaaagattgtattgtttgttttatagaattaattatgttttaattatttttattgttattattaaaagtatttattaagtatgtatttataagagtttttgtgtaaagtgagttaaagtgatttgattttttttttttagaattttttttttttttttttttgagacgggatttcgttttgttattcgggttagagtgtcgcggcgtaattttggtttattgtaagttttgtttttcgggtttatattatttttttgttttagttttttgagtagttgggattataggcgttcgttagtatgttcggttaattttgttttgttttgttttttgttttgtatttttagtagagatagggttttatcgtgttagttaggatggtttcgattttttgatttcgtgattcgtttattttaattttttaaagtgttgggattataggtgtgagttattatatttagttttttttagaattttataagttaaacgatatcgttatggatacgaataaaggaaatgtagttaagttaataaatattaaattatataaattaatgtattaaaatatatattaaatgtttattttttataaaaggataaaaatgtacgaatgttttttttagaaaataattttttttatagtgttttaaagtttaaatttgtaattttagtatttaaattggggatatttgaaattagaaataattattaagttaataatagttaaataaaatagatattaaaattgaagtaataaatgttttaaagtttagtgattagaagttatttttaaaatatttgttggagtgaatttttgtaattaagagtttattttgatattttagttagagttttttagtatttagggttagtttttcggggagtttatattattaaaataatttttgggaaaaaaaataaaaataaaaataattaattttttattataaatagtttagtaatatatggtaagaagagtagtagtttttttaaatttatatttggaaaatattaagaatttttttatttttttttttatatgttagtttattgtatatagttaatttttgttttaaattattaaaaatataagttaatttgtgtgtgagatatgtgtttttagttatagtaaatgtattatgattataaattgtgattattggtagtgatttataggtataatgtgtaataatttttaaaataagaaaaaaagatttttatttttataatttaaaatattgttttttattataaagggatagaaatgtataaatataataatattgattagtaaggtatggaaatatggttagaattatatgttttttattttgaaatgaagtttaggaattatttggtttttattgggattggtttttagataattgagtggtaggagtgggaggggtttaggttaggtggaataagtttggttatatgttgattattgttgaaatttaataatgagtatttgagatttattttgttatttttattatttttatatatgtttgaatatgataataataaaagaaagtttaaaataatagggggattatttaggtgtgaatatttatggaattgtttttcggtggtggtttaaaaattttattaatttgagattaaaggattaaaatttaaaagaatgtataagtagtaaatattatttagttggaatttaaagaataaatatatttattttttttgttttgatgatagatataaagatgtaagtaatatatagtatttagttggaatttaaagaataaatatatttattttttttagttttgataatagttataaaggtatttgatatgtttttggggtttgaaaaatatattatatattaaataaaataatttaattttttattattaagaatttattgttttttaaattgtatgtgattgaagatttattagttgttaaaattggagtggggataatttgttattaagtggtttttttttttttttattttttaaatatattttattttattttttttgaatttttaatatatagttaaaatttttagtaaataaataattattttttaaagttatataatttagaatatatttataaaaggttatgggttattatttatggtaatgggagtgtgaataaataaattaatttaatgtatgaagggaaaaattggttttaggtagtaattataaaatttttagtttttgagattttggttttaagaatatgaattagttgggagattgtaggttatttgttatatagtttatagttattaagtttttataaattttttatttaaagttatgtttagtattttgatgatgagtttataattgttgttttgatttattaaggaggtatttattaaagagtgaaataaaggtttgttttgttatgttagaattgtaagatggtaaatagagaaaaataattttgttttagagtaaattattttaagataagatttttataaaatttattggatttatttttattggtagtatttaagtacggttaaatattttgatggaggacgtattttgaatgaattgtataattaaaattagattttaagtattttagtttatacggtgtaggattttttggtttttatatgagagtaagtaatggaaatggtttttgtgtttgtaaatttattgttagattttaatagttaataaaagaagtatatatttggggttttttttttttttatggtataaatatatttaaaattttgaaattttagtaggttgaatatattattaatatttaagggagagttgaatattttatattgattatatttttgaataatttagaaaatgattgttttattaatttgtatatatagtggtttttttgttatttttttatagaatattttttttgtattatattgtgaaattttagtgataaattgaagaattattaaattgtgattaggaagggtatttattaggaaggaaagtttattttagaggaaattttaaatattttatttattttttagtttattttgtaagatttgtttatagttttggatatttttattaatttatatttaagggttataattattattggagtttattagttagtagagtaattttttagattaaatttttaagtttaattagaaaatataggttttatttttaagattatttttaaaaaaggtaagtaattaaggttgtgttttttgggatttttaattaatttatataaagaaaattgtttttttttaaagtgagtaattattgatggtttggttatgggattttgattaattagaatattgataattttttttaaagttttttttaaattaaattaaataaatagattttttaataaaataatttttttaatagttatggatattttaatatattttttaattttttgtttttattgattatatattttagttatgaaaaaaatgaaagttatatttgatttatttagttgtcgtatgtgtatagaatttttttagagaaaaatagaatttttaatggattggaaaatagttttaaatgttttatgtatttgaaattgattgtattgtatagatttatgttgtttaatatggtagttattaattatatggggttattgagtatttggaatatggttagtttaaattgagatgtattgttagtggaaaatatatattgaatattaaagatttagtattaaaaatagaatgtaaaatattttttaatatttttatattgattatatattgaagtaatattttatagatattttattaagtaaaatatattattaaaatatttttgtgatttagttttttataagttggggtgtaattattgttaataaatatttatattgtaaatattagaaatatgatattttttaaagattaagtatatttttaaaatgtaagggtttatttttaaatttaattattgtattaattttttttttttttttaaaaagtagaaaattttgaattatatatttggtttgtatttatagttggtatagatgattagtttttgttttattatgttagttttaattttttggattgcgtttatttttatattggtgtgaatatattatgttagtttttaattatttgtgtaaataaggattgaggatatttaagattaatatattttttaggtaattaaaagttaaattttaattattaattttaattttttttgttattttatttttttttaatattgttagaaaataataaaataatttgttttaggatttagtttttttttttttttttttaaatgtgatttatttagaagaaataataagaaatgagttgttttatagagatggaagataaaagaagtaggaggtaagaatggataagaaattaggatatttgtttttaaggggtagagattacgaatttttaagtttattttttgaatttaatattgttttgttattgttgtttttgtttgtttgtttgagatagggttttattttgttatttaggttggaatgtagtggtataattgtggtttattgtagttttgatttttttagtttaagtaatttttttattttagttttttaagtagatgggattagaggtgtatgttattatacgtaggtaattttttttttattttttgtagagatagggtttagttatgttgtttaggttggttttaaatttttgggtttaagtaatttttttgttttagttttttaaagtattgggattataggtatgagttattgtatttggttgatttagtattgtttattgatggtttgttatatgttaagtttttggttggtattgagaaaaagtaatttataatttagaattattttataataatggtaattaagtgttgaatttttttttgatttatttgttatataatgatttttatgattttgtattatgttgtttatttaagtgttataatagtattatgaataaggttttaagaaagaagagtttgaggagaaatttttataaagataaagaaaatgtatttatttcgggaaggaaaagtaaataaataaaaagataaggagaagaataggttagaagaagaagataagaagttaaagttatttggagtatagaggttaaatgagggtagtttattatgggtaagttatattttagtttaaagaagtaagagtttttgagtatggtaagggtaagagttttaattattttaaaatgaaattttgataataaatatggatgtttattttatattagttttattttagaggaagaaaaaatggttttatttaagattttttaattagtgatattagaatatattattttaggtttaaattagtttagattatttaaataagatatagttattttataatcgtggtaattgagggtttaattttagagttttttttagtggttttaaaattttttttagaaaagaaaattgtttttagagtttaaagaagtatagtttatataaagggtttggtaaaagttagataagttaaattaagtaagtgtatttgaaattatttaaatttatattttaaagagaaattatagatagagaattatttttaatttgatagaaaaagagttgttttttgtttttttgagtttagatattattgtaatgagaatggaagttttttttaaaatgaggttataggaaaaaattatataaaagtttaaatttttatttatattattaattttttatttttatttaattagtaattagttatgaaattttttattttttataagatattagtatatttaataatttttaggtaaaggtataacggaattttaaagaaatttttataggaataatatttttgttattatttagtgtatttaaatttttgtggaatattttaaattttattgttttgtttttttagaaaatttgtcggtcgggtgtggtggtttatgtttgtaattttagtattttgggaggttaaggtgggtttttaggttaagagggttatgaggttaagagattaggattattttggttaataaggtgaagtttcgtttttattaaaaatataaaaagtattttggcgtggtggtgtatttttgtagttttagttattttagaggttgaggtaggagaatgatttgaatttaggaggtggaggttgtagtgagtcgagtttatattattgtattttagtttgggtgatagagtaagattttgttaaagagaaggaaagaaagaaagatgaaaaaagaaagatgaaagaaagaaagaaagagagagagaaggaaagaaaaagaaagaaagaaaaagtaaggaagaaagaaggaaagaaagaaagatagaaaatatgtttatgtgttttttattgaatttttttaaagattttttgaggtgtgtagagaagttttattattatgattttaaatgaataaaataggacgggcgcggtggtttatatttttaattttagtattttgggaggtcgaggtaggcggattgtttgggtttaggagttcgagattagtttgggtaatatggtaaaagtttgtttttataaaaaatataaaaaattagttgggtgtggtggtgcgcgtttgtaattttagttattaaaaatataaaaaattagttgagtgtggtggtgtgtgtttgtaattttagttattcgggaggttaaggtataagaattgttttaattcgggaggtataggttgtagtgagttaagattgtgttattgtattttagtttgagtgatatagtaagattttgttttaaaaaaaaaaaaaaaaaaaaaggtagatagatagatagatagatagatagatagatagatagatagatagatagataaaatgaagtatagggagttttattaaaagaagtatagattttttatttagtttaggaagtttttttttttggtcgtaatatgatttttaaagatttttatttattttggttgttttttttttgtagttttttttttttttgttttttttatgtgttaaatttatttaaatttgattttttattagaagaaatatttttattagtggaagaatattttaggttttttttatttagttttaaaaaatattttaaaatgatttataaaatgaattttttagtttttagggtaaaaaatataagttttattaaaatttttagaatatatttagtttgggggttttttggtattttaagttttattttaattgttttgatttgttttgaaaagttttatggaattttttgtttattgattaattattgtgtttttgttatttataaaatgtaga

SEQ ID NO: 1676 - DNA, 18624 bp, Artificial Sequence
  chemically treated genomic DNA (Homo sapiens)
  unsure 10543, 10545: n is a or g or c or t
tttgtattttatagatagtaaaaatatagtagttggttaatgaataaagggttttatgaaattttttaaagtaaattaaaataattgaaataaaatttaaaatattaaaaaatttttaaattaaatatattttgagaattttaatgaaatttatattttttgttttggaagttgaaaggtttattttgtgagttattttaaagtgttttttagggttgggtgaagggaatttgagatgtttttttattagtgagaatattttttttggtgaaaagttagatttggataagtttagtatataagagaaataaaagagagaagggttataaggaagggatagttagagtaaataagggtttttggaagttatgttacgattaaaaagagaaattttttgagttaagtagaggatttgtgttttttttggtgaaattttttgtattttattttatttatttatttatttatttatttatttatttatttatttatttatttatttatttttttttttttttttttttttgaggtagagttttgttgtgttatttaggttggagtgtagtggtataattttggtttattgtaatttgtgtttttcgggttaaggtaatttttgtgttttagtttttcgagtagttgggattataggtatatattattatatttagttaattttttgtatttttagtagttgggattataggcgcgtattattatatttagttaattttttgtattttttgtagagatagatttttgttatgttgtttaggttggtttcgagtttttgagtttaggtaattcgtttgtttcggttttttaaagtgttaggattagaggtgtgagttatcgcgttcgttttattttatttatttaaaattatgatgataaaatttttttatatattttagaggatttttaagagaatttaatgaaagatatatagatatgttttttgttttttttttttttttttttttttttttatttttttttttttttttttttttttttttttttttttttttttttttttttttatttttttttttttatttttttttttttttttttttttgatagagttttgttttgttatttaggttggaatgtagtggtatgaattcggtttattgtaatttttattttttggatttaagttatttttttgttttaatttttagagtagttgggattataggggtgtattattacgttaaggtattttttgtatttttagtagagacggggttttattttgttggttaggatggttttgattttttgattttatgatttttttgatttgaaggtttattttggttttttaaagtgttgagattataggtatgagttattatattcggtcgataagttttttaagaaaataaaataataaagtttaaagtattttataaaagtttaaatgtattggatgatgataagaatgttatttttgtagaagtttttttgagatttcgttatgtttttgtttgagaattgttgaatatgttagtattttatagaagataagaagttttataattgattattagttgagtagaaataagaagttggtagtataaataagggtttaaatttttatatggtttttttttgtggttttattttgaaaaagatttttatttttattataatagtatttgagtttaagagggtaggaaatagttttttttttgttaaattgagaatagttttttatttataatttttttttaagatatgggtttgaataattttagatgtatttatttaatttagtttatttggtttttattaggttttttgtgtagattgtatttttttgagttttgaaaatagtttttttttttaggaaagattttgaaattattggggaaggttttgagattgagtttttaattattacgattatagaatgattatattttatttaagtggtttaaattggtttaagtttaggatgatatgttttgatattattagttaagaagttttagataaaattattttttttttttttaaaatggagttggtgtgaaataaatatttatatttattattaaagttttattttaggatgattgaagtttttgtttttgttatatttaaaggtttttgtttttttgggttaaggtatagtttatttatggtaaattgtttttatttggtttttatattttaagtgattttgattttttgttttttttttttagtttgtttttttttttgtttttttatttatttgtttttttttttcgaggtgagtgtattttttttgtttttgtaaggatttttttttaaattttttttttttgagattttgtttatgatattattgtgatatttggataagtagtataatatagagttataagagttattgtgtgataagtgaattagagaaagatttagtatttaattattattattataggatgattttaaattgtgggttatttttttttagtattagttaaaggtttggtatgtagtaggttattaataaataatgttgaattagttaggtgtagtggtttatgtttgtaattttagtattttggaaggttgaggtaggaggattgtttgagtttagaagtttgagattagtttaggtaatatggttaaattttatttttatagaaaatagaaaaaaaattatttgcgtgtggtggtatgtatttttagttttatttatttgggaggttgaagtgggaggattgtttgagttagggaggttaaggttgtagtgaattatagttgtgttattgtattttagtttgggtgatagagtgagattttattttaaataaataaataaaaataataataataaaataatgttgaatttagaaggtggatttgaaagttcgtgatttttattttttaagagtagatattttagttttttatttatttttgttttttattttttttattttttatttttatgggatagtttattttttattgttttttttgggtaggttatatttaaaagggaagaagaagggattgaattttaagatagattattttattattttttgatagtattgggaaaaaatggaataatagaggagattgaagttaataattaaaatttagtttttaattatttgaggaatatgttaattttagatatttttagtttttatttgtataaataattgaaagttaatataatgtatttatattaatgtaagaataaacgtagtttaaaaaattgaggttaatatagtggggtagaaattggttatttatattagttataaatgtaaattaagtatgtaatttaaaattttttattttttaaaaaggaaaaagaaattggtgtagtaattaggtttagagatggatttttatattttaaagatatatttaatttttggagaatattatatttttaatatttgtaatataagtatttattagtaatagttgtattttaatttgtagggaattgaattataggagtgttttagtaatgtattttatttaatagaatatttataaaatattattttaatatataattagtataaaaatattaggaaatattttatattttgtttttaatattaagtttttgatatttagtgtgtattttttattggtagtatattttaatttggattagttatgttttaagtgtttaatagttttatgtggttagtggttattatattggatagtataggtttatgtaatgtagttaattttagatgtatgaaatatttgaggttgttttttagtttattaaaaattttgtttttttttgaaagaattttatatatatacggtagttgaataggttaaatgtaatttttattttttttataattgaaatgtataattaatgagagtagggaattgaggaatgtgttaaaatgtttatgattattgaagggattattttgttaggagatttatttatttagtttgatttgagaaaaattttaaaaaaaattgttaatattttagttaattaaaattttatagttagattattagtagttatttattttgggagagggtaattttttttgtgtagattaattggggattttaagagatatagttttagttgtttgttttttttaaagatggttttgggaataaaatttatgttttttgattaaatttgaagatttggtttgggaaattgttttgttagttgataaattttaatggtgattgtgatttttagatatgaattgatgagaatatttaagattgtaaataaattttataaagtaggttaaaggatgaatagggtatttaaaattttttttaaaatgaatttttttttttgatggatgttttttttggttatagtttaatggttttttaatttattattaggattttataatatgatgtaaaaagaatattttatgagaggatgatagggaaattattatatgtgtaagttagtaaagtaattattttttaaattatttaaaggtgtagttaatgtagggtgtttaatttttttttaggtattaataatatgtttaatttgttagaattttaaagttttaaatatatttatattatagaggggaaaaaaattttaaatgtatattttttttgttgattattaaggtttgatagtaaatttataagtatagaagttatttttattgtttatttttatgtaggagttaaaaaattttgtatcgtataaattaggatatttggaatttagttttggttgtgtaatttatttagggtacgttttttattaaggtgtttaatcgtgtttgaatattgttaataagaataaatttagtggattttgtgaaaattttattttgaagtaatttattttaaggtaaaattgtttttttttgtttgttattttatagttttgatatggtaaagtaaatttttgttttattttttaataaatgtttttttagtaaattagaatagtagttgtaaatttattattaaagtattgaatatgattttgggtggagggtttgtggggatttgatggttatgagttgtgtagtaggtggtttgtagttttttagttggtttatgtttttgaggttaaagttttaaagattaaaagttttatgattattgtttgaaattagtttttttttttatatattgaattaatttgtttgtttatatttttattattataaatgatgatttataattttttataaatgtattttaaattatgtagttttagggaatgattatttatttattaagaattttaattgtgtgttaaggatttaggaaaagtaaaataaagtatgtttaaaaaatgaaaagaaaggaagattatttgataatagattatttttattttaattttgataattaatgaatttttaattatatgtagtttaaagggtaatgagtttttgataatgaaagattaaattattttatttaatatgtaatgtattttttagattttagaaatatattagatatttttatagttattattaaagttgaggaaaataaatatatttgttttttaagttttagttagatattatatgttatttatatttttatgtttattattaaagtagggaaaataaatatatttattttttaagttttaattagataatatttgttatttatatatttttttgaattttgattttttaattttaggttgatagaatttttagattattatcgagagatagttttataaatatttatatttagatgatttttttgttgttttaaatttttttttattattgttatatttaaatatatgtaaaagtaatgagaataataaaataaattttaggtatttattattgagttttaataatgattaatatatggttaaatttgttttatttaatttaagttttttttatttttgttatttaattatttaaaaattaattttagtaagaattagatgatttttaagttttattttagaatgaaaaatatatgattttaattatatttttatattttattgattaatattattatgtttatatatttttatttttttgtgataaaaggtaatattttaaattatgaaaatgaaagttttttttttttgttttgaaagttattatatattatgtttataaattattattaatggttataatttgtaattatagtgtatttattatagttgaaaatatatattttatatataaattgatttgtgtttttgataatttaggataaaagttagttatgtgtaataaattggtatatgaaaaagaaaatggaaaggtttttaatattttttaagtataagtttaagggaattattgttttttttgttatgtattattaaattatttataataaaaaattaattgtttttgtttttgtttttttttttagagattgttttaatagtgtgagtttttcggggaattggttttgagtattaagaaattttaattaaagtattagaatgaatttttagttgtagaggtttattttaataaatattttaagggtggtttttggttattggattttaaggtatttattgttttaattttaatgtttattttatttggttgttgttagtttagtaattatttttaattttagatatttttaatttgaatgttaaagttgtaaatttgaattttgaaatattgtagaaaaggttattttttagagaaaatattcgtatatttttgtttttttatagaagataagtatttaatgtatattttaatatattgatttatgtggtttaatgtttgttaatttgattatattttttttattcgtatttataacgatgtcgtttgatttataaaattttagaggaggttgggtgtggtggtttatatttgtagttttagtattttgggaggttgaggtgggcggattacgaggttaggagatcgagattattttggttaatacggtgaaattttgtttttattaaaaatataaaataaaaaataaaataaaataaaattagtcgggtatgttggcgggcgtttgtagttttagttatttaggaggttgaggtaggagaatggtgtgaattcgggaggtagagtttgtagtgagttaagattgcgtcgcggtattttagttcgggtgatagagcgagatttcgttttaaaaaaaaaaaaaaaaaaaattttagaggaaagaggttaagttattttaatttattttatatagaaatttttgtaaatatatgtttaataaatgtttttgatggtgataatgaaaatgattgagatataattaattttgtaggataagtaatataattttttgttatagttttagaaaaaaggattgaaataaggaagtattttttgtttagtttattatgatagagtgtgattttttttttcgtgtttgagttttattattttttatagttgttgaatgagttaatgaaaagtgttaagggaaagtagattgaggatggaaagtagaattgaagattaaggattttggagttttgtagatatgggtttaatttatgagtatgtgattttggttttttgattttggaagtttattgatttttgtaagtttttgtttttttttttaaaagatttatagtattttataaaatttttattatttataaaaaagtaataataatagtattttttttgaggggttgttgttaaggattgagtgagaattttttaagtgtgagtatagtgtttgaaatataataagtttttaataaaaagttggttattattatattgtatttaaagttaatgtttttatttacgaattatttgtagttgttaatagtataatgatttaaatatagttattttattgatttttttttggattagtttttatagagttagtttttttaagaataatatttgttttaattttatagtattttatattttttatagatagtttattttaatgatatatggtttcgatagaaagtttatatatttttttgaatttttttaaattatatttttttgaaatgttaataataatggtggttagtaaggttgaaaaggagttttattttggttagttttgtagtaaggaattggatatgaaaagttggttataggaattaggttggatattgaaagtaaaattttttttataaagtaaaggtattagattaatttttgttagatgttaaataattattatatatgttttaatacggaaagatttcgagggtatgtttggtaaaaattgtagagtgtagaataatgtggaaaatacgtttggtatatgtttgaaaataaatataaatagaaagttagattgataggaatttagatatttatagatatatgtgtatgtttatataagtttagaatatttttggaaggatttataagaaattgttagtaatgattgttttggagagaataattgaatattgatgttagaagagaaatattttattatatattttttagtatttgttaaatattttatttgtatttatttttttgttaaaataaaaagttagtataaaaattattattattattatcgattatttattgaatttttatttattgtaagggtagattttatatttatagaaattaatgtttataagtattttgtaagataagtagaagttatgtagtttatataatagtttgtagagagtaagtaaaggatagttgttttttttgtttttaagtagagtttttagaaatttataattaacggttattagtataggtatttagttttttattaatatagataataaaaagaatttttttaattacgattttaagttattgggattataaattttgttaatatttattataattagagttttatttaaggtagagttttaaaataatgttttttaaatttgttttttattttatttattagtataattttgttatgtaattttttttttatttggaaattataattaaaatttacgtaaaatttaattggttttttgattaattatgttttgttattcggtatgaatgtgttattgttattataatttttaaaagtattttaattatagttataaaaagtattgtttagtttgtattgtgttaattattttttatttttaaatgatttaagtaaatattattatttatattttttgtatataaaatttgtgaagggtttgagtataattatataatgtttgttttgttgatgatttttagttgtgatttgaggaattattataaaaatgttaagggttataaggaggtggtagtatagttatagtatattgtaggtttttattttttatatttgaggggggaaaagtaaggagagtagttgagttaaatttattagtaagtaataaaaagataaattaaagaaggtttagattgttatatatggagagttaggttaggttatataattttagtaatattagaatgggtttggttgtagaaatgtgtatattgtagattttgtggttgaatttgaattttatttttaatttggttatgtggatatttttttatgatttaattaagatgaagggttttagataattgagtattaagtttgtaaaagagtagtttattattatatatttttaaaatgattatttagagtttaggtttaatttttaatattttaatttgttatttttttgtgtttaagaaaaaaaatgttttaagtcgaagtttagtttttagttttattttatgtttttaaaagtgatataatattttaaatagttattatatttatttaatgtagttataatatttttattgtgtggttatttagatggttttttgtttttttttttttttgagatggagttttatttttgttgtttagattggagtgtagtggtattattttagtttatcgtaatttttgttttttaggtttaagtaatttttttgttttagttttttagggttaggattataagtatgtgttattatgtttggttaatatatatattttttttttttttaagtagagaagagattttattagttggttatggttggttttgaatttttgattttaagtgatttattagttttagttttttaaagtgttaggattataggtatgagttattatatttaggttttagattgttttttaaatatttgtttttttaaagtttttttttttttattgaaagaattataataattatgggttttgtaattataaataagttatttttttttgtttggaaatgtagttttaataataatgttaaattattttatttttttttaatgaaaatagaatttttattttttttggtgaaattggggaagaggggaatgataatatttaaattgggattttaatttaaaaaaatcggataatttaaaattttgaacgggtgatttgggggaaatttttggaataaattttaggttttttttaaaaagagttttgtattttttaaatgtttaaaattttttgaataatttttttttatgttttaaaattgtttttgtttttttttgggttggaaaattttcgggggttggttttggtaattttttttttttttattttttttttttgttatgggaagttagttattcgaatattnanttgggtatttttttttggtttggattttatttttgttgtttaggttggagtgtagtggtattattttagtttatcgtaatttttgttttttaggtttaagtaatttttttgttttagttttttagggttaggattataagtatgtgttattatgtttggttaattttttttttttttttttttttaagtagagaagagattttattagttggttatggttggttttgaatttttgattttaggtgatttattagttttagttttttaaagtgttaggattataggtatgagttattatatttaggttttagatggttttttaaatatttgtttttttagagtttttttttttttattgaaagatttatataagttatggtttttgtaattataaataagttatttttttttgtcgggaatgttagttttaagaataatgtgaatttattttattttttttttaatgaagttagaattttatttttttttgttgtaaattggggaagtaggtgaatgataatatttaaattgtgatattaattttaaaaaatgaggtagatttaaaaattattatgtgtgacgtggtagagtattgtgggatagaattttaggtttttttaaaaaagaattttgatttattttaattttttagaaataattgaaatatttttttataatgttttaaatttgtttttgttttttttatgttttggaaatttttgggggttgtttttgttaattttttttttttttttttttttttttttttttttgttatttttttttttttttttgatatagaaaaggatagtgatatcgtagttggattttaatagtttaaattgtttttttttttaaaattttttatgggggttattatgttgtttgaaattgtcgtattgttaattttttttgattaaagtattaaatatgttagataaaatttaaattttaggtttataaggaaattagttatttggtagattgttgtcgatttagtatataggattagtaagttttggtggggaaaggggataaggaaataaaattaaaaatatgggtttttttttaggaagttatttggtttttggtggtaggatttagagttagggattttagtagttaaggtaaatacgatttggagatggatttttttgtggaaggaaaggtgagtagaaattaaagaaagatttttttttttattagtattttttttgagagtagtatttttagattttcgggtgtggatgattatttaaaaaaatattgaaggaacgaatggatgaatgtatataaaaggaattgtttgaattatttttttttttttaaaatttgggtaagagtaaatttatttgaatatgtgatatttaattattttttttagtaggtaattgtgttttataaagaatgatatttattttaaattggtttggaagagtaggaagataaaggtgattagtatattttggagaaagttatggaagaagaaatttattaagttttaagattggaggtcgggtatggtggtttatatttgtaattttagtattttgggaggttgaggtgggtagattatttgaggttgggagtttaagattagtttgattaatatggagaaattttatttttattaaaaatataaaaaaattagttgagtgtggtggtggtatatgtttgtaattttagttatttagggggttgaggtagaagaatcgtttgaatttaggaggtggaggttgcggtgagtcgagatcgtattattgtattttagttcgggtaataagagcgatatttcgttttaaaaaagattgggaaaagtgttgttttatttttaatagatttgggaattttggttgtattttttaaataatgaaaagtttagttatttttgttgtttttgtattttaatttagttatttttatatgtttaagtatattataggagttttaggtaaagttttaaagaggaagggataaaatgttgaattttataaatttttgttttttttttaaagaatataaaaaatatttttatatattaaaggttgttatttatagtattaattatagtaagtataagtgttttgttttttatacgattgatatagagatattaatattgacgtgaaattagtttggtatttagtttgacgtgtttaattaagtgtgaattgagtggattataattatatataaggtataatatattgtttaatatttagagttaattttttagttttttattttaagttagaaaatatttgtggagttgggtatagtggtttatgtttgtaattttatttttttgggaggttaaggtgggaggatttttttaagttaggagttcgagattagtttgagtaatatagtaagattttgtttttataaaaaataaaaaagttagttaggtgtggtggtgtatgtttgtagttttagttatttaggaggttgaggtgggaggattgtttgagtttaggagtttaaagttgtagtgtttattatattttaggttgggtgatagagtaagattttgttttaagaaaaaaaaaaatttaaagaaaaagtatttgtgaaatatttttttgggaattagggatagttttgtaagtaagatggatagtgtttggaatagatttttttatttgattgttttatatttatttatagtgtaatgaaagagaaggaaattatttgaagttatgaataagggaggagatttgtttgtgttttttaagtttatttttgcgagttgttcgtgaattttaagtaggttgggtcggttgattttgggtttattgatgttgtcggtgttacgaaagtattttattttgggaacggtatttatggtgttgtggttaaaagtttgtaaatagtatgtgtttgtgtgagaattataagcgtgaaaattggtatttgttttagtagtttttttattttggaggaaattgttatagtatttttgatttttaggtttaaagttgattttgagttttttttgagttttatttttaaaagaggtttttttataatgtggtgggttagtattgttatttgtagttgtattgtttttatggtttttatttatgatattaatttgaaagcgattggtattattgggtattgaatttagaaatatattggaagagttgtttagtgatattttttaaaattgattttttattgagttatttattttgtggttgttttaaaaaatttatatatttttttattaaaataaatattaatgtgtttttattagggagtttttggtttttgttttagatgatttaataaatagatttttgatatattgttttcgatataatttttaggatgttttttaaagttgttattgaaaaagaaaattaaatttgttttaagtaatataaatatatttaggtaagggtgggatataagggaatagttttattttataagatatataattttaaatttattttattaaaatttatttgtttaggaattttagttatgtgagtaattaaatttgataataaataattggaaaattgttttagtaaatagaatttttaatgtagttattaaaatgttatttgtgtttgtagtatttgtttgaatttagtgtattggagtttattgtgattttagaaaagatgtaattttatttattgaatatagtaagagttgatgagaatatttttagtttaagatatagtttattgatagtattaaatgttgaaattgtaaagtattttgattgttaggaatatatattatataatatataaaatgaaaaataaaatttttaaaaaatatatttttgttagtttataaaaatttgtatatgtttaatttataaattttaaattttgttatttatgtaataagtaaaaaattatgttttagaatatgtatttaaaaaatatattttattaagatgatgtttttgtgaatttttagattttttataagatttaaatgttttatttgtttatatatttgtttgttttgtaaatattaatatgaaattttaaaaaaatatgaatatagaaataagttatatatttataagaaataagttatatattttaaaaaagttttttgttatgtttaggtaaaataattatgttttattgatttattttaatgaaatgtttttaataattgagaggtttatatttgattgtgaggtgaatagattttataataattttcgtaattttatagtattggtttgttttaaaatatttgttttagaattatatttttttattgatattttaaaatttggttttttaagggaagttttagaaaaatgagataaatataagtaaaaatttgtttttatttatgtagaaatatcgatgtttaataatattttttataaaaaataatatttttgttattatttttttgggaaaaagaaaaattggttttttcggtttataaaaaagatttaaaaggttttttaattgttaaagaagggttataaaaatagttttttaaaaaatatttttttaatttttaattaaataaataggttcggaaaagattttattttgtttgaagaggtattatttttttttttttgtatggaaattaaataaattaaaagtgaaattaatatttatttaaaatatttttattttgggaaatatggaaaatttttttttttttagatggagtttcgttttgttgtttaggttgtagtgtattggtgtaatataagtttattgtaatttttgttttttaggtttaagtgatttttttgtttcggttatttgagtagttgggattataggcgtttattattacgtttggttaaatttttttgtaattttagtagagatggggttttattaggttgattaggttgattttgaattttagattttaggtaatttgttcggtatagttttttaaagtgttaagattataggtgtgagttatcgcgtttagtagggaaaattgttttaagtaggaattaaattgtgggtaagtattttagtggtattattaaatgatttttttgtttttaattagaaaaatatttttttgtttaatttagtttttgagttttgttgaggaaaaggttttttttttttagatttgtaagtaggtgattattaatattgtaaataattttttttttaagtttgttattgattattaattaggatgattgaatgagttttttttgttttttataagaaacgatttaagtgatttttagttgtttgagtagttcggttgtggtgtaatatagtggttaggagtaagatttaagttagaaggtttaatttatgtcgtggttttgttatttgttgtttgtgtgaatttagttaagttatttaatttttttgtgttttaatttttttatttgtaaatgtagttgtggattataattgtatttattttgttgtagagttattttgaggaataaatgagttagtttgtgtatggggtttagaatagtaataatttgtatttagtgtttgtttttattattttagcgttatttataattagtttgggatttttattaagtatatataagattgtgaggtgaattattagagattgggatagatattttgtttataaaaaataagtgtaaaggtaagttagtgaattgatataggattatagaagtgtttagagatatttaagtaaaattttttagatttttttcgttaagtaaatgttatgttaattagttaggttaatgtcgtgaggttatattagaaatagagatagaattataagtatatatttataatttattttatttttaaaggttattagtataaggtatttatttgtttaataaagggttttgattttttatatagaaagtgttttggtataggagtgttcgattttaaatttagttgggtggggttggttgtttagattaagataaagaatagttaggatggggttggtatttaaaataagttttatttattagattaggataggagttataagttggtattttttaattttttttggagttatttatttattttataattttttttttttattaatgattgtgaatatttttgatattagttaatttttttttttttgttgattgattgtttgattttagagtggtatgaatttgttttagttttggttttatattaattagatatttttattttaagttttttattttttattgtgaaatgaaagtttttgtttttttttaaggggatttaggtattttggaataaatgggagatagttttgggggatatggatgaaataatattatttataaagttaattttgaaaggtgaattcgatttaggttttttagataagcgggaaaggtaataggagtaagttattttgaggtatgtttttttattttttttttgttttttttgataaggtttttgggaaggggaagttagaggttgatttaattgtgatattgaatatttatttttagaagaattaatattttatgaaatttttatgttgtttttatgttgtaattagttttttatattttttatattttttttgtttttgaaaatatagatattgatttttttattttttaaattattttattttttaaaaaaattaaggtatttaatagattataaataaaaattatagatgaagatatttttggttaatagaatttttttttagtggatttggaaataatattatggtagagttaatatatttgaaaagtttatgggagttgaatttttagaaataatgtttatattttataaagtttttttggttgtagaggtttttttttttttgaaataaagatttggttttggtttgttttagttattaaaatggagggttttggtgggtgttttttttgggagataaatgaaatatttggtattttaaaagttttggttaataaagagatttagttttttggtatatataatttttagtatgtttagttgaatttggtttagtggtttgtttttgggttaagttattaattggttatgaggtgtattaggtttatatttttgaattaattggggtatagagagtttttttgaggtgaggatttggtttagaagatttatagttaataatagatatgttttaaatttattatgagatggaaagtattaaggaattttatagagatagttggttttggaattttatagatttgagtagtaattatgtttataagttatgtagaagtgttgaggatagtgtttagggatatagtagaaattaaattgtttaagtttaatttttaatataattattttttagttatggtgattttgggaagttagttaattttttttagttttagttttttttttgtaaaattaagattaaaaataaaatggaaatagtagtttttaatttaaagaatttataagagtattaaataaattgaaagtaattaatttagtgttattttttggtaatattagttttgtttttttatggtatgttttgtagttttgtgtttttaaaggatataaatatttttgtatttattttttgttatgtttttttattttgatttatagagagttagaagtttgtagttggaaagaatttagaattatataattttatttttttattttttaattgaagagaatgaaatattagagagattgaataatttatattaagttattgttttttagggtttgagaatttttattattgttattgatgaggataataaatattgatagtaaggtatgtttagatattgttttatggtttataaaatgtttttatatttattatatttaattggtttttttaatattgttgaagatatgtaggatgggttttttaatttttgttgtgtaatataggttttttttaggtaattttttaggttataaagttagtttttggttaagttaatattagaatttaaatttttgagtttaggtttttaatttgaaaaattttttatgatattttaaatttttatttattttagatttttgggtttttagatatatttgtagtatttatagggtattagaattgaaaaggatgttaatattattttttattgaagtttatagagattagatgatttatttattagagtat

SEQ ID NO: 1677 - DNA, 5759 bp, Artificial Sequence
  chemically treated genomic DNA (Homo sapiens)
atttatgtatgggtagtttaatgttatatataatttttattttaagagtatgtaattgggtagtatttatatttaggaattttataagatatttttatgtttttttgtttttttatttttaataaagagtatggtaaggattgtaagtttggaatataatatttttttgtagtgtgttttgagtttacggatgttttggtttggtaaatttttagataaaaagatagtagatcgatttgggtgtttagcgagttttattcgtaatggtgatgttaggtcgttttatttttttttttcggtttaattattaaatcgagtttaattttttaattttggggttagtatttttttattttttatagtaagagaataattcgatgtatgtggtttatttttagtaggggtttagggaaacgcggttatgttagtttttattttttatttttttaatattttatttttttttttatttgagtttaaagagattgagatgattttttttttatttttttttttattgttttttattgggaaatgatttttttttttaattttgaagaaataaaaggcgtaagtttgggagggaggatgatgtttcgggtggtgtagtggatgggatttggcgtttttattattatggttcggatttgattttcggttagggaagtttttttttttgttaggcgtggtggtttatgtttgtaattttagtattttgggaggttgaggtagatggattatttgaggttaggagtttgagattagtttggttaatatggtgaaattttgtttttgttaaaaatataaaattagttgggtatggtggtgtatgtttgtaattttagttatttaggaggttgaagtaggagaatcgtttgaatttaggaggtggaggttgcggtgagttgagattatattattgtattttagtttgggtaaaagagtaagattttgtttaaaaaaaaaagaagaagaagaagaaaaagaaataaaagttggtttttcggtgtttaaaaaaaataaaaatgaaaatttttaaaagtttaaggtattgttagataatatggttttttgtatagatatattagtatttttttttttaagatattttagtattatttttaagaattttgttgtaataaatatataaatttttaggatattaatagtgatttttttagacgtggtgtatttgtgtagtgtataatttgtatatttttacgtattggtttatgatattagagattatattatgagttttatattggtttgattttaatttaaaagttggaaaggtgatagatgggtatttgatgaaagttgtaggtagggatggagattatatgaattttttgttttgtgtaggaggaatattatttttggatgtttttagttattgattttcgtttatttttaaaatggatggaataattttaggattgtatttaaggggagttaaaaatttagggattttagtgtttttttttattattcgttattgtgtttttttagtaagggtaggtagtggaggtttgagtgagatttttgtattttttgcgttgttttgatttttggttttattttagggaatgtttatattaaagggttttttttaagtgtcgttttgggagttttggttttcgtttggtatttttttatttgattgtttattaaattaaagaatttagtaggtttagaatttattgtaaaggaatattttgttttagatttgtagtttttgttatttttttcgtgggggggtgaggggatagaaaagtatgagaatgttttgtagaagtttttagtgagggtattgtttaattatataattttgaggtgttaattatttataatattaaattgtttatgcgtagattaatattaagtagtaattaaatgaaatagtgttataatttttgattaaaataatataaatttagaaatattaataaatgtaaggtattgtagaaaaaatatgaaaattgtgttttatttatagttgtatttttttttttttattttgttatttagtttttatgtttttttacgtatatttgatgaattgttttaaaatttttttggaaagagaggtttattaggaatggagagagttattggattttgattttattattcggtatttttcggtttagatgggattgtgtatcgtaagatatattttaaaaaataagatagtattagaattgttgtagagttaggcggtatgattttatggttagtgaggaatagagatgtaaattgttttaagtgtatagaagtttattgcgaaatttaaatagatttgggtagagtatgaggagggggaggagagagaaaatattttaggggtagaaattttaagaagaaagtcgaagaggagagtagttttatgtaggtttatttgtgattgttttaggtagagagatggaaggtgtatttatttggtatgggaatagagaggggtatttaaagaggagatgtaagggaaagattaaggaaaggtaatgttagggtatatttagtaaatgattttttggaaataataaaggagttattgtagaaagaatagagaaaagtttattgtattgtgtaattaggttgttaaaagtatcgagaatatatgtatgtacgtaatgagtgtttagttgtttatagtaatagggtggtagcggattttggtattttagaattttgtagtatgagaatttggtaagttttgtattagaaagttatttagtttatagtttttgaatgaagtaaatggttttttttgtatttataattgtattttttttgatgttaaagtagggagaagtttgtttttttatttaagttaggaggaaggttttatttggaaatttttaaggtaaattagtgttgattgagaggggttgatattagaatgggggtatttttatatgttcggtacggtgttttgaagatgttattttttattataattttataaaggaagaaaagttattttattttatattgaggaatttgaggtttagaaattgtgagtaatatgtttaaggttatatagtttgttagagaaaagttagtatttaaatttaggtttatttgatttggaattttatgtgttttgtgttgttttgtgtatataatatggtaaggttgtaatttgtggttttttatttaaggtgtggttttatagggattaggagaaaggttagggagggagggtgggtatagaaagaggtggtttttttaaggaggtttgagatttattatatatttttagttttgattagtgcgattgaggtagaaggttttatgggtgttatgtggaggtagttttaggatgaggtttataaatatgtattatggttaagttgagtgaaggaattaatgaaaagtaaatatataggtagaagttggaaatattggatagtattggagtggttaaaagtataaattttgagttagattttgagtaagttatttaaattttgagttttagattgtttatttataaaatggggataatagtataatataggaattttgtaaatgttttattatttgtggtagttattatttttattattattattagtatgattatttttattagggatagtggtttatttgtataaggaagttatggagatattagtatgattttttttatttttaaagtaggttatttatattgttttttgaagatttattttttttttttagggaaattcgaggagtttattttttttttattttattagggaaaaaatgttggaaggagatttgtttgaatttggaaatttttattatgaatttagatttatatatattttattttagttgttcgggaggtatttggaggaaggatgttttaagtcggtaagaattttgtggtttggcgggtgtttagcgggtggagttagagagtttttagttatgggttatttagttgaaggttgataagtattatttgtatatttaagtaggtaggagatttagataaaagatttatgatatttgtatggttggttgtgggattatatatatatattatatatatatttaaaagtatatgtatatatgtatatatattatatatatatatatatatatatttatatatatgtaatatatgtatatatgtatatttattatatgtatatatttatatatatatatgtatgtatgtaatatagatgtatatatgttatatatatatatatatatatatatatatatatatatttttttaaaattttgtatttataaaagtagatttgagttagatttttgttataatagaataagttataaaattgaaatttaaaaagaagggggaaggaggagatattttaatttagttttagatttttttgttatagaatgtttgttttttgatttttaaagaggtagtagagtatgtttaagaatttttatttgggaagatagatattttagggaaatattgatatttttgttttttttttattgggaaaaaggtagttggtttttagaaaataatttgtatgtattttattttttttatttttttaatagttttttaggtttttgttggagttttatatttgtgtagaagttgtgttaagtttaagaaaattttattttaggagtagtcgtttagttttcgagtttatatagtagtaatttgttttatggtttttagtttgatatcgtgttgattttttttagttgtaaatttttttaaaaatatgagtaggggttagaggaaataggagaagaaaaagatgtattttggtaggattattgttggttaaagattttggaatgttgtggaaattgtggtaaagtagttggtattttgttaagaatagagagagagatatcgggtattgaagttaggggattagttttttggtgttgttttggtattgatgtttgaagtgggaggagaaagtcgagtttataaatatatagagtagagtggggttttgagtatataattgttaggtgtttttttttagtattattttttgagaagtatttttttttgtcgtggaggtgggtaaatttttattagttattgttttttgttgttaggaagttagttagagtggtgtaagtatttatttttatttttatttatttttaattatttattatttggggtttgtttttatagttttaagttttgtttttttttttaatgaagaaaatgttttatattatcggaattgattagaagtagtaaaattagagttttggtagattagaaagtaatttattaaagttataggtttttttttggaagtttaaaggtatgtttttattcgtgatttttgaagtaaggtgtatgtagtatttgagttgatgtggaagagggtttgtagggaggtgtttatttaatgtgtttaatgattttgggttaattaatattattaggagttttaggttgtgtttttgaaataataatttgggttgtgtttttgaaataagttcgaggcgagtgtttataagatttaaaagaaaaaagtgggttattgggaatggttttttttagtgatggatttatggatttttttgtgtgtgttgttatgttgaagggaatgtttttgtgtatttatcgggagaataagttagttataattgaagttacgaatttggtagtttttttgtagttgtattttttggagtttggaattaagatttttgggagtagtgttttttaaggagggaagtgttttaattaggatataggaatatttgatagtattttttttgtttttaattatagt

SEQ ID NO: 1678 - DNA, 5759 bp, Artificial Sequence
  chemically treated genomic DNA (Homo sapiens)
gttgtaattggaaataaagaaaatgttgttagatatttttgtgttttggttaaaatatttttttttttggaaaatattatttttagaagttttgattttagattttagagagtgtagttgtaaggaagttgttaaattcgtggttttagttgtgattgatttgttttttcgatgggtgtataagaatattttttttagtatgatagtatatatagaggagtttataaatttattattggaaagggttatttttagtggtttattttttttttttgagttttgtagatattcgtttcgaatttattttaagaatatagtttaaattattattttaagaatataatttgaaatttttaatagtgttgattaatttagaattattgagtatattgggtggatatttttttgtaaatttttttttatattagtttaggtgttgtatgtattttgttttagaaattacgaataaaggtatgtttttgagtttttaggaagaagtttgtggttttggtaaattgttttttagtttattagaattttgattttgttatttttgattaatttcggtgatataaaatattttttttattaagaaaaagagtaaaatttagaattgtgaagataagttttaaatgatgaatagttggaaatgaatagaaataaggatgagtatttatattattttagttggttttttggtagtagaaggtagtggttgataaagatttgtttatttttacgataagggagagtgttttttaggagatggtgttggagggaggtatttaatagttatatatttagagttttattttgttttgtgtgtttgtgggttcggttttttttttttattttaggtattaatgttaaagtaatattaaggaattggttttttggttttagtattcgatgtttttttttttgtttttgatagagtattaattgttttgttatagtttttatagtattttaaggtttttgattagtaataattttattaaaatgtatttttttttttttttgttttttttggtttttatttatatttttggaaagatttataattgaaaaggattaatacggtgttaaattaaaaattatggggtaggttgttgttgtgtggattcggaagttaagcgattgtttttggggtgaaatttttttagatttggtataatttttatatagatgtaagattttagtaagggtttgaggggttgttgggagggtggggaagataaggtatatgtaagttgttttttgaaggttagttgttttttttttagtgaggagaaaataaaaatattagtgtttttttggaatgtttgtttttttaggtgagaatttttggatatattttgttgtttttttaaaagttaggaagtaaatattttatagtagggaaatttaaaattgaattaaaatatttttttttttttttttttttttaaattttaattttgtggtttgttttgttatggtaaaaatttaatttaaatttatttttatgagtgtagaattttaaaaaaatatatgtgtatatatgtatatgtgtgtatatatgtaatatatatatatttatattatatatatatatgtatatatgtagatatatatatataataaatatatatatatatatatattatatatgtgtagatatatatgtgtgtatatatgtaatatatatatatatatatatatatttttaaatatatatataatatatatatgtaattttatagttagttatgtagatgttataggttttttatttgggttttttgtttgtttggatgtgtagatagtatttattagtttttagttaggtggtttatggttgggagttttttggttttattcgttggatattcgttagattatagggtttttgtcggtttgggatattttttttttaagtgtttttcgagtagttgaggtagggtgtgtataggtttaggtttataataagagtttttaggtttaggtaaatttttttttaatattttttttttggtaaaataaggagaaaataagtttttcgggtttttttgaaggagaaaaatgaatttttaggagatagtgtgagtggtttgttttgggaatgaaaggaattatattagtgtttttatgatttttttatgtaaatggattattgtttttgatagaaataattatgttaatgatggtaatgagaataataattgttataaatggtagagtatttgtaaaatttttatattatattattgtttttattttgtagatgagtaatttgaggtttagagtttaaataatttgtttaaagtttgatttaaagtttgtatttttagttattttagtgttgtttaatatttttaatttttgtttgtatgtttgttttttattaatttttttatttaatttggttatgatgtatatttatggattttattttgaagttgtttttatatgatatttatggagttttttgttttagtcgtattggttagggttgaaggtgtgtagtgaattttagatttttttggaaaaattatttttttttgtatttattttttttttttggttttttttttggtttttgtaaagttatattttaagtggggggttataaattatagttttgttatattgtatgtataaggtagtataaggtatatggaattttaagttagataaatttgagtttgaatattagtttttttttgataagttgtatgattttaggtatgttatttatagtttttgagttttagattttttagtgtaaagtggggtaatttttttttttttataaagttgtgatgagggatgatatttttaaagtatcgtgtcgaatatgtagaggtgtttttattttgatgttagttttttttaattagtattggtttattttgggggtttttaaatggaattttttttttggtttgaataaggggataaatttttttttgttttgatattagaaggggtgtagttatgagtatagaggaaattatttgttttatttaagaattgtgaattaggtagttttttgatgtagggtttgttaaatttttatattgtaggattttgagatgttagggttcgttgttattttgttgttgtagataattgggtatttattgcgtgtatatatgtgttttcggtgtttttaatagtttaattgtataatataatgaatttttttttgttttttttatagtagtttttttattatttttagagagttatttgttgagtatgttttaatattgtttttttttggttttttttttgtattttttttttgggtgtttttttttgtttttatattaagtgaatgtattttttatttttttgtttggaataattataaatgaatttatataaagttgttttttttttcgattttttttttggagtttttgtttttagaatgtttttttttttttttttttttttatattttgtttaaatttatttggatttcgtagtgggtttttgtgtatttaaagtagtttatatttttattttttattggttatgaaattatgtcgtttagttttgtaatagttttggtattgttttattttttagaatatattttacgatgtatagttttatttgggtcggaaggtatcggatgatgaagttaggatttaatagttttttttatttttaatggatttttttttttagaaagattttgaggtagtttattaaatatacgtaagaggatataagaattaggtgataaaatggagaaaggagaatgtaattatggataaaatataatttttatattttttttataatattttgtatttgttggtatttttaaatttgtgttgttttaattagaaattataatattgttttatttgattgttgtttgatattgatttacgtataggtagtttaatgttataaataattggtattttaagattatgtaattgggtagtgtttttattgaggatttttataagatatttttatgtttttttgtttttttatttttttacgaagagagtggtaaggattgtaagtttggaatagaatgtttttttgtagtgagttttgagtttattgagttttttggtttggtaaatagttagataaaaaggtattagacgagagttaaaatttttagaacgatatttggaggggattttttgatgtaggtattttttagagtgaagttaaggattaaggtagcgtagagagtgtaaaagttttatttaaatttttattgtttgtttttgttgggggaatataatgacgggtgatgaaaggaggtattgaggtttttaagtttttagttttttttaaatgtagttttgaaattattttatttattttaggagtaaacggggattaatagttgggagtatttagagatgatgttttttttgtataaagtagagggtttatgtaatttttatttttatttataatttttattagatgtttatttgttatttttttagtttttaaattaaaattagattagtgtaaggtttataatgtagtttttggtgttatgggttaatgcgtaagggtgtgtaggttgtgtattgtataaatgtattacgtttaagggggttattattaatgttttagaaatttgtgtgtttattgtaataaagtttttgaagatggtattaaaatgttttgagaaaaggggtgttagtgtgtttgtgtaaggagttatattgtttagtaatattttgagtttttaaaaatttttatttttattttttttgaatatcgagaagttagtttttgttttttttttttttttttttttttttttttttagatagagttttgtttttttgtttaggttggagtgtagtggtgtgattttagtttatcgtaatttttattttttgggtttaagcgatttttttgttttagttttttgagtagttaagattataggtatgtattattatgtttagttaattttgtatttttagtagagatagggttttattatgttggttaggttggttttagatttttgattttaagtgatttatttgttttagttttttaaagtgttgggattataggtatgagttattacgtttggtaagaagaaaggtttttttgatcgggaattaaattcgggttatggtggtgagagcgttaaattttatttattatattattcggggtattatttttttttttaggtttgcgttttttgtttttttaagattaaaagaaaaaattattttttagtgaggaataatagggaaagaggtaggaggagaattattttaatttttttaggtttagatgaaaaggagagtaaagtgttggaaaaatgaggggtggggattggtatggtcgcgtttttttaggtttttgttaaggataaattatatgtatcggattgtttttttattgtaaaagatgaggggatgttggttttaaggttaggaagttgagttcgatttgataattgggtcgggaagaggaggtgggacggtttggtattattattgcgaatggggttcgttgggtatttagatcgatttgttgtttttttgtttgaaggtttgttaaattaaaatattcgtgggtttagaatatattgtaaaggaatgttgtattttagatttgtagtttttgttatgttttttgttgagggtgaggggatagagaagtatgagaatgttttatagaatttttgagtgtgggtgttgtttaattatatatttttgaggtgaaaattatgtgtaatattaaattgtttatgtatagat

SEQ ID NO: 1679 - DNA, 8998 bp, Artificial Sequence
  chemically treated genomic DNA (Homo sapiens)
tacgtttcgttaatttttgtatttttagttgagatgaggttttattatgttggttaggttggttttgaatttttggttttgagagatttatttattttaattttttaaagtgttgggattttaggagtgagttattgttttcggttttttatttgttttttttagtgtttgataaatattggttagatgagttattataacgattttatgttagtttatgggtattcgtttttttttatttgatgttttttagttttttattttgtggatgtggtttgttgaatgaatgaataaatgaattattaagcggatagatgtttagttgaagagtggtttttattttgagggaggttattggggttgtttagagagtaggggtggtttagttagatttgtgttttgaaatattttagatttttttgaagtttgggattttttttttttttttttttttagatagagttttgttttattgtttaggttggagtgtagtggtgtaattttggtttatcgtaatttttgttttttgggtttaagtgatttttttgttttagtttttagaatagttgggattataggcgtgtgttattagttttggttattttttttattttttatttttagaagagatagggttttgttatgttggttaggttggtttggaatttttggtttttagtaatttattcgtattagttttttaaagtgttgggattataggcgtgagttattatgtttggttagaagtttgggattttgtatgtgttattttttttgtttggaatattttttttttgggattggtttaatttttttatattttagtttcgatgtttttttttttaggaagttttttttgatttttaagtttggttaagtattttttttgggtttttttattttagttttgtttattttgtattattattatttgtgtttttttttgaattttgagttttagtagaacggggttagaattgttttgttcgttattgggtttttggtattatttatcgtaggatttaatattgggtttagaatatatgattgttttttgaaggaaatgtttagttggagatagtcgagtgtaggggtagttagggtgtttgataggagatgtagataaggattagaaatatttgagtttagattttttgtttatgtttggggtttgggttatagtaagttttattatttttatttgtttttaaattaggaaaatgggagtgtgagttggttttttggattagtggggataaaattatgtttgtgagtattgttaatagagatggaaatttttttgttgttttagggttttatacgcgttttttgaatgtttttatattatgttatgggtttttttttattttttagattttagtgtagatgttatttttttttagtggttgaattgtttattttgttatttataggatgtttttgtttttttttaacgtttagttttagttgatagtttaagtttattgttttgtttttttcgtattagaatgtacgttttagtagttaaggattttgtgtgtgtgtgtgtgtgtgtgtgtgtgtgtgtgatatagagtttggttttgttgtttaggttggagtgtaatggtgagattttagtttattgtaatttttgttttttaggtttaagcgatttttttgttttagtttttcgagtatttgggattataggcgtggattattatattcggttaattttttagtatttttagtagagatggggttttattatgtcggttaggttggttttgaatttttgattttaagtgattcgttcgtttcggttttttaaattgttgggattataggtgtaagttattgtattcggttaagtttaagtttattgttttgtttttttgtattagaatgtaagttttagtagttaaggaattttttgtttttttgtttttttttttgatatagagttttattttgttgtttaggttggagtgtagtggtgtgattttcgtttattgtaatttttgacgtttgggtttaagtagtttttttgttttagttttttaagtagttgggattatagtcgttcgttattacgtttaattaatttttgtatttttagtagagatagggttttattatattggttaggatggtttttattttttgattttatgatttgtttatttaggttttttaaagtgttgggattataggtatgagatattgtgtttggtttatttttatgtttttgtatttttagtagagatggggttttattatgttggttaggttggttttgaatttttgattttaagtgatttatttgttttggttttttatagtgatgggattataggcgtgagttatcgtttttagtttaaattttttttttttttagattgagttttgttttgttatttaagttggagtgtagtggtgagattatagtttattgtagttttgattttttggtttaagcgattttttcgttttatttttttaagtagttgggattattggcgtatattattatatttagtttattttttaatttttttgtagagacggagtttcgttatgttgtttaggttggttttaaatttttgggtttaagtgagttttttattttggttttttaaagtgttgggattaagggtgtaagttattgtgaaattttttttttttttttttttgagacggagtttcgttttgtcgtttaggttggagtgtagtggcgtgatttcggtttattgtaagtttcgtttttcgggtttatattatttttttgttttagtttttcgagtagttgggattataggcgttcgttattatgtttggttgattttttgtatttttagtagagacggggttttatcgtgttagttaggatggtttcgattttttgattttgtgatttattcgtttcggttttttaaagtgttgggattataggcgtgagttattatgttcggtcgaaaaattttttaaaatatttatttatttattttgagacggagttttattttgttattaggttggagtgtagaggtgtgattttggtttattgtaatttttatttttcgggtttaagcgatttttttgttttagttttttgagtagttgggattataagtgtatgttattatgtttaattaatttttgtatttttagtagagatagagttttattatattggttaggatggtttcgattttttgattttatgatttgtttattttggttttttaaagtgttgagattatagatatgagttattatgtttggtttatttttatgtttttaaagataaggttttattatgttgtttcggatggagtttagtggttaaatgtgggtacgattatagtttattgtagttttgaatttttggttttaagggatttttttgttttagttttttaaatatttgggattataggtgtatgttattgaatttagtttgttttttagtaataataataataatagtaatcgtagtagtagtatttgatttttttttgaagggtatttttgttagaaataaaagaagagagaaagaataaaaaattttaaagtataaataaataatttttttttttttgaggtggagttttattttgttatttaggttggagtgtagtggtgagatttcggtttttcgtaatttttgttttttggatttaagtaatttttttgttttagttttttgagtagttgggattataggtatgtgttattatatttagttaatttttgtatttttagtagagatagggttttgttatgttggttaggttcgtttggaatttttgattttaagtgatttgttcgtattaatttttaaagtggtgggataataggcgtgagttattgcgttcggtcgtattattttatttgaatttttgtaatatttaaggcggtatgatttattattatttttatttatatatatgaagattgagttttatagaggttgtaaattatttgaggttttatagttgttgtaggaggaagtttttgatattattattataatttttgagtaagtatgaaagtttgaaatgttatagaataggttagagatgggaaaggaatgaggattttaatattgttaggtggagtaaggaattataatttattgttaattttttaaacggttattaatagagaatttggggaggtagtagagtgggtgcggttaggggtttgggaggtgggtatgtacgtgttattttttttaggtgtggttttaaggtgaatgattttttttgtttttggggtttaagcgatttttttgttttaggtttttagtagttgggattataggtacgtgttattatattaggtaatttttgtatttttagtagagacgggttttattatgttggttaggttggtttcgattttttgattttaagtgattcgttcgttttattttttaaagtggtgggattataggtttgagttacggttttttaaataaatatattaattttatttaaattttatagtaattatatgagataaaagtttttaatatttgtattttatattcgaggaattaaagtttttagaggcgattaaagattaaatttagggttgaggagttttaaagttgagttgagttgtaaatgaattatcgaggattatcggagttttttagcgattttcgtattagggaacgaatttttgtggtttaagggttttaatttataatttagtttttttggcgggaaatagtatttttttaaggtttcgtttttttttggtttcgtttcgtcgtttttgggttcggtttttggagatgggtattattaatttgttttttatgggggatttggtttatttcgggtattagtttcgtttttattcgtttagttttcgaacgttttgtagttaatcggcgttcgagggtcggttttcgtttttttaagtttcgttttttatttttatttttggtagttttcgttaaacgggtttagagttacgcggtacgttcgggaggttttttttggttggtaatcgttattttcggatattagattatcgtttttcgtatataggggttcgtattttattttttcggatttaagagtttgggttttttgttttcggaggttcgtttttcggtttttagattttggtattttagtttttagtgtttaagatttaggtagttcgggttttcgtttttcggatttaggcgttcgggatttgcgttattagaatttagttttttgtagattttcgttatttgggggtatttaattttttggagttaagggttttacgttttatttagagaaattttcgtatttttagtttttagggttaaggaattcgggcgtttcgaatttttagttttcggatatttggtatacggggtagagtagagaagttttagcgtttagtttggggaatttaaatattttagtttttaagagttaaggaattttagtgttgtgaatttataattttaaggagttttttaaagttttagtttttaggtgttgttatttaatttagttttaggaacgtcgggttttgggaaggagtttaagcgtttttagttagtttttaggcgttaagaaatttcggtgttttttattatggtggtcgatttttttcgagattttaaggggttcgtagcggcggagtttatcgttaacgggggtttggcgttggtttttatcgaggattaaggcgcggtagtaggcggttattgcggttttcgggattaggtgcgtcgttgttttcgagttaatttgtttgtgttgttgatagtggtggtcgtggtggtcggcgtggcgttgggattgggggtgtcgggggtcgggggtgcgttggcgttgggttcggagcgtttgagcgttttcgttttttcgggcgagttgttgttgcgtttgttgcggatgattattttgtcgttggtggtgtgtagtttgatcggcggcgtcgttagtttggatttcggcgcgttcggtcgtttgggcgtttgggcgttgtttttttttttggttattacgttgttggcgtcggcgttcggagtgggtttggcgttggttttgtagtcgggcgtcgttttcgtcgttattaacgttttcgtgggagtcgcgggtagtgtcgaaaatgtttttagtaaggaggtgttcgattcgtttttggattttgcgaggttagttttcgttttttcgggaggtggggaagagtgttacggatggcgggagtggttacgtggataggacggggttttggggtttttggagtagagatttttttttagagttttaggaaaattcgataggatattgaggggaggttttagttttcgggagtgtgagtttagttttttggggaaggggtttttaaatttgggggtttgggtatataagtggggttttatagagggagaagaaagtgatttggggagatataggagggtttgtttaggggagaaagatattgaggggaggggattttaggaggaatttttgcggggggaatttttgcgtggttaagggttttaagatggggtttttagatataatttggggttagggttggagagtttgggtaaggagtttttggaggatttgagatttgagtaatttttattaggttttttttttagttttggggtatttttatattacgtgttattcggatataattaggttttgtttttggttttcgtttttcgtttattttagttggggtttggtcgttttttttttattttttagattagttttgttatttttgtttttttttttcgtttttttttttgtttgggttattttttagtaggtagtttagaagaggattagttagaaaggggagtagattttttttttttttttggtttttgtttcgcgtttttaagaatggttttttttattttgaggagggcggggggtagaggtttttttgcgtttgtttttagggtttgtttatttagtgtttttacgttggggattttttggaagttgggggaaggaaatgatgagttacggaatagggttttttagtttttggggcgttagtgtaggttgagatgcgagattggggtaggtttggtgtttcgagttgaagtttgggagtattttttggttgggggagattagttgggttttggtttagtttgggtttgggtggtataggcggatttttaggtaggtatatttatttcgaggttgtttatgagtataggttttttttgcgtgttaaaatagttgtagtttatatttggtttgttatataggtttataattaaatgatatatagttggatatatttacgtagatatttagttgaggttgtagtatttcgataaatatatggttagatattagcggttatatatacgtttattgtgtattaagatttttgtagtatagttatttagtgatgttattagttacgttaatatttaaatataggtttaagagtatataatatatatttatatatatatttatgtggttatatattaataaatttatgttttttttttttttttttgagatagtttttgttgtttaggttggagtgtagtggtgcgattttggtttattgtaatttttattttttggatttaagtgattttcgtgttttagtttttcgtgtgttattacgtttggataatttttgtgtttttagtagagacggggttttgttatgttggttaggttggtttcgaatttttgattttaagttatttgtttattttagttttttaaaaggttggaattattggcgtgagttatcgtattcggttaaatttatttttttattatgacgttattttattgtatcgtgatgtatgggtggttatttatggatattgttttatattattgaattttaatttgtatttaaattattaatatttgatagattgtatatgggtatatggcgttggttgtatattagttattggtgagagggagtatgtggagtgtttggggttatggagttagttggttgggtttaaattttagttttgttattttttagttgggtaattttttttatttttttgggttttagtttttttttttgtaaaatggggtaatagtgattatttttaaggttgtcgtgaggatgaaatgggttaatttgtgttaagtataggttaaaatgtttgtttgttatacggtaggtgttgtagatggtttagttgttatatatattttttgagagagttttattcggttttaggttggaatgtagtggtttgattttggtttattgtagttttaattttttcgggtttgagtgatttttttattttagtttttagagtagttggaattataggtatatgttattatgtttggttaatttttgtattttttgtagagatacggtttcgttatgttgtttaggttggtttttaatttttggtttaagcgatttgtttgttttggttttttaaagtgttgggattttaggtaagagttatggcgttttggttttagttattatttttattttaaggtagatattgttatataagagtaagggtagttttgtaaatatagatgtatatttatgagatatgaagtcgtttttttttttttttttcgttatcgttttttaatatatttagatttttttttatatttttagagtcgttggtaggttttttaggaggaagtggttgatgtaagttgtttagggtattaagtttgttgtatggggtggagttgaggttcggggcgatttgttttggtttgtcgtgggaggttagtattttttatttcgaatttataatgttttagggttagtacgttagttttttggggttgaaggaggttgattttttaagttttgtaaaggggtgtaagtttagttttaattttgtcgggttgaggtatgagtaggggttgtatttgcgtgtaggcgggtttttaaagtttttattcgttgttttaaaacgttaatttagttttttagataatgttgtttttttattatggtatttaataattttttgtgtgtttgtttttgtaga

SEQ ID NO: 1680 - DNA, 8998 bp, Artificial Sequence
  chemically treated genomic DNA (Homo sapiens)
tttgtagagatagatatatagagggttattagatattatagtgggagggtagtattgtttgagaggttgggttggcgttttaaggtagcgagtggaagttttgggggttcgtttgtacgtaaatatagtttttatttatgttttagttcggtagggttggaattaggtttgtatttttttgtaggatttggggagttagttttttttagttttaagaggttggcgtgttagttttgaggtattgtgggttcggggtgaggaatgttggttttttacggtaggttagggtaggtcgtttcgggttttagttttattttatgtagtaaatttaatattttggatagtttgtattagttatttttttttggagggtttgttagcggttttgagagtatgggggaggatttgggtgtgttgggaggcggtggcggggagggagaaaagggacggttttatattttatgaatatgtatttgtgtttataaggttatttttatttttgtgtgatagtgtttgttttaagatgaaaatagtagttaaggttaaggcgttatggtttttgtttggaattttagtattttgggaggttaaggtagatagatcgtttgagttaggagttgaagattaatttgggtaatatgacgaaatcgtgtttttataaaaaatataaaaattagttaggtatggtggtatgtgtttgtagttttagttattttggaggttgaggtgggaggattatttaagttcgaggaggttgaggttgtagtgaattaagattaagttattgtattttagtttgggatcgagtgagatttttttaaaaaatatatatagtagttaagttatttatagtatttatcgtgtggtaggtaggtattttggtttgtgtttgatataaattaatttattttatttttacgatagttttggggataattattattattttattttatagaaaaggaagttgaggtttagaagggtaaagaaaattgtttagttgggaaatagtagagttgggatttgaatttagttagttggttttatagttttaagtattttatatgtttttttttattaatgattggtgtatagttaacgttatgtgtttatatataatttgttaaatgttaatagtttgggtgtaggttaaggtttagtagtatgggatagtgtttatggatggttatttatgtattacggtatagtaaaataacgttatggtagaggaatgagtttggtcgggtgcggtggtttacgttagtaattttagttttttgggaggttgaggtgggtagataatttgaggttaggggttcgagattagtttggttaatatggtaaaatttcgtttttattaaaaatataaaaattatttaggcgtggtggtatacggaaggttgaggtacgagaattatttaaatttaggaggtagaggttgtaatgagttaagatcgtattattgtattttagtttgagtaatagagattgttttaaaaaaaaaaaaaaaaagtatgagtttattggtgtgtgattatataggtgtgtatgtgagtgtgtattgtgtgtttttgagtttgtgtttagatgttggcgtggttggtggtattattgaatggttgtgttataggggttttagtatatagtgagcgtgtgtatgatcgttggtatttggttatgtgtttgtcgagatgttatagttttagttgagtgtttgcgtgaatgtgtttagttgtatgttatttggttataagtttgtgtggtaggttaagtgtgagttatagttgttttggtacgtaggggaggtttgtgtttataaatagtttcggagtgggtgtgtttgtttgaaggttcgtttgtattatttaggtttaggttgggttaggatttagttaattttttttagttagaaggtgtttttaggttttaattcgggatattaagtttgttttagtttcgtattttagtttgtattgacgttttagaggttggagaattttgtttcgtgatttattattttttttttttaatttttaggaagtttttaacgtggagatattgaatgagtaagttttaaaggtaagcgtaagggggtttttgtttttcgttttttttaaagtgggggaggttatttttgggggcgcggggtagaggttaggagaaggaaaagaatttgtttttttttttaattggtttttttttgggttgtttgttagggggtggtttagatagaggaggaaacgggagggaaaggtaggggtggtagggttgatttaaaagataaaggggaagcggttagattttagttgaaatgggcgggaagcggaggttaaaaatagagtttggttatgttcgagtgatacgtggtgtgggggtgttttagggttgggaagagggtttggtgggagttatttagattttagattttttaggggttttttatttaaattttttaattttggttttaaattatatttagaagttttattttggggtttttgattacgtaaagatttttttcgtaaaagttttttttggggttttttttttttagtgttttttttttttaggtagatttttttatgtttttttaaattatttttttttttttttataagattttatttatgtatttaggtttttagatttagaaattttttttttaggagattagatttatattttcgagggttggagtttttttttaatattttgtcgagtttttttaagattttagagggaagtttttgttttaggggttttaaagtttcgttttgtttacgtgattattttcgttattcgtaatatttttttttatttttcgggggagcgggagttgatttcgtaagatttaggaacgaatcgagtatttttttgttgggggtattttcggtattgttcgcggtttttacggaggcgttgatggcggcggaggcggcgttcggttgtagagttagcgttaagtttatttcgagcgtcgacgttagtagcgtggtgattaggaaaaagagtagcgtttaggcgtttagacggtcgagcgcgtcggggtttaggttggcggcgtcgtcgattaagttgtatattattagcggtaagatgattattcgtagtagacgtagtagtagttcgttcgggaagacgaaggcgtttaagcgtttcgggtttaacgttagcgtattttcggttttcgatatttttagttttagcgttacgtcggttattacggttattattgttagtagtataagtaggttggttcgaaggtagcggcgtatttggtttcgggaatcgtagtagtcgtttgttgtcgcgttttggttttcgatggaggttagcgttaggttttcgttggcggtgggtttcgtcgttgcgagttttttggagtttcgaggaggatcggttattatgatgggaagtatcggggttttttagcgtttggaagttggttgggagcgtttgggtttttttttaggattcgacgtttttaggattgagttgagtaatagtatttggagattggaattttggagggttttttagagttgtgagtttatagtattgaagttttttggtttttggaagttggagtgtttaaattttttaggttgggcgttgaggtttttttgttttgtttcgtgtgttagatgttcgaaagttgggagttcggagcgttcgggttttttggttttaggagttgggaatacgagagtttttttgggtgggacgtggggtttttggttttaggaggttgagtgtttttagatggcggaggtttgtaggaggttaggttttggtggcgtagatttcggacgtttggattcgggaggcggggattcgggttgtttgggttttggatattgagggttgggatgttagaatttgggggtcgggaagcggattttcggaaataggggatttaggtttttaggttcgggagggtgggatgcgggtttttgtgtacggaaggcggtggtttggtgttcgggagtagcggttattagttagagaaagtttttcgggcgtgtcgcgtggttttgagttcgtttagcggaagttgttagggataagggtagggggcggggtttgagaaggcggggatcgattttcgggcgtcgattggttgtagagcgttcggagattggacgagtaggggcggggttgatattcgagatgggttaggttttttatagaaggtagattaataatatttatttttaggagtcgggtttagagacgacggggcggggttaggaaggggcggggttttgggagggtgttgtttttcgttaaaggaattgggttgtgggttggagtttttaaattataggggttcgttttttggtgcgagggtcgttagaaagtttcggtggttttcggtgatttatttgtaatttaatttagttttggaattttttagttttgagtttggtttttagtcgtttttgagaattttaatttttcgaatataaagtgtaggtgttaaaagtttttgttttatatgattgttgtaagatttaaataaaattgatgtatttatttagggagtcgtggtttaagtttgtaattttattattttgggaggtgaagcgggcggattatttgaggttaggaggtcgagattagtttggttaatatggtgaaattcgtttttattaaaaatataaaaattatttggtgtggtggtacgtgtttgtaattttagttattggaagtttgaggtaggagaatcgtttgaattttagaggtagaggaagttatttattttgaggttatatttagagaggatgatacgtgtatgtttattttttaagtttttaatcgtatttattttgttgtttttttaaattttttgttagtggtcgtttgggaggttaataatgaattatgattttttattttatttgatagtgttgaaatttttattttttttttatttttagtttgttttgtgatattttaggtttttatgtttgtttaaagattgtagtggtaatgttagaagtttttttttatagtagttgtgaggttttaggtaatttataatttttatgaggtttagtttttatatgtgtaaatgggaataataataagttatatcgttttgagtgttgtaagggtttaaatgagataatacggtcgggcgtagtggtttacgtttgttattttattattttgggagttgatgcgggtagattatttgaggttaggagttttagacgagtttggttaatatggtaaaattttgtttttgttgaaaatgtaaaaattagttgggtgtggtggtatatgtttgtaattttagttatttaggaggttgaggtagaagaattgtttgaatttaggaggtagaggttgcgaagagtcgagattttattattgtattttagtttgggtgatagagtgagattttattttaaaaaaaaaaaagttatttatttgtgttttaaaattttttgttttttttttttttttttgtttttaataaaaatgttttttagaagaaagttaaatattattgttgcgattgttgttattgttattattattgaagaataagttggatttagtggtatgtatttgtagttttaggtatttgggaggttaaagtaggaggattttttgaggttaggagtttaaggttgtagtgagttatgatcgtgtttatatttagttattagattttattcggggtaatatagtgagattttatttttaaaaatatgaaaataggttaggtatggtggtttatgtttgtaattttagtattttgggaggttagagtgggtagattatgaggttaggagatcgagattattttggttaatatggtgaaattttgtttttattaaaaatataaaaattagttgggtatggtggtatgtatttgtagttttagttatttaggaggttgaggtaggagaatcgtttgaattcgggaggtggaggttgtagtgagttaagattatatttttgtattttagtttagtgatagagtgagatttcgttttaaaataaataaataaatattttaaaaaatttttcggtcgggtatggtggtttacgtttgtaattttagtattttgggaggtcgaggcgggtggattataaggttaggagatcgagattattttggttaatacggtgaaatttcgtttttattaaaaatataaaaaattagttaggtatgatggcgggcgtttgtagttttagttattcgggaggttgaggtaggagaatggtgtgaattcgggaggcggagtttgtagtgagtcgagattacgttattgtattttagtttgggcgatagagcgagatttcgttttaaaaaaaaaaaaaaaaaaaattttatagtggtttatatttttaattttagtattttgggaggttaaggtgggaggtttatttgagtttaggaatttgagattagtttgggtaatatggcgagatttcgtttttataaaaaaattaaaaaataagttgagtgtggtggtatgcgttaatagttttagttatttaggagggtgaggcgggaggatcgtttgagttaggaggttaaggttatagtgagttgtaattttattattgtattttagtttaggtgatagagtaagatttagtttaaagggaaaaaagatttaggttgggagcggtggtttacgtttgtaattttattattatgggaggttaaggtaggtggattatttgaggttaggagtttaagattagtttggttaatatggtgaaattttatttttattaaaaatataaaaatatgaaaataggttaggtatagtgttttatgtttgtaattttagtattttgggaggtttaagtgggtagattatgaggttaggagatggagattattttggttaatatggtgaaattttgtttttattaaaaatataaaaattagttgggcgtggtggcgggcggttgtagttttagttatttgggaggttgaggtaggagaattgtttgaatttaggcgttagaggttgtagtgagcggagattatattattgtattttagtttgggtaatagagtgagattttgtattaaaaaaaaaaataaaaaaataaaaaattttttggttgttagagtttgtattttagtgtagagagataagataataaatttgggtttggtcgggtgtagtggtttatatttgtaattttagtagtttgggaggtcgaggcgggcggattatttgaggttaggagtttaaaattagtttggtcgatatggtgaaattttatttttattaaaaatattaaaaaattagtcgggtgtggtggtttacgtttgtaattttagatattcgggaggttgaggtaggagaatcgtttgaatttgggaggtagaagttgtagtgagttgagattttattattgtattttagtttgggtaatagagttagattttgtattatatatatatatatatatatatatatatatataaaatttttggttgttagagcgtgtattttagtgcggaagagataagataataaatttgggttgttagttggaattaagcgttgggagaaagtaaaagtattttatgagtgatagagtgaatagtttagttattggaaggaagtgatatttgtattgagatttgaaagataagaaggagtttatggtataatgtggaaatatttaaaggacgcgtgtgaagttttgaggtaatagagaggtttttatttttgttagtagtgtttatagatatggttttatttttattaatttaggagattagtttatatttttatttttttgatttggaagtagataagggtaatgaggtttgttgtggtttaaattttaggtataagtaagaaatttgaatttagatgtttttgatttttgtttgtattttttattagatattttggttatttttgtattcggttgtttttaattagatattttttttaagggatagttatgtattttgagtttagtgttgggttttgcgatgggtgatattagggatttagtggcgaataagatagttttggtttcgttttgttgggatttaaagtttagggggggatatagatagtgatgatatagagtgggtagggttgggatgggggagtttagaagggatgtttgattaggtttgggggttagggagagttttttggaggaggaggtatcggagttgggatatgaaggagttggattaattttagggaaagaatattttagataaagagaatagtatatgtaaaattttagatttttggttaggtatggtggtttacgtttgtaattttagtattttgggagattaatgcgggtagattgttggagattaggaattttagattagtttggttaatatggtaaaattttgttttttttgaaaataaaaagtaaaaaaaatagttaggattaatggtatacgtttgtaattttagttattttggaggttgaggtaggagaattatttgaatttagaaggtagaggttacggtgagttaagattgtattattgtattttagtttgggtaataaagtaagattttgtttaaaaaaaaaaaaaaaaaaaaaattttagattttagaagagtttggaatattttaaagtatagatttaattgggttatttttattttttgaatagttttagtggttttttttaggatgaaaattattttttagttaggtatttgttcgtttggtgatttatttatttatttatttaataaattatatttatagaatagaagattgagagatattaaatagaaggagacggatgtttatgagttgatatgggatcgttgtgatgatttatttggttaatatttattaaatattgagaaaaatagatgaggagtcgggagtagtggtttatttttggaattttagtattttggaaggttgaggtgggtggattttttaaggttaggaatttaaaattagtttggttaatatggtgaaattttattttaattaaaaatataaaaattagcggggcgtg

SEQ ID NO: 1681 - DNA, 6533 bp, Artificial Sequence
  chemically treated genomic DNA (Homo sapiens)
tagttggatatggtggtgcgtgtttttaattttagttattcgggaggttgaggtaggagaattgtttgaatttgggaggtagaggttgtagtgagttaagatcgcgttattgtattttagtttgggttatagagtaagattcggttttaaaaaaaaaaaaaaaaaaaaaaagtttttgttttttataatatgtgttagtttttaattaaaaataaggttagtgtttgcgtgttgaggaagaagagtaggtttaagggaggaggttggggaaatttataggattgggaagagagtggggtatagggttgtttgagaaagatttttttagaaggattttggaattttttatttgttattttttttgtgattatagcgatgttagtaattataagttgtttgaggcgaaatatttttatttaattaagtttgttttttataataattttgtaaagtgtatgcgttattattattttattttatatatgtcgtaatttaaaaagcgtgttgaggtatttagggttagttattagagaggaatagaattgcgacggggttttatgtttttcgatttttgttttagggttttatttgttaagaatggtaatagttattatatattgattgttggtattgagttttggtttttgcgtttatatgtaattagtggcgaggtatttgttatagtttttacggtttaggtgagttattgaggtgatttgtttagggttgtatagttaggagttggtcggacgggaatggatttagagttttcgattgtaggttttgtgttcgttgtttttttttacgtaggagaaatgaatgttttttttgtaattatagagaggaaagaaggtggtaagtttttttttttaggtaggtgtttgttggatttaggttggtgggttgagggtgtgagtgtgaagaagaaaagtcgcgttaaagagtataggtataattgtggaaatgagttgtttaaggttgtttaagtaggagaggggattttcgggttgatatagtgttaaggggaatattaagatgattaataacgtttttaagtaaaattaggttatggcgaagttgttcggggtttgtgttagtcgttttttttatttagggcgtttttgtggtttatttgtgtgaattttatgagttttgatagtatgtatagtagtatagttattgttatatttaaggtgtatagtaagggagttttttattgagatatagtaaatcggtcgggtacggtggtttaagtttgtaattttagtattttgggaggttgaggcgggcggattacgaggttagtagattgagattattttggttaatacggtgaaatttcgtttttattaaaaataaaatttaaaaaaatagtcgggcgtggtggcgggcgtttatttagttttagttatttcggaggttgaggtaggagaatggcgtgaatttaggaggcggagtttgtagtgagtcgagattgcgttattgtaatttagtttgggcgatagagcgagattttgtgttaaaaaaaaaaaaaaaaaaaaaaaaaaaaagatatagtaaattcggttattttatttaattaaaagcgtatttgtggttagattttattttagttttaaaaagtaaaattaaaaataatgtaaaagaaaaaaaaaatttattcggttattttttatttcggttttataaattatgtattttttttttatttttatgtttaatttattatttggttttgttggattttgtcgttgtagtttttttaaattatcgtatttttttttatttattatcgtttatagtttggtttcggatgttttattttatgtttaagttatgtagtaggtttttgatttattttttatgtttttgtttgttttgtatttaatgtggtcgttatattgtagttagaaggattttttgggttttggtgtggtggtttacgtttgtaattttagtattttgggaggttaaggggggtggattacgaggttaggagtttaagattagtttggttaacgtggtgaaattttatttttattaaaaatataaaaaaattagtcgggtatgatggcgggtgtttgtaattttagttattcgggaggtcgaggtaggagaattttttgaatttaggaggtagaggttgtagtgagttaagatcgcgttattgtattttagtttgggtgatagagtgagattttgttttaaagataatagaaaaatttttaagtttgggtcgggtatggtattttatattagtgattttagtattttgggaggtcgaggtaggagaattatttgaggataggagtttgagattagtttgggtagtatagggcgatttcgtttttataaaaaatttaaaaattagtagggtataatggtgtatgtttgtagttttaattattgaggaggttgaggtaggaggatcgtttgagtttgggcggttaaggttgtagtgagttatgtttgtgttattgtattttagtttgggtgatagagtaaaaaaaaggaaaagttaagtttggttacgttaatatttttttttgattaaaatttttcggtggtattttattgtttatatggtggttagtttttaattagatttattcgatttttattttggttttttttattcgggtttgttttttggttttttttttttattatgagaattatttggaatgagtgttttttttattttttatattaggtttagcgtgattttggtcgtttgaggttttaggtgagtttttgttgtttgttatattatgtttcgtcggttgtgtttttacgatattgtgtggtatcgttttttgtttgtatagtttttgttattagtttatagatatttatgtgttgttatgattagtgtttgttttttttattggattttttagatgtgttaggattatatttatttttgtttatcgtcgtattttttaattaataattgaatattatttatgtttgttttattggtaaggtagttcgggaaataagattttattaataatttgtttatattttgagatagattatattggtttttaatttttaaagttttgatttttatgtattgatttagtgtgtttgttatattaataaaatatttttttagtggaatgttgttttttgtttttagagtggtttttttatttgttttatttgggatttgaatttttaaaattgtaaaggttgaaaaattttagaaatgataataattattaatgtatattttttgttttattgtgtgtttatagtattgtatatcgatgatgtttaatatgtttgtagatttgtttattatatattatttttatttaaaaagtatgtaattatagtatatagtttggggaggaaaggaaaaaattgtttttaatttttttatttaatttttattataattttagtatatatttttgggtatttttatgtattattatttttattttttatttttgagatggagtttcgttgtgtcgtttaggttggagtgtagtggtatgattttggtttattgtaatttttgttttttaggtttaagcgatttttttgttttagttttttaagtggttgggattataagtatttgttattaggtttagtaaatttttgtaattttagtaaagatggggttttattatgttggttaggttagtttcgaatttttgattttaagtgatttatttatttcggttttttaaagttttgagattataggcgtgagttattatattcggttttttatatgtatttttaatattgttataattatagtgtatataaaattgtgtgttttgatttttttttttaaataattttattgatgggttaaattattatattgtatatggtgtggtatttatttagtttaatttaataagtatttatatgtttgatattatttaaagaaaatatatagtgttttggttttttaataatagaatattataattacgaagtttgtagtgatatttttattttatggatgtattttatggtatttttttttttttttagaagtaggaatagtggtatgggggaggggttgttttttttggggttagggaagtttttttttaacggtgatatttgagtagggatttgaatgtagggaggagggagttgtgtagttgtgggggaagattttttttgtagagggatttttaggtataaaagttttgaggtgagagtgtgtttggtttttttaagggattgtaaggggatagtgatattagggtattgtgagggaggggagaggagttaaggttagtgagttgcgaggaggtttgaagggtttttttgattttggcggggtttttagtttttttttttagtgagatgggatagtggcgtagtgataggattgttttattttttaggtttttttttttttttttggggtttgttagtttttgttttggttattttttaaatgagtgatttttcgttaggtttgtaaatttttttagatatatgtatgataatatattgtgtttattgtttatgcgtaaatgtggaggtgggtcgttggttatatttagtggtattatagatttagatttggttattgttgttttaggaaattggatatattttatatatttgaaaagttatgtaattaaattttttattttttaattttttgtttatttgaggtatttgtttttttttgaaaataatgattaaatatgttttttcgattgtatgaaaaatgtaatttagtaaggattattattagtttgtaattattaagtatgttttaatttttgataattttagaaagtaggtttttttgtgtttttggttgggggtggttattttaattataattttttttgaattgttttatggttaggttcgttatatgttaaagttagattttattagtaggtttaaaatatttatttttgaaaaaataaattgttataggttgttgagtataattgattttttttgttttttttttgttataggaggagatattatagtttttttagatcgggaggaaaaatatggaatgtgttttatcgttgattgaatataattaaatgaattgttttgatagtagtttgtaaattagtagttagtagtttgtttagtttttaatattgtttagtattttttagagtaaatttattgtttataagaatttttggttttacgaagtttataattttaagttttgtttatttaaaatatttttgtaaaagaaaagtattcggtatttattttttaaaatggttatggatgagtatttgtggatggttattttgggttttattatagtttttattttggttttttttgttggtgtaaacgatgttgttaatttttttggtatagtcgtgggttttggtgtggtgattttgaggtaggtatgtattttagttttaatatttgaaattatcggtttcgtgttattaggcgttaaagtaggagaaattattcgtaaaggtattattgaagtgaatttgtataacgagacggtggagatttttatggttggggaagttagtgttatgggttggtgagttagttttttttttatatcgatgggatattcgtttattgattcgtttttttgtagtattttgtttatatttataaatgtgatttttgttttggttttttaaaaattggttggatgttttatatttatttttttatttttgttttttgtatattaatttatgatttttaaagtgtttaaatattaggtaattatttattttttgaatttttgagtaaatttggttgttaaaatagattttagttaagtgaatattttttagaaagtatagaaaaagatttttgtagaatagcgttttattattttagagttgtttgaaggttgtttaagtgaatgtgtttttaaggttgatgtatgaaatttttaggaaggttgatttagattttttttttaaggttttttattaattaggaggtaatgttttgaaaatttggatgttaaaaataatatttattagtttaatttttatatttatagtttaagttttaaagaagttattaaataaattttaagtgcgtgtgttttaagaaattttggttttttatattatttgttatttttttgttggtttttgttttgattttttgattttatttttgggagttttatttggtatgtttgttttgtttttcggttaaaaaataatgtgcgtgttgtttggtgatagtatgattttttattgtagttttaagttgtttatatgaagtgtggaggtgtgtgaattgtgtgaataagtagagtggttggttggatagagtgatgtttttatggtttaagcggatatagatttcggtttcgtgggtttttttattattgttttcgttacgatagaaaagaattttttcggtaggcgtgtgttaagtgtagttgataggattttttttttgtttgtttttaggtagagatgacgatataatagatagttgatgtatacgggtaatttggttagggagaagagggttagagaggaattttattattttttgtttttaatagg

SEQ ID NO: 1682 - DNA, 6533 bp, Artificial Sequence
  chemically treated genomic DNA (Homo sapiens)
tttgttgaaagtagaaggtggtagaatttttttttaatttttttttttttaattaaattattcgtatatattagttgtttgttgtgtcgttatttttatttagaggtaagtagaaaaagaattttgttagttgtatttaatatacgtttgtcgggaaggtttttttttgtcgtagcgagggtagtgatgggaagatttacggggtcgagatttgtgttcgtttaggttatggggatattattttgtttaattagttattttgtttatttatatagtttatatatttttatattttatgtagataatttgaaattgtaataaaaggttatgttattattaggtaatacgtatattattttttggtcggaaaataaaataaatatattaaatggagtttttagaggtagaattagaaaattaaaataaaagttaataaaaggatgataaataatgtaagagattagaattttttgaaatatacgtatttaagatttatttggtaatttttttagaatttaaattgtgaatataaaagttagattaataaatattatttttgatatttaagtttttaaaatattgttttttaattgatgaaaaattttaagaaaaaaatttaaattaatttttttggaaattttatatattaattttgaaaatatatttatttagataatttttaaataattttaaaataataaagcgttgttttataaaggtttttttttgtattttttgaaaagtatttatttagttgaaatttattttagtaattaagtttgtttaaaagtttagaaaataaatggttgtttgatatttaaatattttaaaaattataaattaatatgtagaaagtaaaaataagagagtaaatgtgaaatatttaattagtttttgaaaagttaaagtaaaaattatatttatggatatgggtaaagtattgtagggaagcgggttagtgggcggatgttttatcggtatagagaagaggttaatttattaatttatggtattaatttttttagttatgagagtttttatcgtttcgttgtataggtttattttaatgatatttttgcgaatggttttttttattttggcgtttagtaatacggagtcggtggttttaaatattgaagttaaaatgtatgtttgttttaaggttattatattagagtttacggttgtattaaaggagttggtaatatcgtttgtattaatagaaaaggttaagatgaaagttatgatgaaatttaaaatgattatttataaatatttatttatggttattttggaaagtgggtgtcgggtattttttttttgtaggaatattttaaataaataaagtttgaggttataaatttcgtaaggttaagagtttttgtaaatagtgagtttgttttggaaagtgttggataatgttagaggttggataaattgttagttgttggtttgtaaattattgttaggatagtttatttggttgtgtttagttagcggtaaaatatattttatattttttttttcgatttgggaaagttgtgatgtttttttttgtagtagaaaggaaataaaagaaattaattatatttagtaatttgtaatagtttgtttttttagaaataaatgttttaagtttgttaatgggatttaattttggtatgtgacggatttaattataaagtaatttaaggaagattataattaggataattatttttaattaaaaatataaaaaaatttgttttttagaattgttaggagttgaagtatgtttaataattatagattaatagtaatttttattaggttatattttttatgtaatcggaaaaatatatttggttattatttttagagaggaataagtgttttaaatgagtaaaagattaagaaatgagaaatttagttgtatggttttttaaatatgtggaatgtgtttagttttttggaatagtaataattaaatttgagtttgtgatattattgggtgtggttaacgatttatttttatatttacgtataagtaatgagtatagtatattattatgtatgtgtttgggagagtttataggtttggcgagaggttatttatttggagggtgattaaggtaggaattgataggttttagagaggaaaagagaagtttggagaatgaggtaattttattattacgttattattttattttattaggaggaaaagttagaggtttcgttagggttaggaagattttttaggttttttcgtagtttattggttttagtttttttttttttttttataatgttttggtgttattgtttttttgtaattttttagaaagattaggtatatttttattttagggtttttgtatttgaggatttttttgtaggaagaatttttttttatagttgtatagtttttttttttttgtatttaggtttttgtttaaatattatcgttaagagaggatttttttgattttagaaggagtagttttttttttatgttattgtttttgtttttgggagggagaggagatgttatgagatatatttatgaaataaaaatgttattgtaagtttcgtaattatggtattttattattggagagttaaggtattgtatattttttttgaatggtattaagtatataaatgtttattgagttgaattgaataaatattatattatatataatataataatttgatttattaataaggttatttaaagggaaaaattaggatatataattttatgtatattgtgattatggtaatgttgaaaatgtatataaaaggtcgggtgtagtggtttacgtttataattttagaattttgggaggtcgaggtgggtgaattatttgaggttaggagttcgagattagtttggttaatatggtgaaattttatttttattaaaattataaaaatttgttgggtttggtggtagatgtttgtaattttagttatttgggaggttgaggtaggagaatcgtttgaatttgggaggtagaggttgtagtgagttaagattatgttattgtattttagtttgggcgatatagcgagattttattttaaaaataaaaaataaaaataataatgtataaaaatatttaggggtatatattaaaattataatagaggttgaataggaaggttagagataattttttttttttttttttaaattgtatattgtggttatatgttttttaaatgaaaataatatataataaataaatttataaatatattgagtattatcgatgtgtaatgttataggtatataatgaaatagaaaatatatattgatagttgttattatttttaagattttttagtttttgtaattttggagatttagattttaagtgagataaatgaaaagattattttaagggtaaaagataatattttattgaaagagtattttattaatatgataggtatattaaattaatgtatgaaaattaaaattttaaaaattgggggttagtatgatttattttaagatataaataaattattgataaaattttgtttttcgggttattttgttaataggataaatatgaataatatttaattattgattgagaaatacggcgatgaataaaaatggatgtggttttggtatatttgggaagtttagtgaaggaaatagatattaattatagtaatatataaatgtttataaattggtgataagaattatgtaggtaggagacggtgttatatagtgtcgtgagagtatagtcggcgggatatggtgtagtaggtagtaaaggtttatttgagattttagacggttagagttacgttgggtttggtgtggggggtgggggggatatttattttagatggtttttatggtgggaaggaggggttaggaggtaggttcgggtgaggggaattaggatgaaggtcgggtgggtttggttaaagattggttattatgtggatagtggggtgttatcgaagggttttaattagagaggggtattggcgtgattagatttggtttttttttttttttgttttgttatttaggttagaatgtagtggtataagtatggtttattgtagttttaatcgtttaggtttaagcgatttttttgttttagtttttttagtagttgggattataggtatgtattattatattttattaatttttaaattttttgtagagacggggtcgttttatgttgtttaggttggttttaaatttttatttttaagtgatttttttatttcggttttttaaagtgttgggattattggtgtgagatattatgttcggtttagatttaggaatttttttgttgtttttgagataaagttttattttgttatttaggttggagtgtagtggcgcgattttggtttattgtaatttttgttttttgggtttaagagatttttttgtttcggtttttcgagtagttgggattataggtattcgttattatgttcggttaatttttttgtatttttagtagagatggggttttattacgttggttaggttggttttgaatttttgatttcgtgatttattttttttggttttttaaagtgttgggattataggcgtgagttattatattagggtttagaagatttttttggttgtagtgtggcgattatattggatataaggtaagtagaaatatggaggatgagttaggagtttgttgtatggtttaggtatgagatgaggtattcgggattaggttgtggacggtggtgggtgggagggaatacgatgatttaagagaattgtagcggtaaaatttaataggattagatggtggattaaatatgggggtggagagaggatatatggtttatggaatcgaagtgaaaaataatcgagtgggtttttttttttttttgtattgtttttagttttgttttttggggttaggatggggtttgattataggtgcgtttttgattgggtgaagtagtcgggtttattgtgtttttttttttttttttttttttttttttttgatataaaatttcgttttgtcgtttaggttggattgtagtggcgtaatttcggtttattgtaagtttcgttttttgggtttacgttatttttttgttttagttttcgaagtagttgggattaaataggcgttcgttattacgttcggttatttttttaaattttatttttagtagagacggggttttatcgtgttagttaggatggttttaatttgttgatttcgtgattcgttcgttttagttttttaaagtgttgggattataggtttgagttatcgtgttcggtcggtttattgtgttttaatggaggatttttttgttgtgtattttgaatatggtagtggttgtattattgtatatgttgttaaaatttatgaaatttatataggtgaattataggagcgttttgggtgggaagagcggttggtataagtttcgagtagtttcgttatggtttggttttgtttggggacgttgttaattattttgatgttttttttggtattgtgttagttcggagatttttttttttatttaaatagttttagataatttatttttataattgtgtttatgttttttagcgcggttttttttttttatatttatatttttagtttattagtttaagtttagtaagtatttgtttgaggaaaaaggtttgttatttttttttttttttgtggttataaaaggaatatttattttttttgcgtggagaagggtaacgagtataagatttgtagtcggggattttaggtttattttcgttcggttagtttttggttatgtaattttgggtaagttattttaatgatttatttgaatcgtggggattgtggtagatgtttcgttattggttatatgtaaacgtaaaggttaaagtttaatgttagtaattaatatgtggtgattgttattatttttagtagataaagttttggggtaaaggtcggaaagtataaggtttcgtcgtagttttgtttttttttagtggttgattttgggtattttaatacgttttttgaattgcggtatgtataaaatgggatagtgatggcgtatgtattttatagaattattgtgaggaataaatttaattgggtagaagtgtttcgttttaagtaatttgtaattattggtatcgttgtagttataggaagaataataaatgagaggttttagaatttttttggaaggattttttttaggtagttttgtgttttattttttttttagttttgtgggtttttttagtttttttttttagatttgttttttttttttaatacgtagatattgattttgtttttgattaaagattgatatatgttgtgagggatagggattttttttttttttttttttttttgagatcgagttttgttttgtagtttaggttggagtgtagtggcgcgattttggtttattgtaatttttgttttttaggtttaaataatttttttgttttagtttttcgagtagttgggattaaaggtacgtattattatgtttagtta

SEQ ID NO: 1683 - DNA, 6197 bp, Artificial Sequence
  chemically treated genomic DNA (Homo sapiens)
ggtaattattgttatttcggagataagttttgtttgtttttaaattttatatatatgatattatattttttcgtatagttgttattatttaatatgtttgtgagatttagttatattattgcgtgttatggaaagatgtttgaataaagtagtgatgtggttagttgtgtattttaaagagattagtgtggtggtagggaggaggatgaatgaatagtggttttagtttatgttggaggagggattgtttgtatggagagggtaggtagagtttacgggatgggtaggtaaagtttacgggattgattggatatggggaatgagggagatagagaggggttagggaagatattagatttttggttagggtaatttggtggttagaggagttatttttagggtggggataggaagggatgggtaaagataatgagtttaggtttgagtatggtgagtgtgagggatttgtgggatatttagagggatattttggaggtagttggatagaaaagtttggtagttaggagagaagggaggggagtatgtgtttttaatttttttagtattagcgagtaggtggtagttttgataagtgtatttgtagagggtcggagggtatatagaagataaagaagggatgtcgaaaagttttttgaaagtaggtggtttaagtagatgtgtaaattagaatgaaaatattaaatatataaaattgttttgtttggtttattagatttttttggaatttattattgtgtttatttgtaatttaggaggatttgaattgtaaaatattttttggattaggggggttttcgttttagtttttgttatttttttttgtattaattgtagttgatttagtaaaatttttttttttggttgttagggacgtttgtttttaaaggtaatagagtttttttttagttcgttttatttatttttaattttggagttgttaggattcgttttgtacggttttgttattattattattattattattattttttttttatttatttgcgtgttttgaggtatatattaggttttagtattcgtttggtatttgatatttttttgttagttagttttagagagttttttttttttagattagttggggttggaattgtttagaatcggatttagaagaggtcgagtttcgtttaggattaaaggtagtttttagggaataaagttgttagtgtgggcgtagattagggaaggggtattaggtcgtttaagttgaatgttggggttttatagtttttttatattttttttagtgttttaggtagagtaggtttgtggggatattgaggtttttttaggttttttttttgtttaataattttttatggttcgttattatttattgtataaagttttaatttttatatttggtatttgggagtttttgtgattttatttttttagtttttttttttttttaagtttttatgttttagttataggggttatttaggtgttttttttgtttttttttttttttgtatttaaattttttttgtttatgtgttattttttggggttttttttagggtttattttttagttggagttaaattttgtttttaaggaattagttatttaaataataaattagtttatttgagaatttagtttgtgatgtagcgttaatagtttttgatgaatttgtttttgattagtagtttttaggggttataaaatatttatagagaggaatatagagaaggtaatgggggtttgtgtgtgggtaggtggggtggggtgggtgaaggaaaagtttttttttggttattgtgttttttttttaagtatcgttttattatgggatggggatttgattgaattttttacgttaagaatgagtatagtttatatagttaagtttttataaatatttatttttttttaggtttatttaggaagggtttgttatatttattttatagatgtgggtttttaggtttagagaagagaaggtattgtttgtttatgaatgtttgtaagtaaatagtagagttgggatttaaagagttcggatttggggttttattatgaatttttaagagtggtttagagatttttacgttttttaggtaattattttggtagtttgttgtttttgtatatgtttttttttttgttgagaatggtttttttttaatttatttggtgaatttttatttagttttttaaattttgtttagtatgatttttttttttttagatgttttttttatttatttttttttttttgtggtataagttttgtatttgtatagatttttaattttttacgtttgatttggtattgttgttgtttatttttttttttgttttttttttagtttggggtttttatgaggttaataatggggttatatgtttttgtttttgggaaagtggttagtatggggttggtttagagaaggataaggtggttgtttggtgagtgtgatttatgggttgagtaaggtagattcgtaattgggaaaaggtatagattggatgtgttaagaaataaggagttgtggagagattttgaggagggaagtagtaaaatttaaaaggtatttaaggaaagattggaagtattagtaggacggattggaggggaaggaatatttaatataggtagattagttgtttatttattcgtgtatttttttttttttttagttatttatttacgtgttttagttgtagaatttgtttttaaggtgtttataggttgagggaaggtagatagaggataagtggtaatttataaaatattaaatggtaaaggagagaaagatttttatttgggagaattagggatatttttcggaggaggaaggatttatggtgttttttggtatggtgaggtgggggagggttttttaggtagaggagataaattgagtaaatgtgtggatgtgagttgttggtgtgaggggcgaggttgagcgtgtaaattggtgttatgaagaaggatcgtgatggttaggtttggtttttattttttttatgataattttagatagatgagtaggagagtggtagggtgtaggattggaggataaaagattagaggagatggaggttttgtagatagtaggggagggaaggaggatgaggtggtgtagatagcggagttagtaggatttggtttgtttaggggtgaggagagaggtggtttaagttttttaggttgagtatagagagattataggaattgaagttttgggtaggggggtgtttagaatgtatttgttttttgttttagggttttatacgtaattaaggtgttttttagttagaattggatatattgttagagaattttaggggttatttggtcggtttagtttttcggttttcgatagatagtaagtttattatgattttttttatcgggaaagggatttttaagattttgattagatttttggattgggggtttttttttttattgtgttttaagtaaggtattggtttagaggaaataaggtgaagttagatgatagtaatattattattagtgtagtggtatatgtttgtatttttagttattacggaggttaaggtgggaggattatttgagtttaggagtttgagattagtatttatttatttattaatagattaaataaataaattaataatattattaattagtaaatgagaatttttatgttaaatattttatgagtttatttggaaattgtattttttttgatagtaatgagattggtgtgggaattttatttatttataagaagatagtttcggtcgggtttagtggtttacgtttgtaattttagtattttgggaggcgaggtgggtggattacgaggttaagagtttaagattagtttggttaaaatggtgaaatttcgtttttattaaaaataaaaataattagttaggggtgatagcgggcgtttgtaattttagttattcgggaggttgaggtagagaattgtttgaattcgggaggcggaggttatagtgagtcgagatcgtgtcgttgtattttagtttgggcgatagagcgagattttgtttgagaaaaaaaaaaattaaagaaaaaaacgaaaatagttttattggttaggaattcgtttaggatcgcggtcgggttagtatatagttgagttggtttaaattcgaggtttattatgtttttaatgttttattatgttagttagttagtttgttttttatattttttatatttataggttattatagatttatttgaattgtgagaagtagaggaaggcgttttagaggaggtgattttaaagtttaggtttgagatgggtatgtatttttaggtaagagagttcggtcggtgtaaaagtaaggtttggtttataaacgggaatgtggggggtggagatagggaagggagaagttaatttttgggtaagattttttggagtttttttaataaataaatattattttttatgtagtagacgttgttttaaatattttataaatattaatttatttggtttttttataattttacgaggtggtattgttattatttttagtgtatcgaagttatttagcggtcgagtgagaattttagtttagttttttattcgttatttcgcgtattttagtttgttttatagtcgggtatcggttttattattttgttagagaaggtcgcggaggtttagagaggtgcgtatatttgttttgagttatatagcgaatgtttttcgcggttttaacgtagagagaacgagtcgatcggtagtttgagcgaggtagtggttgggggggtttcggtttcggttattttttttatttttttttcgtagagcgtcgtttaggataggttgggttttaggtttcgtttcgaggttttgtttatatatttttgatatatcggcgtcgttagttaatggtcggggttttataaacgttacggttcgcgcgttttttggtaagaggtaagaggtagtaatcgcgagcgtgtcggtcgttagtcgcgggttttcgagtgagtacgttagggagtaggagattaaacgacgggggtcggagttagagtcgtagtgggagttttcggatcggagtacgagtttgagcgggagagcgtcgttcgtacgttcgtcgttattcgcgtattcggcgtagttagagttattagcgtagcgttgttatggagtttagtagtaaggtgagtcgcgcgttcgcgggttttttcgttaggaataaaggcgtagatttttgttcgttttacgtcggttagggtttttttcgtcgtttcgttgcgttgtgcgttcggggcgggtcgcgcgttttttcgagtttggttcggtgcgggtttcgagcgtagcgtttcgtcgggtcgttggtcgtagtggggatgggtttcggatttagcgggtcggagggcgtcgcgtgcgtagttggcgtcggtattgagtatatggttttttttcgggggcgtcgcgtcgtttacgcggttttgttggggttggggatatagggttcgggagcggtacgtcgtatacgatttcggtagcggtagtttagtttcggtttttttcggtgcgggggagggggttcgagcgcggcgtttattggttgagcgggtcgagttttcggttcggtttcggtttcggcgcgcggaggagttaggagtcgttttcgtttttcgtttgtttttttagttcggacgtttttgtaggtgggcggtttggtgcgaggtgttttatcggttttttttatttttttcgttagtttttcgcggtgacgaggtcgaggtcgaggggagggtatttttttttaggttcgggttcgaacgcgggggttgagatgaattttcggtttcggaggtttttttttgcgaggagtgtaggttttaaagttttggtttagtttcgcggagatgtgtttcgcggaggtaggtttattttcggggttaggcggggagcgtaatcggaggggcgggggatttgggggttaggaaagagttttaggttgaagtttagcgggaagcgcgtacgttacggggttggggaatgagggatggggattttggggattaataattttttagataggatttttttttttttgtgtaagtgggtttgttttgtagggtatttttgtagcgttcgtagagcgatttttttttaataaattgtttgtggagttttttttgtgtgtagggt

SEQ ID NO: 1684 - DNA, 6197 bp, Artificial Sequence
  chemically treated genomic DNA (Homo sapiens)
gttttatatataggaggggttttataaataatttgttgaaaagaaatcgttttgcggacgttataaagatgttttgtaggataagtttatttatatagaaaaaaagaaattttatttagggagttgttggtttttagagtttttattttttattttttaatttcgtggcgtgcgcgtttttcgttagattttagtttggggtttttttttggtttttagatttttcgttttttcggttgcgtttttcgtttggtttcgagggtaaatttgttttcgcggaatatattttcgcgagattgggttaaagttttggggtttgtatttttcgtaaaggagagttttcgagatcggaggtttattttaattttcgcgttcgagttcgggtttggagaaaagtgtttttttttcggtttcggtttcgttatcgcgggggattggcgggaggagtaggggaggtcggtgggatatttcgtattaggtcgtttatttataggggcgttcgggttaggggagtagacggagagcgggggcggtttttgattttttcgcgcgtcggggtcggggtcgggtcgggggttcggttcgtttagttaatgggcgtcgcgttcgggttttttttttcgtatcgggaggggtcgaggttgggttgtcgttgtcgaggtcgtgtgcgacgtgtcgttttcgggttttgtgtttttagttttagtagggtcgcgtggacggcgcggcgttttcggaaggaggttatgtgtttagtgtcggcgttaattacgtacgcggcgtttttcggttcgttagattcgaagtttatttttattgcggttagcggttcggcggggcgttgcgttcgggattcgtatcgagttaggttcggagaggcgcgcggttcgtttcgggcgtatagcgtagcggggcggcgggggaggttttggtcggcgtaaggcgggtaggagtttgcgtttttgtttttggcgggagggttcgcgggcgcgcgatttattttgttgttgggttttatggtagcgttgcgttggtggttttggttgcgtcgggtacgcgggtggcgacgggcgtgcgagcggcgttttttcgtttaggttcgtgtttcggttcggggatttttattgcgattttgatttcgattttcgtcgtttggttttttgttttttggcgtgtttattcggggattcgcgattagcgatcggtacgttcgcggttgttattttttgttttttgttagagagcgcgcggatcgtagcgtttataggatttcggttattggttggcgacgtcggtgtgttaggggtgtgtgggtaggatttcggggcggggtttggggtttagtttgttttgggcggcgttttgcggggagggggtgaggggagtggtcggggtcggggtttttttaattattgtttcgtttaggttgtcgatcggttcgttttttttgcgttgggatcgcggagggtattcgttgtgtgatttagggtaagtgtgcgtatttttttgagttttcgcggttttttttagtaaaatggtggagtcggtattcggttgtaaggtaagttgggatgcgcggagtagcgggtggaaagttggattggagtttttattcggtcgttgggtgatttcggtgtattagggatagtaatagtattatttcgtagggttgtagaaagattaagtgagttaatatttgtaaagtgtttagaatagcgtttattgtatggaaagtagtatttatttgttagagagattttaggaggttttgtttagggattgattttttttttttttgtttttattttttatattttcgtttgtgagttaagttttgtttttgtatcggtcgggtttttttgtttggaaatgtatatttattttaaatttgggttttaaaattattttttttgggacgtttttttttattttttatagtttaggtgagtttatggtgatttgtaagtgtggaaaatatgaaaggtaggttaattgattgatatgataggatattaaggatatgatagatttcgggtttgaattagtttaattgtatattggttcggtcgcgattttgggcgagtttttggttagtgaggttgttttcgtttttttttttaattttttttttttttagatagagtttcgttttgtcgtttaggttggagtgtagcggtacgatttcggtttattgtaattttcgtttttcggatttaagtagttttttgttttagtttttcgagtagttgggattataggcgttcgttattatttttggttaattatttttatttttagtagagacggggttttattattttggttaggttggttttgaatttttgatttcgtgatttatttatttcgttttttaaagtattgggattataggcgtgagttattgagttcggtcgaggttgtttttttatgagtaaatggaatttttatattaattttattgttattaggagaggtgtaatttttagataagtttatgaagtgtttagtatggaagtttttatttattggttggtggtattgttggtttatttatttagtttgttagtaaataaataaatgttggttttaaatttttgggtttaagtgatttttttattttagttttcgtagtagttgggagtgtaggtatgtgttattgtattggtagtggtattgttattatttgattttattttattttttttagattagtgttttatttgagatatagtgaagggaaggatttttagtttaaaggtttgattaaagttttgagggtttttttttcgatggagggagttatggtgggtttattgtttgtcggaaatcgggaggttgagtcgattagatgatttttggagttttttggtaatgtgtttagttttggttgaggggtattttggttgcgtatggagttttgaaatagaaggtaggtgtattttgggtatttttttgtttaaggttttaatttttgtggtttttttatgtttagtttggaaagtttgggttatttttttttttatttttggatagattaagttttgttgatttcgttgtttatattattttatttttttttttttttttgttgtttgtagggtttttattttttttggttttttgttttttagttttgtattttgttatttttttgtttatttgtttgaaattgttatggagggagtaagggttaagtttggttattacggtttttttttatggtattagtttatacgtttagtttcgttttttatattagtaatttatatttatatatttgtttagtttgttttttttgtttgggaagtttttttttattttattatgttaaaaagtattatgggttttttttttttcgggaagtgtttttggtttttttaagtggaaattttttttttttttattatttggtgttttgtaggttgttatttgttttttgtttgtttttttttagtttgtgagtattttgaggataggttttgtagttgaggtacgtgggtgaatgattgaaggagggaaggaatgtacgaatgagtgagtagttaatttatttgtgttgaatgtttttttttttttagttcgttttgttgatatttttagtttttttttaagtattttttgggttttgttatttttttttttaaagtttttttatagttttttgttttttagtatatttagtttatgtttttttttagttgcgggtttgttttatttagtttatgggttatatttattaaatagttattttgtttttttttgggttagttttatgttggttatttttttagggatagagatatgtgattttattgttagttttatggaggttttaagttggaggaggagtaagaggggaaatgagtagtaataatattaagttaagcgtagagggttaagaatttgtataggtgtagaatttgtattataggggaaggagagtgagtagagagagtatttgggaagggggaggttatgttaagtagggtttggaagattgaataggagtttattagatggattgagggaaggttatttttagtagagagaagagtatgtgtaaaggtagtagattgttagaatgattatttagggaacgtgagaatttttgggttatttttagagatttatgatggagttttagattcggattttttgagttttagttttgttatttatttgtaaatatttatgggtaaataatgtttttttttttttgagtttgaagatttatatttgtaaaatagatataataaattttttttgggtaggtttgagggaaagtggatgtttataaaggtttagttatgtaaattgtatttatttttgacgtgagaagtttagttaaatttttattttatggtagggcggtgtttgaggaaaaagtatagtggttaaaaaaaagttttttttttatttattttattttatttgtttatatatagatttttattattttttttgtgtttttttttgtgaatgttttatgatttttggaggttattggttagaagtaaatttattagaagttattgacgttgtattatagattagatttttaggtggattggtttgttatttgggtggttgattttttggaagtagaatttaattttaattagggaatgagttttagagaaggttttaggaaatagtatatgagtagagaaggtttgggtgtaaggggaaaggggagtaggaggggtatttaagtagtttttgtggttggggtatgggggtttagggaggagaagagattgaagaagtggaattatagaggtttttaaatgttaggtataggagttagggttttatgtagtgggtagtggcgagttatggagagttattgagtagggaaaggatttgaggaaattttagtgtttttataagtttattttatttgaggtattaaagggggtgtgaggaggttgtggaattttagtatttagtttgaacgatttagtgttttttttttagtttgcgtttatattgatagttttattttttggaggttgtttttagttttggacggaattcggttttttttgggttcgattttaagtagttttagttttagttagtttggaggaaaagagttttttgggattggttagtagggaggtgttaggtgttaggcggatgttggagtttagtgtgtgttttagagtacgtaagtgggtgggggaggggtggtggtggtgatggtggtggtggtagggtcgtgtagggcgggttttagtagttttagagttaggagtgagtaaggcgggttgggaaaagattttgttgtttttaaaggtaagcgtttttggtagttaggaggaaaggttttgttgagttagttataattggtataagaggggatagtaggggttgggacggaagtttttttaatttaaagggtgttttgtaatttaaatttttttggattgtaggtaaatatagtgatggattttaggaaggtttgatgggttaggtaggatagttttgtgtgtttaatgtttttattttgatttgtatatttgtttgaattatttgtttttagaaagtttttcggtattttttttttattttttgtatgtttttcgattttttgtaaatgtatttattagggttattatttgttcgttgatgttgggggaattgaaggtatatatttttttttttttttttttgattattaggtttttttgtttagttgtttttaggatgtttttttggatgttttataggttttttatatttattatgtttaaatttgaatttattatttttgtttatttttttttgtttttattttagaaatggtttttttagttattaaattgttttagttagagatttggtattttttttgatttttttttgttttttttattttttatatttagttaatttcgtggattttgtttgtttatttcgtggattttgtttgttttttttatgtagatagttttttttttagtataggttaggattattatttatttatttttttttttgttattatattggtttttttaaaatgtatagttgattatattattgttttgtttaaatatttttttatggtacgtaataatgtggttgaattttatagatatattgagtgatagtagttgtgcgaaagagtgtgatgttatgtgtataaagtttaaaaataggtaaaatttattttcggggtaatagtagttatt

SEQ ID NO: 1685 - DNA, 13326 bp, Artificial Sequence
  chemically treated genomic DNA (Homo sapiens)
gattgtttttggattttgtgtataatatttgttttttttggttttttagtagattgtttttagatttaaatgtaagttttttttgagtttttagtttattagttttttttattagatattgaatttattaagtttttataattatgttagtaattttttaaagtaagtttttttatatatatatatattatattgtttttatttttttggagaattttaatatatatattatatgattttatttatataatatttttgtaatgatagagttatagatatgtaatagattggtgattgttaagatttaagaatgagtaagggtaagagggatttagtggggttataaatgggtaatatgaggtattttcgtggtgataggaatgttttgtaatttgattattggggttaatatttttattgtgatattgtattatagttttgtaagatgttattattggagaaaattgggtaaaggatatatgggttgtgttattttttagaattgtatgtgaatttataattattttaaaaattttgattttttttttttttttttgagatagggttttattttattttttaggttggagtgtagtggtataattatagtttattgtaattttaaaattttgggtttaagtgatttttttattttagttttttaagtagttgggattataggcgtgtattattatgttcggataatttttttaatatttttagagagatagggttttattacgtttttttaggttggttttgaatttttggttttaagtaatttttttattttggttttttaaattgtttggattataggtatgagttattatgtttggtaaaaagtttaagtttttaaagtaaaataaaatatatttgtttttattattttatagtggttttttttgaagtttagaagataaatttggattgttatttagatgattaaagaattttatatttatattattaaatagtatcgttatagttattttagtttaataagtaagaaaattatttatcggttgggagcggtggtttacgtttgtaattttaatattttgggaggttaaggtaggtggattgtttgagtttagaagtttaagattagtttgggtaatatagtgaaatttcgtttttattaaaatataaaaaaattagttgggtatggtaatatgtatttataattttagttattcgggaggttgaggtaggagaattgttagaatttgggaggtagagtttttttatgagaatataaaaaattttgtgtgtgagtttagattgtattattgtattttagtttgggtgataaagcgagattttattttttaaaaaaaaaaaaagaaaaaaaaaaaattatttattaattcgagttatttttttttatttttttttaaaagtaattattagtaagttttatttgttttatatattaaaatatattttgaatgtatatttttttttttttggtattattattagttttggtggttaatagtaagtatgaattgttgtaattgtatttttttttttttataaatgtttttatttaatttattttttatttaatggtatgagtaattttaagatatatattggattatattatttttatttttagttttttttggtgattttttattgttttttatttgaattttaaattatttttatagtttataaagttttgaggttttaattaaaaaggtatttttatatagaatatttttttgagtattttttttaaaatgggtgttttttgtttttttttttagtatttttagttttttttatataatgtaagttttataagattagagattttattttgttttgtttattgttataatcggtgtttagtaaaatgtttagtaaatattatatttattgaatgttaaattaataaatgtttaaattttagtttgagatatttttttttttaatataagaaagtatgtgataatttttttggatttaatttattaaataaatatttgttgagtgtttgttatgtattaggtagtattttaggtattggggataataataaggtttttatattcgtggaatttagttttggtaggaaagtggtaaataataatagataagtaaataataaaattttaagtataagtattaagaagaaaataaagtagagtaattggtttagggatgagttggagaaagtaggtggtatttattttaagaagtttggttagggaatttttattaagtcgttatttgaatgaagagaaggagttagttatatataaatttagggagaagggttataggtagaagtttattgaggataaaggtgttgaatatggaatatattagataagtttgaggttagtgtggttgggtttacggaaggggagaaggttttagagttatttagggtttatgttaagttaattttttgggttgtggtgagaaacgtgggttttttgttaagggtgattgggaagtttttggagatttttaagtaggagtgtattatgatttaattttaaaaatatattttaattattgtgttaagaaggtattgtagggtaagatgggagtagggaagttaggtaggaggttgtgaagatatgtggaagagatgtagattatagagatatttagggagagggtgtggagaggcgagaagaggatgtaaagagtttgtttttttttttggtaagttataatggggaaaaatttggtttaaaaattttaaaatatattgattgttttttagggattgggatttttcgatatttttttgtatttttggtttggttaagtttgattttatttaatttgtttttaggagatgtttttgtatttaattatatttgatttaattggagaggaatgtagtatgttgaaatagttggtttatttttttatttttttttttttatttatggaagaagaaaaaaaaattaattttattgaaggaaaggatgataatgaaaaaaggggagagggagggcggattttttttagttttgttattatttagaatttttggtatttattaagattatattaattagcgaagtaattcgaatgtgatttagagggtttaaaagtatgaagtttaaagaataattatatagaattggtttcgttttgtttagtggaaattttcgggtgattgtaggtattggtgtacgttattgaatagcgtttattttaatggtaaagtgcgaaaagattgattttattatagttaggagtgtaacgatttgtagtttttcggtgggcgttaagatacgtttttttgaaaggttggaatcgtttattagtttttcgcgggtaaaagtaattagagtattaatgtaaatgaatcgtatttttttttcgtacggagataaagttttagtatattttagatggtgtagagattatttatttatttttgagaaagagtagaattatagaggttttggttgaatttgaggaaattgattagggtgtttcgaaggttcgttagtgaatggcgggtcgcgtttttaatgggagaagagaatggttttttgtcgtcgtgtttcgcgtcggtaggtcggggttgagtataagaagttaaaggtttattggtcgttcgcgtatttaaggtaaatttcgtttttgaaaaggtaggtttaaaagataaaggttggtaaattatatcggtattatttacgacgcggtatagagacgtttttttgtagaatgttatgttattggtaaatgttatggaatcgtttttgattgtggatcgttttggtaatggggcgtgtttattattagttaaaattgatgcggaaagttagcgtggttaattgggcgttttaaagtttgattttaaagttgttttttaaagtttggtattatgatatagagtattttatgttatgattaaacgagttaatttatgttaagtgttgagagtagtatttggtattcggtaagattttagtaaagattaattattattattattaatatttgtttacgtttttttattatgaaattattgtattgtgtttgtattatatatgttttattttatatgttataaatatttagaaagaggaggttgtgatttatttattttagttatttcggagtatggaattgtgttggatttagtaaaagtttgtagtttgattgaattatttttttaaattaaatattttaggtgtgttattttgtagaggtgatagaaatgaaaatagggtggtaaaataaaaaggtgaaatttgaattttttttaattttttatttttttattttgtttttttataatattttttattgtgttgttgtttgttatatttttgtttcgttgggaattggttttatttgagttttagtgtaatttgtggttttagttgttatatatatttaaagtttaataaatttgatattttttgaatttttatagggtttggatattataagggatatttaggtttaagattaagttatatgagtaggtttatttgagaattttacgttaaagtttttagtaagtgttttttgatatatatgaagtaataataataataatcgttatttgttaagtatttattatatgttgagatatgttaaatatttttatatattattttatttaatttatttaataaaataaaatgtgtgttatttttattttattaggtaaaaataaaaaattaattagagaaaagttatagtgagttatttgtttaaggttatattttttagtaaaatgttgagatttaaatttaagtttttaataatttaaagtttatttaggtaattatttaagttaataatggttttcggttatatagtttagttttaaatagaaatattatagtattaattatttgtggagtagagtgtagtgtgttttttatgttttatagtatagtacggtagtttagtatattttattttttataaaagattttaaagatttttttttttattagtttttaattattgttatataatatatgttttgaaatgtgattgtttttggtttgtaatttatgtttaagggatttgtttttatttttttttttagtggaataaaggtattgaagttataggttgttgaggtaaagtatttattgattagatttttattaatatttagttgtcgttgagaagattagatttggatttttaggtttgggtagtttaatttttttttttttttgtttttttttttgtaatgtataattaggtttaggtagagttgcgaataaataggtaggagttagttaggtgtatgtgttatatttatataagatttggaattgataggatttttaattagtataatgatagaagataaggtaaagtagtattatatttattttaagtttggtttttaggagatagttaggggaatatagttaagttatatagaggatttgggggaggttgggtgtagttattatagattaaaattaattttttttattttgttaattgaagaattgttttttatttagtaattggggttttaaggatttttgttttgttaattgattagtttgtataagtttttttaagtaattgtgtataattatattattaaagaaatatgtttttttttaattaaaaaaaaaaaaaaaaaaaagggggtagattgatttaaatttaattatgaaaatttatcgggaatttttaaaaacgttaatgtaggagagataaaagaggtagaagggttgttttttagattaaaagggattaagataaattgataattaaatgtaataaatgatttagattgtggaaggaagaaaaaaatagtaataagggaattatggagacgttgggaaattttaaatatgggttgtattttaaataatattattgtattaattttatatttttggatataataatggtatttaattatgtaggaggatgtttttgttttttgtatatgttaaagtatttaggggtgaaatgatataaatatttatagtttatttgtaaatggtttagttaaaataatatatatatataaatattatagagcgagagattaataaattggtgaatgttaattagtggtgaataaaggcgaaggttatggaatgattattttattattgttttaatttttttttagatatgatattttaaaaaaaaatttaaaaatataaaggatatagtgtttttgtttttttatacgtggtttttaaatttatttatttttgtatatataattatataagttgattaatttgtgttttgtagggttttatttttaagtttttatttggtgtaatttattttgttgaatatttttttatgttattagatggtatggttagttgtattggttttggagttagttagatttggatttgggttttagtaatgttattaaattgttgtgaggtttgggttaagttatttaattgagttttgggttttttttattgtgagaaaataaaaatatattaggatataatatattttttataggtaaagaaatttgggtttagtgatataatatgggatatttagggattatattagtattttagagttagggagtaattaaatgagattatattagagaggtttagataataattttaatgttaatagttatataattattaatagtgttaaatatatatttaaatagtatttataaattataaaagataaattatattataatgtataaatattttaaatatatattatataagtattatttatatgtttgatatttaaagttaaatataaaatgttatttatatagtatttatatagtatgtatttaaagaataattagtatattatgattttatgagtattatagtttaggataaagttaaagtagttagaattttaaggttaatataaagataaatattaagttaataattatatagatggtatgtagatttggtaaaatttatgaaggtagtaattaaataattaaagtttgaaagttattgtaaaaaggaaggtaatgtgtttaatatagtgtttggtatatcgtagatgtttaagatttatttaaaattattattaatttttttaggggtttttgaaattacgttgtagatttttttttgataattaaggaattgtttaataatggaatttagaaagaatgagaattgaggtagtgtaatgttttttagttttgtgaatttatttagattttgaaagaagtaggataagtaaggaattggggttaagagatttgagttgttatattgaatatgtttaaaatgtttatagaaattagataaatgatataaataatttggtttgtgagattttagtttttataattgaagaatggaggaattagataagaatttattgttttttaaggttttttttaatttaaaaattttgtgatttgataagtttttggttttttttaaagttgtatgtaagattatttttggtttaggttttggagatatgtagtttaaagaaaagggtataagttttttttttttatttagttaattagtaattgttggaaaaatttgttttttaggttagtagtggcgtttaagattattagttttcggtttttatattagagtatttgttattagttgtgtagtgttaggtatgttttttaattttttttgatttttggtttttttatttttaaaataggaataattttatgtattttgtggtattgtaaagagtatcggtaaagtatgaaaagttgatatatggttgtttgataaaagaaatgaatgagatgataaagatatgattaaagatgtatttgttttgtagtttttttattgtttataggaagattatattatttattttagtttttatagtaattttatgtattaattagttttatatttattttataggtaaagaaatttaggtttagtgacgttaggagtttagttgggatttttttggagtttttttgatttttatatttatttgtttttttttaatagattttatatgatttatgagttataatataaatattatattgttttatgttgaagtttagttatttgtttattttatttttttatatttatttagtagtatattttaaattggatatgaaatttagtttttttaatttaaagttattaagtttttaatgaaggtagtattttttaaagtgtaagttgaatattttatagtttatgaggaagttaggagaaaaggtttgaagattttttgtatttattaggttatgtggattttggataagttgtttattttttttatgtgagtttttttatatgtgaaatgataataataatttttatttattgggttgttgagaaaataggtaaattatttagaattttagaatttggataggttaagattttttttaattttttgttatttttagtagtatttatgtatttttttttgtgttaattttttggatattagagtggatgaatgaaggttgacggggtttattaagatttggtcgtgtttagaaatttttttttagaaataaaattttttttgattaagtttagagttaagttatatataaggttgattataaatattatttttttttattttataatattggagaaagaaaagatgaaggagtgggagttattttaatatggagtttagagagggtaattaaatttgaaaataaaagataaagaaaaagaaagtaaaaggaaatgttattaaatagttttagagattttgatatttgggataattatttttgttggaaatttttagaaatttaaatgatttgtttaaaatggatgagattgttttttatttgattaatttggtaaaattttattttgaggagttaaaataaggaattgtaggttttggggtggtaggattatagttaatttttaaaaagaaattaggaaggttagaggataaggattttaataatacgttaagatttttaaatgtttaaaaatttttttattttttttatagttgttatttttgttattttaataaaatgagaaattgattttagaggtagttttagaatttttatattatagaataatttgattggaaagaaataggatgggagatttagtatttttaaaaattagtttttatttttgttaaagtaatgtgggattttgtgatttaggttgtgtatgtaaagtgataggggtgaattaatggagacgataggggagtatatgtgttgtagttatcgttattattttaattttaatttttgtgtcgtttttgtttattattagtatggttattgattggatttttaaaataaggagaaataaattatatgtttgtatggtagagggatagggagagaatttttagagaatagaaatttagggatgaagtaggaggtgatagttattaataaattaagtgttatagaagaaaagaaaatgtagggatgagattgggaaagtatattgtggttttgggtttggtggtgggaagattttgaggtttttttttagtttagttatcgatgagtaattgagtaggttttgtttttttggatttttgtttagagattttattaaaagtttttattggtaagtgggggaaaagggatttgtgtggtaggtggtgggaaaatgtggttgagatttttgtgtgtttgaagttaaatagttaaatatttataagtggtaaattttgtggatatgtatgtttttagtttttttaatttataaagattatggttttagattttttagatgtgtttcgtttttgaatgtttgtatttgattaatgagggatgtaaaataattaagaagttaaaagcgtaagatttggaattaagttattgttttttaatttattaattgtgagatgttaaattaatttagttatttataaaatggggatattaatggtgttgttatgaagaatgtggtagatagaataatcgttttttaaagaagtttatagttgtattgttagaatttgggaatattttgttttatgtggtaaaagattttatagatgagattaaggtaatagatttagagatgagatttttttggattattttgatgggttaaatttaattttatgaatttttaaaagggaagaatttttttagttatttgttagtgttagagagatgtaatatgagaaggatttgatttgtttattattggttataaagaggaaagaaagatattagtagttaaggaaatttggtggtatttagagttgggaatggtttttaatttataattagggtaaaacgatagattttagatttataattaagaggaattgaattttattattaatttaaattttttttaatagtttttagaaaggaatatagtttattaataatttgattttagtttagtgatatttatattagattttttatttatagatgttgttgtagagatggggatttcgttatgttgtttaggttggttatgaatttttggttttaattaattttttagttttagttttttaaacgttgggattataggtatgagttgttatgtttggttatattttaagataaataaatttgtgttgtttaagttgttgtattggtggtaatttgttacggtagtaatagaaaattaatttaagaagtaaatgagataatttatatagtgaataggtatgtagtaagtataagtagtattaggttttgaatttgtttgtgttgtattttatatgagattgttttggttttagtgatggagagtatgagggaagtgggttaaagtttttttagggtattttttattttattatttttgataatggttattatttgtaaaaaggatgaaaatttttatttttggaaatagtttgaggggaaaaaggatttgaggagaaattattaattaagtaaataaaattttattttagatttggttatttaagttattgagttttagatgtcgagttatattttagattttaaatttaaaattttttatatttatatagattatatattatatagtgtgtgtatgtattttatgtataatatatataatttacgtgtaataaatataaaatgttaatatattttatatgtaagatataaatgatatatataagtgataaatattagatgtaaatgatatataaatatataaaataaatatatatattttgagatagggttttgttttgttatttaggttggagtatggtggtgtaattatagtttattgtagtagtaattttttgggtttaagtaatttttttattttagttttttgagtagttgggattataggtatatattattatgttttgttaatttttgtatttttttgtagagataaggttttgttatgttatttaggttggtttcgaatttttaggtttaagttatttgtttattttagttttttaaagtggtgggattataggtgtgagttattatgtttggttaatttatatttaataaatatattatgtaatattatatattatatatatattatttttttgggtaatatatatgtattatataattatgttttttgggttaattttgaagtttttttttttagagaaagaagtgttaggagggaaagtttgatagatattttttatattagtgaaaggggtggaagttttgtaaatttatagattttttatttttattttagagattttaatttagtagaagatttggggttgtttttaagaagttatatgtgtaataggttttttaagtagggtttggttttagaattattggattaaataattttaagggtttttaggatggttttgtgataatattttgtgaaatttttgatttttagttttttagggtaatgaagggttttggttaatttgttattttttatattggggttttatattagggtagggagatttattattattttataatttagagaaaaattgtttttataagggaagtggtttgggttatatatttattaagagagtgagaattggaatttatgttgatgtgatttatttatttatataataaagtttttattatattttaagttttttaaaaatttatgtaaatgtatatgaaatattttttttatgaaatgtttaattatatgaatataagaaaaaattttttttattttttttttttaattttatatttttttttaaggattattaatttatttgttttttaagaaaatattttataaattatatacgttatgtataaattaaataattgtttgattttttaaattaaataaatttatgtttaagtttttaaaaatattagattatataatttttttcgttatttaaaaataagttagtatatatgattatattattttttttaattgttgtatagtatattatatgtatttgatgtatgtattatgatgtatttgaatttatttgattattttttattgaacgatatttgggttttttttataattttgttattatatgtataaaaaaatgttaaattaagtattcgtatgtatgatgtgatttttttaagatagttagatatgtaaatatgagtttaaggggatgaatgttttgttttttttttatatagttttattgtaattatatggagttggggagttggggagaaaataatggtttttattttataattttaggttgaattagatgtaaattttgaaaagtatttttttttggatgttgatgcggaatatgataaaggttagttaatgttttttatatgagtatttttgttattatggtaatatttaatagagttttttatttttttattattggtattttattttatcgtttttaatgatataatggttttattttggcggttttttttcgttagtagttattttagtttttagttttgattttgaatatatatatatacgtatatatatatatatatatatatatatatatatatatatatatatatatatatatatatatatatatatatattaataaatatatatatataaaataaagtttggattttttgtatgaggattatttgggtgggatttttttaattaagtaattttaattattttttttatatattttatgtatttttattttgaattcggtgaatgtttaggagaggttgttatttttatatattatatggaaaagatgtttgtttttttttttggaagaagttgttttaaatttttttgagttttagtagtataggggaaatgatgaatggtttatatttttgtatgaataatatttgttagtttggagtatagggtatattgtaaatcgatattgaggggaaagaattagtttgtggagtttgtaagaagtttaagttgtagtttgatagaaagatgggaaattaaaattgtttggtgtttttttgttttgtgtttcgttttttgtagg

SEQ ID NO: 1686 - DNA, 13326 bp, Artificial Sequence
  chemically treated genomic DNA (Homo sapiens)
tttgtagggggcgagatatagggtagggaaatattaggtaattttagttttttatttttttgttaggttgtagtttaaattttttataggttttataggttggttttttttttttaatatcgatttgtagtatgttttgtgttttaggttggtaggtgttgtttatataagaatgtgagttatttattattttttttatgttgttaaaatttaaagaagtttgggatagttttttttaggggaggaaataaatattttttttatatagtgtatgagaatagtaattttttttgagtatttatcggatttagaatagggatgtataaaatatatgagaaaaatgattgaaattatttgattaaaaaaattttatttaaatagtttttatgtagaaaatttaaattttgttttatatatatatatttgttgatatgtgtgtgtgtgtgtgtgtatatatatatgtgtgtgtgtgtatatatatatatatatatatatatatatacgtatgtatatatatttagaattaggattgagaattagaatagttgttgacggaagggagtcgttaagatagagttattatattattgggagcggtaaaataagatattagtaataaagagatggggagttttgttggatgttgttatggtgataaaaatatttatataagaggtattagttagtttttattatgtttcgtattaatatttagggaagggtattttttaggatttgtatttagtttagtttagagttgtaggataagggttattattttttttttaattttttaattttatgtagttataatgaaattgtgtagaaaaggggtagaatatttatttttttgaatttatatttatatgtttaattattttagagaaattatattatgtatacggatatttagtttagtatttttttgtgtatgtgatagtaaaattgtagaaagaatttaaatatcgtttaatgggaaatagttaaatagatttagatatattataatatatatattagatatatgtaatatgttatgtagtagttaaaaggaataatatgattatgtgtattgatttatttttaagtggcgaaggaagttatgtaatttaatgtttttaaaggtttaaatatgagtttgtttgatttaaaaaattaaatagttatttgatttgtgtatgacgtatataatttatagaatgtttttttgaagaataaatgagttgatggtttttgaggaggaatgtgaggttggagaaggagagtgaaggaaatttttttttgtatttatatgattagatattttataaggaagatattttatgtatatttatataaatttttaaaaagtttgggatatagtaggaattttgttgtgtaaatgaatgagttatattaatatggattttagtttttatttttttagtaggtatgtgatttaagttattttttttataggagtagtttttttttaaattgtggggtgatagtaaatttttttattttggtgtaaagttttagtataaagaatagtaaattagttagaattttttattattttgaaaagttagagattagaaattttataaagtattgttatagaattattttgggagtttttgaaattatttagtttagtggttttaaaattagattttatttggagagtttgttatatatgtagttttttggagatagttttagattttttattggattagaatttttggggtggggatagggaatttgtaggtttataaagtttttattttttttattaatatagggggtatttgttagatttttttttttaatatttttttttttgaaagaaaggattttaaagttgatttaaaagatatggttatatgatatatatatattgtttaaaagaataatatatatgtgatatataatattgtataatatgtttattagatataaattggttaggtatagtggtttatatttgtaattttattattttgagggattgaggtgggtagatggtttgagtttaagagttcgagattagtttgggtagtatagtaagattttgtttttataaaaaaatataaagattagtagggtatggtggtgtatgtttgtagttttagttatttaggaggttgaggtgggaggattgtttgagtttaggaggttgttgttgtagtgagttatgattgtattattatattttagtttgggtgataaagtaagattttgttttaaaatatatatatttattttatatatttatatattatttatatttgatatttattatttatatatattatttatattttatatataagatatattaatattttatgtttattatacgtgaattatatatattatatataaaatgtatatatatattatatgatatatggtttatgtgagtatgaaagattttgaatttaaaatttaaaatgtaattcgatatttaaaatttagtggtttagatagttaaatttaagatggaattttatttatttagttggtggtttttttttaaattttttttttttttaagttatttttaaggatagggatttttattttttttataggtggtagttattgttagaagtgatgggataaggagtattttgggagggttttaatttattttttttatattttttattattgaaattaggataattttatgtgagatgtaatataaatagatttaaagtttaatattatttatgtttattgtatgtttgtttattatgtggattattttatttattttttaaattagttttttattgttgtcgtaataaattattattagtgtagtagtttaaataatataaatttatttattttaaagtatagttaagtatggtagtttatgtttatagttttagcgtttgggaggttgaggttggaggattaattgaggttaagagtttatgattagtttgggtagtatagcgagatttttatttttataataatatttatagatgggaagtttggtataagtattattggattaaaattaggttgttggtaggttgtgtttttttttggaggttgttggagaaaatttgggttgatgatggaatttagttttttttggttataggtttaaagtttgtcgttttgttttggttataaattaagggttatttttagttttagatgttattaaatttttttggttattggtattttttttttttttttatagttagtaatgggtaggttaggttttttttatgttatatttttttggtattgataagtagttgggaaagttttttttttttgagaatttataggattagatttgatttattagggtaatttaggaaaattttatttttaggtttattattttaattttatttgtaaagttttttgttatataaggtaagatatttttaggttttggtaatgtagttgtggatttttttggaggacgattattttgtttattatattttttatggtagtattattaatgtttttattttatagataattagattagtttaatattttatagttagtaaattaaagaataatgatttggttttagattttacgtttttaattttttggttattttgtattttttattagttagatatagatatttaaaagcgaagtatatttgaaaaatttaggattataatttttataaattaaaaaagttaagagtatatatatttatagaatttattatttgtgggtgtttagttgtttggttttaaatatatagaaattttaattatatttttttattatttattatataaatttttttttttttatttattagtagaaatttttggtgaggtttttggataaaagtttaaaaaggtaaagtttatttaattgtttatcggtagttgagttgaagaggaattttagggtttttttattattaagtttaagattataatatatttttttagttttatttttgtattttttttttttttgtggtatttggtttattagtgattgttattttttgttttatttttggatttttgttttttgggggttttttttttgtttttttattatataaatatataatttatttttttttattttaagagtttaattagtagttatgttaatggtgagtaggggcgatatagaaattgaagttggggtgatagcgatagttgtagtatatgtatttttttgtcgtttttattagtttatttttgttattttatatatatagtttaagttataaagttttatattattttgataaaaatgaaagttaatttttaaagatgttggattttttattttatttttttttaattaaattgttttatagtatagaaattttggagttgtttttaagattagttttttattttattagaataataaaaatagtaattatgaaggagataggagagtttttaaatatttagaaattttagcgtgttattaaagtttttattttttggtttttttggtttttttttgagggttgattgtggttttgttattttagggtttgtagttttttattttaattttttaagatagaattttattaggttggttagataaggagtaattttatttattttaagtaggttatttgaatttttgagaatttttaataaaagtgattattttaaatattaaaatttttgaaattgtttaatggtatttttttttgttttttttttttttattttttatttttaggtttaattgttttttttgaattttatgttaaaatggtttttatttttttattttttttttttttaatgttgtgaaatgaaaagaagtaatgtttatagttagttttgtatgtggtttggttttagatttggttaaaggaggttttgtttttaaggggaaatttttgaatacgattaagttttaataagtttcgttaatttttatttatttattttaatgtttaagaagttgatataagaagaagtatataagtgttattgaaaatagtaagaaattagagaggattttaatttgtttaagttttgaggttttagatggtttgtttgtttttttaataatttagtaggtaggaattattattattattttatatatgggggagtttatatggaaagagtaaatagtttgtttaaagtttatataatttagtaagtgtagaagatttttaagtttttttttttaatttttttataggttataaggtgtttagtttgtattttaaaaaatgttatttttattaggagtttaataattttaagttagagaaattagattttatatttaatttaaaatatgttgttggataaatgtggaagggtagaataagtaaatggttgaattttaatataaaataatgtagtgtttatattgtggtttataagttatatagggtttattagaaaaaaataaatagatgtgggagttagaaaagttttaaaagagttttagttaggtttttaacgttattgagtttaagtttttttgtttataaaatgggtataaaattagttaatgtataggattattgtaaaaattaagataaataatgtggtttttttataaatagtaaaagggttatagaataaatgtatttttaattatgtttttattattttatttattttttttgttaaatagttatgtgttaattttttatattttatcgatattttttgtaatattataaagtatatgaaattatttttattttagaggtgaggaagttagggattagagaggattaaggagtatatttaatattatatagttggtgatagatattttagtgtgggaatcgagagttgatggttttaaacgttattgttaatttgaagagtagatttttttagtaattattgattgattaggtagggaggagaagtttatatttttttttttaaattatatgtttttaaaatttaaattaaaggtgattttgtatgtaattttggaaaaagttaggggtttattaagttatagaatttttaagttgaaagagattttagagaataatggatttttgtttaatttttttattttttagttgtagaaattgaggttttataggttaagttgtttatgttatttgtttgatttttgtgagtattttgggtatatttagtgtgataatttaggttttttgattttagttttttgtttattttattttttttaaagtttggatagatttataaagttgaaaaatattgtattattttagtttttattttttttgggttttattgttaggtagttttttggttattaagaaaagatttataacgtaattttaaaagtttttaagaaaattaatgatagttttgaatgaattttgaatatttgcgatgtgttagatattatgttaagtatattatttttttttttgtagtagtttttaaattttagttatttgattattatttttatgaattttgttaaatttatatattatttatgtagttgttaatttaatgtttgtttttatattgattttaaagttttaattattttagttttattttgggttataatatttatgaaattatgatgtgttaattattttttaaatatatattatataaatgttatataaatagtattttatatttaattttaaatattaaatatataaatggtgtttatataatatgtatttaaagtgtttatatattataatataatttattttttataatttataaatattatttaaatatgtatttaatattattaataattatataattattaatattaaaattgttgtttaagtttttttaatataattttatttaattattttttaattttaaagtattagtataatttttgaatattttatattatattattgagtttaagtttttttgtttataaagggtatattgtattttaatatgtttttgtttttttataatagagaaaatttaaagtttagttaaataatttaatttaggttttatagtagtttagtggtattgttagaatttagatttaagtttggttgattttaaagttagtgtagttaattatgttatttaatgatatgaaggaatgtttagtagagtaagttgtattagatgagaatttaaaggtgagattttatagggtatagattgattaatttatatgattgtgtgtataggggtgggtgagtttagaaattacgtataagggagtaaggatattatattttttatatttttaagtttttttttaaagtattatatttagagagaagttgaaatagtagtgaagtgattattttataattttcgtttttatttattattggttaatatttattaatttgttgatttttcgttttgtagtgtttgtgtgtgtgtgttgttttggttgaattatttataaataagttgtagatatttgtgttattttatttttaaatattttagtatgtataaagaataaagatatttttttatataattagatattattattatatttaagagtgtgaaattgatatagtaatattatttaagatgtagtttatatttaaaattttttaacgtttttatagtttttttattgttattttttttttttttttataatttaaattatttgttgtatttggttgttagtttgttttaattttttttaatttagagaataatttttttattttttttgttttttttgtattgacgtttttgaagattttcgatgagtttttatgattaaatttaggttaatttgtttttttttttttttttttttttttggttaggaggggatatatttttttagtaatatggttatgtataattatttgaaaaaatttatgtagattagttagttaatagagtaaaaatttttaaaattttaattattgaataagaaatagttttttaattggtaaagtaaagagaattaattttgatttgtggtagttatatttaattttttttaaattttttgtatgatttgattgtatttttttaattattttttgaaaattagatttgaaatgaatataatgttgttttattttattttttgttattgtattagttgggagttttgttaattttaggttttgtgtgagtgtggtatatgtatttgattagtttttgtttgtttattcgtagttttgtttaggtttagttatgtattgtaggaggaggagtaaggagagggaggagttgggttatttagatttgagagtttaagtttaatttttttagcggtagttgaatattgatgggaatttaattaataagtgttttgttttagtaatttgtggttttaatatttttgttttattaggaaagaaaatgggagtaggttttttaggtataagttataaattagaggtaattatattttaaggtatgtgttatgtggtagtaattgggagttggtgaaaagagaaatttttggagttttttgtagaagatgagatatgttgagttgtcgtgttgtgttgtggagtatgggaggtatattgtattttgttttatagataattagtgttgtggtgtttttgtttagagttgagttgtgtggtcggagattattgttgatttgaatggttatttggatgagttttggattgttagggatttgggtttgaattttaatattttattggggagtataattttaagtaagtggtttattgtgatttttttttgattagttttttatttttgtttgataaaatagaaataatatatattttgttttgttgagtggattaaatgagataatatgtgaaagtgtttggtatattttaatatataataagtatttagtaaatagcggttgttattattattgttttatatatgttaagaagtatttgttggaggttttaacgtagagtttttaaataaatttgtttatatggtttgattttgggtttaagtattttttatgatatttaaattttgtgggggtttaggagatattaaatttattgagttttaagtgtgtgtggtaattggggttatagattgtattgaggtttaaatggaattagtttttagcggaataaaaatgtaataagtagtaatataatgaggggtgttatgaagaaatagggtgagaaaatgaaggattagaggagatttagattttatttttttattttgttattttgtttttatttttgttatttttgtaaggtgatatatttgaaatgtttggtttgagaaggtaatttaattaaattataaatttttattgagtttagtatagttttatgtttcgagatgattgagataaataagttatagttttttttttttaggtgtttataatatataagatgagatatatgtaatgtagatataatataataattttatagtggaaaagcgtgagtaaatattaatagtaatgatggttaatttttattgaggttttgtcgggtgttaggtgttgtttttagtatttgatatggattaattcgtttagttataatatgaggtgttttgtgttatagtgttaagttttggggagtagttttgaagttagattttaaagcgtttagttagttacgttgatttttcgtattagttttggttggtgatgagtacgttttattgttagagcggtttatagttaggagcggttttatggtatttgttagtgatatgatattttgtaggaaagcgtttttgtgtcgcgtcgtaaatgatatcggtgtggtttattaatttttgttttttgaatttgtttttttagaaacggaatttgttttgagtgcgcgggcggttagtgagtttttaattttttgtgtttagtttcggtttgtcggcgcggagtacggcggtaggaaattattttttttttttattgggagcgcgattcgttatttattagcgggttttcggggtattttgattagtttttttaggtttagttaaggtttttgtggttttgtttttttttagaaatgaatgagtaatttttgtattatttgggatatgttaaaattttattttcgtgcggggagggggtgcgatttatttatattgatgttttgattgtttttgttcgcggagaattgataagcgattttagttttttaggagagcgtgttttggcgtttatcgaggagttgtaggtcgttgtatttttggttgtggtgaagttagttttttcgtattttgttattggagtgggcgttatttaataacgtgtattagtgtttgtaattattcggagatttttattgggtagggcgaaattagttttgtgtggttgttttttaggttttatatttttaagttttttaggttatattcggattatttcgttgattaatgtaattttggtggatgttagaagttttaggtggtgataggattgaaaagagttcgtttttttttttttttttttttattgttatttttttttttagtaaaattagtttttttttttttttttataaatgaggaggggagagtggagagataaattagttattttagtatgttgtatttttttttagttgggttagatgtggttaagtgtaaaggtattttttgggaataaattaaatgaggttaaatttggttaagttaggagtataagagaatatcggaaggttttagtttttgaaggatagttagtgtattttaagatttttgagttaaatttttttttattgtagtttgttaaaaaagagggtaaattttttatatttttttttcgtttttttatattttttttttagatatttttgtggtttgtattttttttatatgtttttatagttttttatttgatttttttgtttttattttattttgtagtatttttttgatatagtagttaagatatatttttaaagttagattataatatatttttgtttaaaagtttttaaaggttttttaattatttttagtaagaaatttacgttttttattatagtttaagaggttgatttgatataggttttgggtggttttgagatttttttttttttcgtgggtttagttatattggttttagatttgtttaatatgttttatgtttagtatttttgtttttaatgagtttttgtttatagtttttttttttagatttgtatgtagttggttttttttttttatttagatgacggtttagtgaggattttttaattaggttttttaagatagatattatttattttttttaatttatttttgggttagttattttgttttattttttttttaatgtttatgtttgaaattttattatttgtttgtttattgttgtttgttatttttttgttaaagttaaattttacgaatgtggagattttgttgttatttttagtgtttaaaatgttgtttggtatatagtaggtatttaataagtatttatttaataaattaagtttaaaagggttgttatatgtttttttgtgttggaggaaggggtattttaggttgggatttggatatttattgatttaatatttagtaaatgtagtatttgttgaatattttgttaagtatcggttataatagtgaataaaatagagtagagtttttgattttgtggggtttatattgtatgaaagaaattaaaagtgttggggaagagaatagggggtatttattttagaaaaggtgtttagaaaagtgttttgtgtaggggtgtttttttggttgagattttaaggttttgtaggttataggaataatttgggatttaggtgaagggtaatgggaagttattagagagaattaagaatgggagtgatatgatttaatatatgttttaagattatttatgttattgagtgaggggtggattggatgggagtatttgtggaagaggagaggtataattgtaataatttatgtttgttattgattattaaggttaatagtgatattagagaaagagaagtgtatatttaagatatattttggtgtgtaaagtagataggatttgttgataattgtttttgggagaggatggaaagagataattcgggttgataggtagttttttttttttttttttttttttttaagagatggagtttcgttttgttatttaggttggagtatagtggtgtaatttgggtttatatatagagttttttatgtttttataaaaaaattttgttttttaggttttagtaatttttttgttttagtttttcgagtagttgggattataggtgtatgttgttatgtttagttaatttttttgtattttagtagagacggggttttattgtgttgtttaggttggttttgaatttttgagtttaggtaatttatttgttttggttttttaaagtgttaggattataggcgtgagttatcgtttttagtcgatagatagtttttttatttgttaaattgggatgattgtgacgatgttatttaatagtatgggtgtagaattttttaattatttgagtagtaatttaagtttattttttagattttagagaaggttattataaaataatgaaaatagatatattttgttttattttaaaaatttaaattttttgttaggtatagtggtttatgtttataatttaggtagtttgggaggttaaggtgagaggattgtttgaggttaagagtttaagattagtttaaggaaacgtagtgagattttgtttttttaaaaatattaaaaaaattattcgggtatgatggtgtacgtttgtagttttagttatttgggaggttgaggtgagaggattatttaggtttaggattttgaggttatagtgagttatgattgtgttattgtattttagtttagagaatagagtgagattttgttttaaaaaaaaaaaaaaaaaattagagtttttgagataattgtagatttatatgtagttttaagaaataatatagtttatgtattttttatttaattttttttaatggtaatattttataagattatagtataatattataatgaggatattaattttaatagttaagttatagaatatttttattattacgaggatattttatgttgtttatttatagttttattgaattttttttatttttatttatttttaaattttggtaattattaatttattatatgtttataattttgttattgtaagaatattatataaatagaattatatagtatatgtattagagttttttagagaaatagaagtaatataatgtgtgtatatatggagagatttattttaaggaattgttgatatagttatggaggtttggtgagtttaatatttgatgggagaagttggtaggttggagatttaagaaagatttgtatttgagtttaaaggtagtttgttggaaaattaggaagagtagatgttgtatataaagtttagaggtagtt

SEQ ID NO: 1687 - DNA, 6456 bp, Artificial Sequence
  chemically treated genomic DNA (Homo sapiens)
tatttttaaatttgtatagagtaataaaaaataataaatattaagtttatagtgaaaagaaagagtaatggtcgggtacggtggtttatatttgtaatttagtattttggaaggttgaggcgggcggattatttgaggataggagtttaagattagtttgattaacgtggtgaaattttgtttttattaaaaatataaaataattagttaggtatggtggtgggcgtttgtaattttatttatttaggaggttgaggtaggagaatcgttcgaatttaggagatagaggttgtagcgagttgagatcgggttattgtaatttaattcgggtaataagggtaaaatttttttttaaaaaaaaaaaaaaaaaaagaaagaaaaaaaaaagaatgagtaataagaagttttttgttttttttagaaatttaaatttgttataaagtattataaaaattaatttgtgtaagaatagataaatatattaatggaatagaatataaatttagagatagatttttatattatatattagaatttgatatatgataaaagtggtttattaaagagaaaagtaaattggatttttaatatttaaaataaggatgaattttagaggaattaagaagatttaaatgtgaaaagtaaaattataaagttattggaagaaaatgtagaagaatgtatttatggtgtagagttgggaaagaatatatataaattattaaaaattgtaaattataaggggaaaaaatggttatttttattatatttaaattaataatttttattttggttaggagcggtggtttatatatataattttagtattttgggaggtcgaggtgggtgggttatttgaggttaggagttttaggttagttttattaatatggtgaaatatcgtttttattaaaaatataaaaattagttgtatgtggtagtttatatttgtaattttagttatttaggaggttaaggtaagaaaattatttgaattcggtgggtagaggttgtagtgagtcgagattgtattattgtattttagtttgggtaatagagttagattttatatgaaaaaagaaaaaaaatttattttatgaagtttatgaaggaaaaattaatatagagatgatagaatgggagaaggtatttgtaatgtttaaatttgataaagtaattgattttttttttttttttttttttttttgagatgaagttttatttttgttgtttaggttggagtgtaatagcgcgattttaatttattataatttttgtttttttggtttaagtgatttttttgttttagttttttgagtagttgggattataggtatgtatcgttatatttagttaattttgtatttttagtagagatagggtttttttatgttggttaggttggtttcgaattttcgattttaggtgtttggtcggttttggttttttaaagtggtgggattataggcgtgagttattgtgtttagtttgattttattgtgtttgtttgtttgtttgtttgtttgagatggatttttattttgttatttaggttggagtgtagtggtatgatatcggtttattttaattttcgttattcgggtttatgttatttttttgttttagtttttcgagtagttgggattataggcgttcgttattacgtttggttaattttttgtatttttagtagagatagggttttatcgtgttagttaggatggtttcgattttttgattttgtgattcgttcgcgttagttttttaaagtgttgggattataggcgtgagttattacgtttggttacgagtggattttaaaaatatcgtgattattgaaaataagattagagtgaaatatataataagatgttatttatggaaatttaaaatgtttgggtcgggcgtggtgatttatatttgtaattttagtattttgggaggttgaggtgggtagattatttgaggtcgggtgttgaagattagtttggttaatatggtgaaatcgtttttatttaaaatataaaaattagttaggtatagtggcgtaagtttgtaattttagttatttcggaggttgagataggagaattatttgaatttgggaagcggaggttgtaatgagtggagatcgttttattgtattttagtttgggtgatagagcgagatattgttttataaaaagaaaaaaaaaaaaaattttgtatataaaatgatttatattttgtaagagtataaagaaaaaaatgaatatttaatgtattggaataattgaatgtattggaataagtatttgggtgtggtgaatcgaacgtgtagttttagttatttgggaggttgaggtgagaggatcgtttgagtttaggaagtttaggttgtagtgatcggtgattgtgttttttattcgagtttgagtaatagagattttaatttaaaattagtaaaatcgtcgggtatggtggtttacgttagtaattttagtattttgggaggtcgaggtaggtggattatttgaggtcgggaattggagataaatttgattaatatggtgaaattttttatttttattaaaaatataaaattagttgggttcggtggcgtatgtttataattttagttattcgggaggttgaggcgggagaatggtttgaattcggaagatggaggttgtagtgagttaaggttgtgttattgtattttagtttgggtaataagagcgaaattttgttttaaaataaataaaaataaaaataaaaatgagatatagattagtgaagatagtgtgttaataattgttattcgtttaattttttgtgttggaatttagggattaaggtttttagaagtcggaaataaagtgaatttgtggagtaggaattgggtgaggaagttttttttgaaggatgaagaggagttttttggaatttcggatttttttttttttttttgagacggagttattttgtcgttaggttggagtgtaagggtacgattttggtttattataatttttattttttgggtttaagttatttttttgttttagtttttcgagtagttgggattataggtgtgtataattacgttcggttaatttttgtatttttagtagatatggggtttttttatgttggttaggttggttttaaatttttgattttagtcgatttatttgttttggttttttaaagtgttgggattataggtatgagttattaggtcgggtcggtattttagattttttaggggattagtgtagtaaaggaattaagaagggatgtaaaggtatagtgtgttttgggtataataaggatttaggtattgtttagaataggaggcgaaggagatagaaggagaggtaggagagataggtaaggttagagatcggataagagaggtaggaggttttgtttattttgaaaagggatttgaatttggtaattggggtaatagagatagtgattttttgtttgagagatgagattggattttcgaaaattgttttttgttttcgttataaaggaaataagaggagtacgaagattagtgagggtgatggtgatttggattgaagtggtagtcgttacggagaatatcggatgaatgtgagagagttttggaggttaaagtattaatgttggaaattaattggataaacgaggagagcggcgtaggataggaggaatcgagtttgatttttattataggggtgattgggcgggtaatttattgaaataaggaagttaggaggaggagtaggtttggatatgttgattattagagttgttatattcgggcggtaacgaatatttggatttgtagttttagagaagggtttgggttagatgttattgaagttttatggtggcggaaaggcgagaaatagtgggttgagattttaagtgtaatttattgcggtttttcgttcgttttttaggtggtagtataattttgcgttttcgaagttcgttttttgagttagatattttttacgttttgggtatttcggtttttttttttttatacgtcgattttaggtcgcgtattttttgtttggtagaatttggtcgaggatttaaattcggagtagtttttagagagcgtgtcgtttacgcggttagtatatgtttagagattttagaggtttagagattttagggttggtggtgtggtcggttgtgattatttgtttttcggatcggttttaggaattaatttggggaatgtgtgtaggggaagggcgggatagatagtgttcggagtagggaggcgttgaaagataggattaagtagttcggttattagattcgttgtgggaacggaattttttggtttttagggttatattcgcgtgggaagtatgtcgcggattttttaaggcgttatttttttgttttttcgttttcgtttgggataggtcgggacgttcgggatttgatatttggaggtttttaacgtgggagttaaaaatagtagtttcgggttattttggggtattgttttttttttaattcgcgcgtcggttcgcgagtcgttttaggtcgttggagttttttcggggtaagtatatttggttcgttttttttttttagattttattgtttagattcgtagagtttaagatgtttttgtagttcgggattttagttggtgggcggagttttaatacgtgggtgggcggggttttttgttttagggattttttttttaaaattttttagtcggaggttggcgggaattcgagaggcgtgtttcgttagttacgcggaggggcgtggttttattggttcgttttattaattttagttaaattttaaattttaggcggagggggcgtggttttttggggtgtgcgggtttttggttaatgggtgttgtgaagggcgtggttcgcgggggtaggagcgaggtggcgggggtttttcgcgtttttttttttagtttcgttttattagattcgcgggagttttattgtttttcgggtttttggtttgtggttgtgggttttatcgggttcgttttcgtacgttatttcgggattttcgcggttttcgtaggttttgcgttttaggtcggagttagagattttaggatcggtttttttattttcgtcgtttttgcgcgtttagtttttttaagacgagatgtcgtcgggtttttaatagataggtttcgaagtaggatttattatgagggggcggggcgggggggtacgggtttcgttttttttgggttggggtcgcggttggggttagttgggggtggtttttgcgtaggcgtagggggtgaaggtagggggttggttatttatattcggtttggataattcgtgattgtgagattttaattttattaaaaggtagagtgggtttggagggtttttcggggtataggtagtaagtggattttgcgagttagggtttatttttttgtttagtaggcggcgcggcgtttcggaatcggggatattttgttttcgattcgattcgggaaagtagatttaggcgggttttgtttttcgggagttgttcgttcgttttcgtttacgggtagtgtttcgaggatcggaggtttttcgtgggtttttatttttatttttggtcgttttttaggacgttgaatttttttttggttttatggttggtggaggggtagaggggattgttagtttttttttttttagtttaggttttcgtttggagatagtttgtgtcgttagcgagcggttattattgttatcgttttttatattatttttttgttttttttttttgggtatggtttttttaggtagaatttttggacggttttttttgtacggaggttagagggggagggtaggttacgacgtagatagagaaggttatttttagatgatcgggatgttttttttggaatagtattttttggttttgttgggggttttttggagttggttgatagaatttttagaggggagggaagaggatagtggttgatgataataatgtacgtgttaatttatgaaattagtattgttaaggatattgttaatatgtgatgttgatttttataatatttttatagataggtaggtaaggtaggtaatattatttttattttatagaggatatttaggttcggggtagggaagtgatttggttaaggttatataaatttgagtttttaaggttaagtttgttttaaggttatagaagaattttgagataagtttttaaatatttttttgttttatggatttaaatatttagttttttttttatgtttaggttgtagtttagtttttgtttatattgagatttttgtgtaatttttaatatggtttagttttttttatttaatatgttgggtggagtttagtatttttaggttttagttgggttcgggtttttagcggaaggaaaaaaattatggttttatgtgatatgttgtgtttttgtgtttgtttgtttagg

SEQ ID NO: 1688 - DNA, 6456 bp, Artificial Sequence
  chemically treated genomic DNA (Homo sapiens)
tttgaataggtagatataaagatatagtatgttatatggaattatgattttttttttttcgttaggggttcgggtttagttggagtttgaagatattgggttttatttaatatgttgggtgagggaaattgggttatattaggaattgtataaagattttaatgtaaataggagttgaattgtaatttgggtataaaggagaaattggatgtttgggtttataaggtagagaaatgtttgagaatttgttttaaaatttttttgtgattttgagataggtttggttttaagagtttagatttgtgtgattttggttaagttatttttttgtttcgaatttgagtgttttttgtgagatgggggtgatgttgtttgttttgtttatttatttgtgagagtgttgtgaaaattaatattatatgttaataatatttttgatagtgttggttttataaattaatacgtgtattattattattagttattgttttttttttttttttttgggggttttgttagttagttttaggaggtttttaataggattaagaagtgttgttttagaaaggatatttcggttatttaggggtggttttttttatttacgtcgtggtttgttttttttttttaattttcgtgtagggagggtcgtttaggggttttgtttgggagagttatgtttaggggaggagggtaggaaggtagtgtgaggggcggtggtagtggtggtcgttcgttggcggtatagattgtttttaagcggaaatttgagttggaggagggggggttgatagttttttttgtttttttattaattatggggttaagggaaagtttagcgttttggagggcggttaggagtgggggtgggggtttacggagagttttcggttttcgaaatattgttcgtgagcgaagacggacggatagttttcggagggtaagattcgtttggatttgttttttcgagtcggatcgagggtagggtgttttcgatttcggagcgtcgcgtcgtttattaggtaagggggtgaattttggttcgtagaatttatttgttgtttgtgtttcgaaaggttttttagatttattttgttttttggtaggattggaattttatagttacgggttgtttaggtcgggtataaatagttagttttttatttttattttttgcgtttgcgtaggaattatttttagttgattttaatcgcgattttagtttaagaaaagcgggattcgtgttttttcgtttcgtttttttatgatgaattttatttcggagtttatttgttggaagttcgacggtatttcgttttagaagagttggacgcgtaggggcggcgaagatgaaagaatcgattttggagtttttgatttcggtttggagcgtagaatttgcggaggtcgcgggggtttcggagtgacgtgcgagggcgggttcgatgggatttatagttataagttaaggattcggagagtagtggggttttcgcggatttggtggagcggggttgggggaaaagacgcgagaagttttcgttatttcgtttttgttttcgcgggttacgttttttatagtatttattggttaggagttcgtatattttagaaggttacgtttttttcgtttggggtttagagtttggttggagttggtggggcgggttaatgaggttacgttttttcgcgtggttggcgagatacgtttttcgggttttcgttagttttcgattgggaagttttgagaaaagagtttttggaataaaaggtttcgtttatttacgtgttaggatttcgtttattagttaggatttcgggttgtagaagtattttaaattttgcgggtttggatagtggggtttgagaggagaggacgggttaggtgtatttgtttcggggaaattttagcggtttgagacggttcgcgagtcggcgcgcgggttgggagaggagtaatgttttaaagtaattcggggttgttatttttagtttttacgttgggagtttttaaatgttaggtttcgggcgtttcggtttgttttaggcgggggcggagagatagggagatgacgttttaaagagttcgcgatatgttttttacgcgagtgtggttttgggggttaggaaatttcgtttttataacgggtttggtggtcgggttgtttggttttgttttttagcgtttttttgtttcgggtattgtttatttcgttttttttttatatatattttttaggttggtttttggagtcggttcgagggataagtggttataatcgattatattattagttttgaggtttttgagtttttgaggtttttgagtatatgttggtcgcgtgaacgatacgttttttggaggttgtttcgggtttggattttcggttaaattttgttaggtagaaagtgcgcgatttagggtcggcgtgtggggagagagaagtcgaaatatttagagcgtggagagtgtttggtttagaaaacgggtttcggaagcgtagggttgtgttgttatttggagggcgagcgaggagtcgtagtggattgtatttggaattttaatttattatttttcgttttttcgttattatagggttttagtgatatttgatttaggtttttttttggagttgtagatttaggtgttcgttatcgttcggatgtggtagttttagtgattagtatgtttaaatttgtttttttttttaatttttttattttaatgaattattcgtttagttatttttatggtagaagttaggttcgattttttttgttttgcgtcgtttttttcgtttatttagttagtttttaatattggtgttttgatttttaaaatttttttatatttattcgatatttttcgtggcggttgttattttagtttagattattattatttttattggttttcgtgttttttttattttttttatgacgagggtagagaataattttcgaaggtttaattttattttttaagtaagaagttattgtttttgttgttttaattgttaagtttaaatttttttttagagtgaataaaattttttgttttttttattcgatttttggttttatttattttttttgtttttttttttatttttttcgttttttgttttgggtaatgtttaagtttttattgtatttagaatatattgtgtttttatatttttttttgatttttttgttgtattaattttttgaaaaatttggaatgtcggttcggtttggtggtttatgtttgtaattttagtattttaggaggttaaggtaggtggatcgattgaggttaggagtttgaaattagtttggttaatatagagaaattttatgtttgttaaagatataaaaattagtcgggcgtggttatgtatatttgtaattttagttattcgggaggttgaggtaggaaaatggtttgaatttaggaggtggaggttgtagtgagttaagatcgtgtttttgtattttagtttggcgatagagtgatttcgttttaagaagaaaaaaaaaaattcggaattttaaaggatttttttttattttttaaagaaagtttttttatttagtttttgttttataggtttattttgttttcggtttttggggattttgatttttgagttttagtatagaagattgaacgaatgatagttattagtatattgtttttattgatttatgttttatttttatttttgtttttgtttgttttgagatagagtttcgtttttgttatttaggttggagtgtaatggtataattttggtttattgtaatttttatttttcgggtttaagttattttttcgttttagtttttcgagtagttgagattataggtatgcgttatcgggtttagttaattttgtatttttagtagagatgggggattttattatgttggttaggtttgtttttaattttcgattttaggtgatttatttgtttcggttttttaaagtgttgggattattggcgtgagttattatgttcggcgattttattggttttgagttgaggtttttgttgtttaggttcgagtgagaggtatagttatcgattattgtagtttagattttttgggtttaagcggtttttttattttagttttttaagtagttaagattatacgttcgatttattatatttaaatgtttattttaatgtatttaattattttagtgtattaaatgtttatttttttttttgtgtttttataaaatataaattattttgtgtgtaaagttttttttttttttttttttatgagatagtgtttcgttttgttatttaggttggagtgtagtggggcgatttttatttattgtagttttcgttttttaggtttaagtgatttttttgttttagttttcggagtggttgggattataggtttgcgttattgtgtttggttaatttttgtattttaagtagagacggttttattatgttggttaggttggtttttaatattcgattttaagtgatttgtttattttagttttttaaagtgttgggattataggtgtgagttattacgttcggtttaaatattttaaatttttataaatagtattttgttatatattttattttgattttatttttagtaattacgatgtttttaaaatttattcgtggttaggcgtggtggtttacgtttgtaattttagtattttgggagattgacgcggacggattataaggttaggagatcgagattattttggttaatacggtgaaattttgtttttattaaaaatataaaaaattagttagacgtggtggcgggcgtttgtagttttagttattcgggaggttgaggtaggagaatggtataaattcgggtggcggaggttgaggtgagtcgatattatgttattgtattttagtttaggtgatagagtgagggtttattttaaataaatagataaataaataaatataatgagattaggttgggtatagtggtttacgtttgtaattttattattttgggaggttaaggtcggttaaatatttgaggtcgggagttcgagattagtttgattaatatggagaaattttgtttttattaaaaatataaaattagttgggtgtggcggtgtatgtttgtaattttagttatttaggaggttgaggtaagagaattatttgaattagggaggtagaagttgtggtgagttgagatcgcgttattgtattttagtttgggtaataagagtgaaattttattttaaaaaaaaaaaaaaaaaaaagagagattagttattttgttagatttaggtattgtagatatttttttttattttattatttttatattaattttttttttatgaattttatgaaatagattttttttttttttttatatggagtttggttttgttatttaggttggagtatagtggtgtaatttcggtttattgtaatttttgtttatcgggtttaagtgatttttttgttttagttttttgagtagttgggattataggtgtgagttattatatgtagttaatttttgtatttttagtagagacggtgttttattatgttggtgaggttggtttggagtttttgattttaggtgatttatttatttcggttttttaaagtgttaggattatatgtgtgagttatcgtttttggttagaatagaaattattaatttaagtgtaatgaaaatgattattttttttttttatggtttgtaatttttgataatttgtatatatttttttttaattttgtattataaatgtatttttttatatttttttttagtaattttatagttttattttttatatttaagtttttttgatttttttagaatttatttttgttttaggtgttagggatttaatttatttttttttttagtgaattatttttattatatattaaattttaatgtatgatgtaagggtttgtttttgaatttgtattttgttttattgatgtatttgtttgtttttgtataagttgatttttatgatattttgtagtaagtttaaatttttgagaagggtaagagattttttgttatttatttttttttttttttttttttttttttttttttttttgagaaagagttttgtttttgttgttcgggttggattgtaatggttcgattttaattcgttgtaatttttgttttttgggttcgagcgatttttttgttttagttttttgagtaggtgggattataggcgtttattattatgtttggttaattgttttgtatttttagtagagatagggttttattacgttggttaggttggttttgaatttttgtttttaagtgattcgttcgttttagttttttaaagtgttggattataagtgtgagttatcgtgttcggttattattttttttttttattgtagatttaatatttgttgttttttattgttttatataaatttggagata

SEQ ID NO: 1689 - DNA, 7166 bp, Artificial Sequence
  chemically treated genomic DNA (Homo sapiens)
ttgaggtaggaggattatttgagtttagaaggttgaagttgtagtgagtcgtaatttttttattgtattttagtttgggtaatagagcgagtttttgttttagaaaaataaatagaaaaaataagtaaataaaaagaattgtttttggttgttgagagaaggtataagattaattagagtaaaagttttgggtttgggtagaaatggatttttttacgtggttgtgagtggggttaataaggtagaggttggttagcgagaatttggatgttcgttggggtttggagtaggataggttttattcgggtttatttagttaatttaaggataagtaagggtaggaatttaggaattttttttatttttttaggtgttgaggcgtttttgggtttcgtttttgggtttgttaaggtgttaggtgttattttagtagggtcgtgatttttgggggagcgatatttaaagttttttttttttgattcgttttgtatttttgtttttgagttagaattagtggggataaaggtagtgttaaagtaggatagacgagtagggattttaagagattttagttttagtttttgtaattaagagagattatatgagaattatagaatttgagatttatagttgagttttaggatttagaattatggaatttttttttttttttttttttttttgagatggagttttatttttgttgtttaggttggagtgtaatggtatgattttagtttattgtaatttttgttttttgggtttaagcgatttttttgttttagtttttcgagtagttgggattatatatgtttgttattatgtttggttagttttttgtgtttttagtagatacggggtttttttatgttggttagggtgggtttgaatttttgattttagatgatttatttgtttgggtttttaaaagtgttgggattataagcgtgagtatcgtgtttagtcgaattgtggaattttatagatagtagtagtaataaggaagaatagtttgtatttatttatttttttagagatagggtttttttttgtcgtttaggttaaagtgtagtggcgtaattatcgtttattgtagttttaatttttttagtttaattaatttttttgttttagttttttaagtagttgggattataggtgtatattattaaattcggttaatttttaaaaatttttggttgggtatggtggtttatatttgtagttttagtattttgggaggtagaggtgggtggattatgtgaggttaggagttcgagattagtttggttaatatggtgaaattttttttttattaaaaatataataaataaataaataaataaaattgtagagttggggttttattatattgtttaggttggtttttaatttttagtttttagttatttttttggtttggttttttaaagtgttgagattataggtatgagttatcgaaattggtttttttgtatttgttgagtgtagagttgaagtttaaggatagattttggttttttatggcgtgggtttaaattttattgttatttttagtttatagaaggggaattgatgtttagggttatttagtaggtcgtgttgtagttatagtagtttataattttttattttaatttttgttgtattttttagggaattaaggggtaggggatagcgtttcgatattgttattatttttttatttttgtatattttgtttatattgtttgtcgcggttttgggttttttttaatttatattttggggttttgttgttcgtttttgttattggaattatagttaaggaaggtgtgatttgattttttttattttgttgttttttttttttaggtttataatttttttcgttagggtaggagatggttttgtatattttgtaggggtttttattttaggtttttttaggaattttaaagtgttttttaaatttatttttttttttttattcggtagttattttattttcgttatttggatatgatttattttttagaatttagaaattttattagattttttatttgttttaaatttttttatagttttttagtatttttagaataaaatttatatttttttcggaggtttagaagatatttcgtgattgtttgtttttgtttaatttgtatttaggttggaatttattggtgtgattattgtttattgtagttttgatttttcgggttttggcgatttttttattttagttttttaaagtgttgggattataagtgtgagttatagtgtttagttgaaattagtatttatttgttggtgaggttagggttattattattttggggtgggtttatttggattatgttgtgtttttagtatttgtcggagggttttgtatatagtatgtatttaatgaatcggttttagtttaggtttttggtcgtagtttggattttacggtgggaagaagagaagttatgtttttttagaatttttttggagagaaggggtttatttatatgtatttgtataatttgtatatgtttatattggtcggtagggttttgtaagtaggggatttcgttcggattttttattgattgattgattgattgattgagatagtttcgttttgtcgttaggttggagtgtagtggtacgatttcggtttattgtaattttcgtttttcgggtttaagcgatttttttgttttagtttttcgagtagttgggattataggcgcgtgttattacgttcggttaatttttgtatttttagtagagacggggttttattacgttggtttggatggtttcgattttttgatttcgtgattcgttcgcgtcggttttttaaagtgttaggattataggcgtgagttatcgcgtttagttttgatttttatttatttatttgtttatttatttattttttgagacggaatttttttttgtcgtttaggttggagtgaagtggcgcgatttcggtttattgtaatttttatttttcgggtttaagcgattttttcgttttagttttttaagtagttgggattataggcggtcgttattacgttcggttaatttttgtatttttagtagagacggggttttattatgttggttagattggttttgaacggattttaagagattcgttcgtttcggttttttaaagtgttgggattataggagtgagatatcgtattcggtcggatttttttttttttaacggggtttttaggaggatgtttgattagggtggaaggagaaagaattaggtgtttaatttatttttttggcgagggtaggaggtacgttttagtcggtaataggtgttcgcgtagtcgtcgtagtgttatagtttcgggggagggataggtttattttgtatagtagagagggagtaagaggattgttcgggggttacgtggggacgcgttgagaaacgttggatttagttggagcggttagggtagagggtaggttagaggaggttattagggagtagtagaggttggcgagaagcgtttaaaagttttttttttttttttttttttttttttggagacggggttttgttgtgttgtttaggttggagtgttgtgtagttttcgattatagtttattgtagtttcgaatttttacgtttaagcgatttttttattttagttttttgagtagttgggattataggtatgtgttattacgtttcgttaatatttgtattttttatatagataagattttattatgttgtttagggtagtttcgaattttgggatttaaatgatttttttattttagttttttaaagtgttgggattataggtataagttattatgttcggtttttgacgttgttttttttaatttttaggattttagattttattagtttatggagaagggaattaagtttgagatgcgtgattgtttagaaagttggaggttgagttgagatttgaatttagagattagaatttttagaggttaaagtttttttgggttttttagagaagggttttgagatgatagttcgttggtttttatggaagcgtgatttttttagtagatttttttttatatttaattttggtttttttatttatatgatagggataagttagattttatttttttggtggttatggttttcgtttattcgggtttataattttaaaggtttttcgtattattttagtgagttatttatgtttggtatagggttaatttttagtgtatatttgtaaaggaattaatgaatgaatgaatgaagtgataaatgaataaaggaataaatgaatgaggtatttattatgtattaggttttcgttattacgttttatttatttttttgaggtagggtttattttatttttgttatagatggggaaattaaggtttagggaggagtaaagttttttttaagtatgtatttatttagaatttgagttttgaatgttttttatttagtttagtttaagagcggggtttagtgatgtttattttttaaggttttagagaaagggggtaggtttatatgttagtttgggggtggtaaagttaggtaagttttttttatgggttttttgaaattttgaaagtgaattttagttttgtatgaaagtgagttttttatagtttaaggtatttaagtataatacggttttgagtgttgaagtaggttgtgtaggtttggatagtgatatgttttttttgagttttaatttttttatttgttaatagtagatagtgatagttgtgattaggggattatagtgtatggggatgggtgggtgtatggggatggaggggtatttgggagtttttttcgatattattttttgtagttatttagatagtttgttttggtttgtttgttttagtttagggttgaaagggtgcgggttttgttcgtttttaggtttggaggcggagtcgcggtgattcgggagtttaataaatttgtaatttataattacgagttgttttcgtaagttttaaggcgatttttagttgttagcgttgagtatagcgtttagggagagggatagatagtcggttgtatgggatagcggaatttagagtgagaggggaggtggtaggatagatagatagtaggggcggacgtagagatagatagcggggatagggaggtcgatacggatatcgatagtttatagatttttaatttagggagtttcggtttttttcgtcgttttttattttagacggagcggggataggttgtcgagtatttttttattcgtttttttcgttttgttttttcggtttttgttagtttttttcgtttgagtacgtagggcgttcgaggacgcgttgggttttcgtattcgtttttatggaggtcgtggagatcggggaacggtttattttcggagtttgggattacggggtttttgtttttatgtttttggtgtttattggtatcgggttgtgggtcgggttggttcggggcgggtagcgtagcgttgaggatttttttatcgggggtcggcgtttggcggttttgttcgtgggtttgtcgttgtttgttagttttatgtcggtcgtgtaggtgttgggcgtgtcgtcggaggtttatcgttatggttttaagtttttttggatgtgtttgggttagtttttgaattcggtttttatcgttttgttttttatgttcgttttttatcgtttgggttttattagtatttacgaggtatcggatagaggttcgggggtaggatttgttttattggtagtgttgggatttcgtgtgggggaggcgttggggttttgggtcgttgtataggaggacgcggatggtatttcggtgttttaacggaaggggtttttaggtagatacgtggggagggttttaggaagaggttttaggcgttcggcgaggggtaggaaggaggaagagagagtttggcgttttgttttttcggtggaagcgcgcgcggggcggggttcggttcgattaggtgtgtttttacgggtggatatatatttgttttttatttgttcgggcgtgtagatttacgtgtgcgcgttagaggggattgttgacggtttcggggttcgaaatttggttttattgtttttttgtattttgggtaaggggcgtgtttttttgtttgggttttttagttgtttaatgggcgaattataggatttttttttaggggagagggtaaagcgattaaaatcgtgatcggggttcggtgcggtggtttacgtttgtaattttagtattttgggaggttaaagtatgtagattatttgaggttaggagtttaagattagtttggttaatatggcgaaatttcgtttttattaaaaatataaaaattagtcggatgtggtggtgggtatttgtaattttagttatttgggaggttaagataggagaattgtttgaattcgggaggttgtagtgagtcgatatcgcgttattgtattttagtttgggcgatagagcgagatttttgttttaaaggaaaaaaaaatattgtggtagggcgtagtggtttacgtttgtaattttagtattttgggaggtcgaggtgggtggattacgaggttaggagtttaagattagtttggttaatatggtgaaatttcgtttttattaaaaatataaaaattagtcgggtatggtcgcgcgcgtttgtaattttagttatttaggaggttgaggtagaagaattgtttgaatttgggaggcggaggttgtagtgagtcgagatcgtgttagtgtattttagtttgggcgatagagcgagatttcgtttttttttttttttaaaaaaatcgtgataggtatattttaggcggttaatattattggttcggggtattgtttatattgtgcgtttgcgggttacgtcggtgtttgttgagcggtggttgttttaggagttcgcgttcgttaggcgtaagtgggagggcgcgtgtatacgtatggattagttttttaggtttacggggtacgtataggtacgggatggtatttgtgtacgggtgtgtgcgtgcggcggggtttttacgtgtaagaatttggcgggcgcggttggttttcggagggaggggtttatttagagagtagattagggattcgagaggtttcggtttttgggtaaggattgtttaggtgatttcgagtttttttttgtagt

SEQ ID NO: 1690 - DNA, 7166 bp, Artificial Sequence
  chemically treated genomic DNA (Homo sapiens)
attgtaaggagggattcgaggttatttggatagtttttatttaggagtcgaggtttttcgggtttttggtttgttttttaggtgggttttttttttcggaagttaatcgcgttcgttagatttttgtacgtgggggtttcgtcgtacgtatatattcgtgtataggtgttatttcgtgtttgtgcgtatttcgtggatttggaggattggtttatgcgtgtgtacgcgtttttttatttgcgtttgacgggcgcgggtttttggagtagttatcgtttagtagatatcgacgtggttcgtaagcgtatagtgtagatagtgtttcgggttaatggtgttggtcgtttaggatatatttgttacgatttttttgggggggaggggggacggagtttcgttttgtcgtttaggttagggtgtattggtacgatttcggtttattgtaattttcgttttttaggtttaagtaatttttttgttttagttttttgagtagttgggattataggcgcgcgcgattatgttcggttaatttttgtatttttagtaaagacggggttttattatgttagttaggttggttttgaatttttgatttcgtgatttatttatttcggttttttaaagtgttgggattataggcgtgagttattgcgttttgttataatattttttttttttttgagataagagtttcgttttgtcgtttaggttggagtgtagtgacgcgatatcggtttattgtaatttttcgggtttaagtaatttttttgttttagttttttaagtagttgggattataggtgtttattattatattcggttaatttttgtatttttagtagagacggggtttcgttatgttggttaggttggttttgaatttttgattttaggtgatttgtatgttttggttttttaaagtgttgggattataggcgtgagttatcgtatcgggtttcggttacgattttaatcgttttatttttttttttggagggaggttttgtaattcgtttattggatagttgggaaatttaaatagagaggtacgttttttgtttaagatataagaaagtagtgaagttaggtttcgaatttcggagtcgttagtagttttttttagcgcgtatacgtgggtttgtacgttcgggtaggtggggggtaggtgtgtgtttattcgtgaggatatatttggtcgagtcgggtttcgtttcgcgcgcgtttttatcgaaggagtaggacgttaggtttttttttttttttttttgtttttcgtcgggcgtttggggtttttttttagaattttttttacgtgtttgtttaggggtttttttcgttaaagtatcgaggtgttattcgcgtttttttgtatagcggtttaaagttttagcgttttttttatacggggttttagtattgttagtggggtaggttttattttcgggtttttgttcggtatttcgtaggtgttggtgaggtttaggcggtagaagacgggtatgaagagtagggcggtgaggatcgagtttagaagttggtttaggtatatttagaggaatttgaggttatagcgataggttttcgacggtacgtttagtatttgtacggtcgatatgaagttggtagatagcgataggtttacgggtagggtcgttaggcgtcggttttcggtgaagaagtttttagcgttgcgttgttcgtttcgagttagttcgatttatagttcgatgttagtggatattaggagtatgagggtaaagatttcgtagttttaggtttcgaaggtgggtcgtttttcggtttttacggtttttatgagggcgggtgcggaggtttagcgcgttttcggacgttttgcgtgtttaagcgggggaagttggtaggggtcgaggaggtaggacggggagggcgggtgggaggatgttcggtagtttgttttcgtttcgtttggggtgggaagcggcgagaggggtcggggttttttgggttaggaatttatgggttgtcgatgttcgtgtcggtttttttgttttcgttgtttgtttttgcgttcgtttttgttgtttgtttgttttgttatttttttttttattttgggtttcgttgttttatgtagtcggttgtttgtttttttttttgggcgttgtgtttagcgttgatagttggaggtcgttttggggtttacgggagtagttcgtgattgtgggttgtagatttattgggttttcgggttatcgcgatttcgtttttagatttaggggcgggtaggattcgtatttttttagttttggattgggatagataggttaggataggttatttgggtggttgtagggggtggtatcggggagggtttttaaatgtttttttatttttatgtatttatttatttttatgtattgtgattttttgattatagttgttattgtttgttgttgataggtggggaaattgaggtttagagagggtatgttattatttaagtttgtatagtttgttttagtatttaaagtcgtattgtgtttgaatattttgagttatggggagtttatttttatgtaggattggggtttatttttagggttttaggggatttataaagaaaatttatttggttttattatttttaaattggtatgtgggtttattttttttttttagagttttagggggtgggtattattgaatttcgtttttgggttaagttgggtgggagatatttagagtttaagttttgagtgggtatatatttggggaagattttgtttttttttgggttttagtttttttatttgtaataaggataaaatagattttgttttagaggaataaatgggacgtggtaacgaaagtttggtatatgataagtgttttatttatttatttttttatttatttgttattttatttatttatttattggtttttttgtagatatgtattgagagttggttttgtgttaggtataaatggtttattgaggtggtgcgaggggtttttaaggttatgaattcgaataagcggagattatgattattagggaggtagagtttggtttgtttttattatatagatgaggaaattaaggttgggtgtgggagaaagtttattgggggggttacgtttttatgaggattaacgagttgttattttagggtttttttttgggggatttaggaggattttgatttttggaggttttggtttttgggtttaagttttagtttagtttttaattttttgggtaattacgtattttaaatttggtttttttttttataagttggtggaatttgaaattttgggggttgaaagaaatagcgttagaggtcgggtatgatggtttatgtttgtaattttagtattttgggaggttgaagtgggaggattatttgagttttagaattcgagattattttgagtaatatagtgagattttgtttgtatgaaaaatataaatattagcgaggcgtggtggtatatgtttgtaattttagttatttaggaggttgaagtgggaggatcgtttgagcgtggaagttcgaggttgtaatgagttgtggtcgagaattgtatagtattttagtttgggtagtatagtaagatttcgtttttaaaaaaaaaaaaaaaaaaaaaaaaagggtttttgagcgtttttcgttagtttttgttgttttttggtggttttttttggtttattttttgttttggtcgttttagttgggtttagcgttttttaacgcgtttttacgtaattttcggatagtttttttgttttttttttgttgtgtagggtggatttgtttttttttcggggttgtgatattgcggcggttacgcgggtatttgttgtcggttggagcgtattttttgttttcgttaggagagtgggttaggtatttagttttttttttttttattttggttaggtatttttttggaaatttcgttggaaaaggggagattcggtcgggtgcggtgttttatttttgtaattttagtattttggggggtcgaggcggacgggttttttgagattcgtttaagattagtttggttaatatggtgaaatttcgtttttattaaaaatataagaattagtcgggcgtggtggcggtcgtttgtaattttagttatttgggaggttgaggcgggagaatcgtttgagttcgggaggtggaggttgtagtgagtcgagatcgcgttattttattttagtttgggcgatagagagagatttcgttttaaaaaataaataaataaataaataaataaataaaaattaaggttgggcgcggtggtttacgtttgtaattttagtattttggggggtcgacgcgggcggattacgaggttaggaaatcgagattatttaggttaacgtggtgaaatttcgtttttattaaaaatataaaaattagtcgggcgtgatggtacgcgtttgtagttttagttattcgggagattgaggtaggagaatcgtttgaattcgggaggcggaggttgtagtgagtcgagatcgtgttattgtattttagtttggcgatagagcgagattgttttaattaattaattaattaattaatgggagattcgagcgggattttttatttgtaaagttttgtcgattaatgtaaatatatgtaaattgtgtaaatatatgtaaatggattttttttttttagggaagttttgggaaggtatagttttttttttttttatcgtggggtttaggttgcggttagaggtttgggttgaggtcggtttattgagtgtatattgtgtgtagggtttttcggtaggtgttggggatatagtatgatttaggtggatttattttagggtggtgatggttttgattttattagtagataaatattgattttagttgggtattgtggtttatatttataattttagtattttgggaggttgaggtgggaggatcgttagagttcgggaggttaaggttgtagtgagtagtgattatattagtgaattttagtttggatataggttgagtagagatagataattacggggtattttttgggttttcggaaggggtgtggattttgttttgagggtgttggggaattgtaggagagtttggagtaggtgaggagtttgatgagatttttagattttgaaaaatgggttatatttaagtggcgggagtggggtggttgtcgagtggggggaggggggtggatttggaaagtattttggaatttttaaggaggtttggagtgaaggtttttgtagagtgtgtaggattattttttgttttagcggagggaattgtgagtttggagaggaaaagtagtagagtggggagaattaggttatattttttttgattgtgattttaatgatagaagcgggtagtaggattttaggatgtgagttaggaagggtttaaggtcgcggtagataatgtgagtagaatgtgtaggaatgggagagtggtggtagtgtcggggcgttgttttttgttttttggttttttgggagatgtagtaggggttggggtgagaagttgtgagttgttgtgattgtagtacgatttgttgggtggttttggatattaattttttttttgtgagttaggagtgatagtgggatttgaatttacgttatggggagttagaatttgtttttgaattttaattttgtatttaataagtgtaaaaaggttagtttcggtggtttatgtttgtaattttagtattttgggaggttaagttaggaagatggttggaggttaggagttggagattagtttgaataatatagtgagattttaattttataattttgtttgtttgtttgtttgttgtatttttagtagagaaggggttttattatgttggttaggttggtttcgaatttttgattttatatgatttatttatttttgttttttaaagtgttaggattataggtgtgagttattatgtttagttaaaaatttttaaaagttagtcgagtttggtggtgtgtatttgtggttttagttatttaggaggttgaagtagaaggattggttgagttggggaggttgaggttgtagtgagcggtgattgcgttattgtattttagtttgggcgatagaagaagattttgtttttaaaaaaataaataaatgtaaattatttttttttgttgttgttgttgtttgtaagattttataattcgattgggtacggtgtttacgtttgtaattttaatatttttggaggtttaggtaggtggattatttgaagttaggagtttaagtttattttggttaatatgaagaaatttcgtgtttattaaaaatataaaaaattagttaggtatggtggtaggtatgtgtaattttagttattcgggaggttgaagtaggagaatcgtttgaatttaagaggtagaggttgtagtaagttaagattatgttattgtattttaatttgggtagtaagagtgaaattttattttaaaaaaaaaaaaaaaaaaaaaaagattttataattttaagttttgagatttaattgtgagttttagattttgtgatttttatatagttttttttggttgtaggaattggggttggggttttttggggtttttattcgtttgttttgttttggtattgtttttgtttttattggttttgatttaggagtagaagtgtagggcgggttagggaggggaggttttgaatgtcgtttttttagggattacggttttattgaggtgatatttggtattttgataagtttaggaacgagatttaggagcgttttagtatttgaggaggtgggaggagtttttggatttttgtttttgtttatttttgggttaattgggtgagttcgggtaggatttgttttgttttagattttagcggatatttaggttttcgttggttagtttttgttttattggttttatttatagttacgtgaaaggatttatttttgtttagatttagggtttttgttttggttggttttgtatttttttttaatagttaggggtagttttttttgtttgtttattttttttatttgtttttttgagataggggttcgttttgttgtttaggttggagtgtagtggagaggttacggtttattgtaattttaattttttgggtttaagtgatttttttgttttag

SEQ ID NO: 1691 - DNA, 17934 bp, Artificial Sequence
  chemically treated genomic DNA (Homo sapiens)
atgtttattgttttttgattaagatagaaagatagaatgaaaaggaagaaggaaggaaggaagggagggagggagggaaaaaagaggaaggaaagaaattagggagagaaagaaggaaaggaaggaaggaaggtgggaaaggagagagaaagaaagggattaagggagaaagaaaaaaggaaggaaggaaagaaaagagaaagaaaaagaaagaaagaaaaaagaaaagaaaagaaagaaggaagggagggagggagggaggaagaggaaggaaagaagtgagggagggaaagaagtaaaggaaggaaggtaggaaaggagagagaaagaaagggaggaaaggagaaagaaaaaaggaagaaagaaaagagaaagagaaagaaaagaaagaaggaaggaaggaaggaaagaaaagagggatggaggaaataaatatgtaggtaaatttttttttttttttttttttagtttttttattggtgttatggaggtgtaggttttgatagcgtttttagcggatataggtttttggattttaaatgtgttttagtttagttgttgtgtgttagggttttagtgtttgtggggagatggttagagatggatttatagtattagttattgttttttattttatggtttgtgttattaagtgttatggtaagtggaagtgatggttttttagagattatattagttttgataatgttttagttttttatgtataatttgtttttaggttatttggttgggtaggaagaagggtttttagagaagttatatggttttatggcggtgagtttgggcgagagatggagagagacgtttttttttttagtttagttttagtttagtgtttttattgttgattttcggtagtttttgaaattatagatggagtttttagatttgttgattggttttcgtgatggcgtgcgtattaggaggaaatgtttttttttatttttgtagtaaatatttttagttttatgtttatattttttattatttattgtttttgttagtgtagatttaatttaatggttttttgttgttagtatttggggttttgttgttagtttttttttggtagtaggataggtttattttttttattagataggttggatttgttgggaagttgatattttgggggcggtttttatggataaatattttagtttttttgttttttaagtgagataattttaaggcgtgttttgtgtagtttttcgaggtttttattagggttgagtattagtttttttagtagtaagtgttttttaatttatttttttttggtttttttttttttgttgttttattttttttttttttaacgattgtttttaggattattttttaaataaattatttgtattttaatttttgtttttagttgttttttgaggaatttaatataaaacgaaattaattaaagatattaaatttaataaaagaaagagaatttttttggttttgtattgtatatgtttttggagtattatttaagtaatagaatatattacgtattgtttttgacgttggtagggaggttttataaataattgtataggtaaataaatagtagtataaaagaggagtttgattttgttgtaggaggtggttattagggaaggttttatagtgagggtgattggaggttttggaggatgggtaggagttttttaggtagaaaaaagaatgatggaaatagtatattaaaaaatttagaagtgtaaaaaagtataaggtatttagggaattattagtagtttagtattttttatattattggagaataaagtatattttggaagtgataaaggatttgtaggaaaaatgaggagagaattagaatagtaggaggtgtggttaaatagttagagttttgtttatattttttaaagtgtttaggtattattttggaaaggttggaggattttttaaaattgtgggttatttttttttgattgtataaatattaaatgtttattgtggaaaagttggtatatatagagaagtatagagaagaaaataaaattattttaaatttagagttaattaaattatatttatgtgttggtgtgttttagaggagttttaggtagaggagtgaggtggtcgtatttgagttttaggtagagttttggtagttggtgacgattatgtagttggaaagatattgaacgtggggtgattagttaggaggttgttgtagtgaggggtgatgagggttttttgttgtggttttgtagggtgttttagaggtgggatttttagtatttgaaaattagttggatggggtgtggggtagaggagagaaggggattatgattattagagagattttgagtgtttttattatgatttggtggagggagtagaggttggaggttaggagatttgggtttttatttttattttgtgatttttaatttgtgggattttggataagtttttttagtttatagagttatagttttttgatttgatacgtggaaagatgattttttttttgttttttttataggattgttatgatcgtttaatagattaaaggagataaatattttttatgtgtggaaatttatagttttgagtttttgtttttaaatttttgtttaatttttttttttatttgttttttgttattttttttagaagttaggggaatttatatttttttaggttttttttttttttttttttgtattttgtttagaggatatttgttatgattgtttttttggtatagatgttttaaatatcgttatatattattatttttttatttattaatttatttattttataggttggttgatgttttagtacgttttaggtgttagaatacgtgttgtaaaagatagataaggtttttgtgtttatggagtttatatattatttaaggggggatataaaattaaataattaggataaattcggatagcgatgtaataaatgaataaatagggtgataggatagagtgagcgtgtattttcgatttgagtcgtcgggaagggatttttggattgagatttgaataatttaggtagagaaaatagtaagtgtaaaggttttggggtgggtttgagtttaggatgtttatagaatggaaaggttagtgtggttgggttgatttaagttttatttaatttatttagtacggttatttttttgaagtttttttggattaataggatgttttttttgttgatttagttttattttatttttatatatttgtggttataatatattttgattatattgggttgtgatagattttatatattggtttgggagttttttgaaggtaggggttattttttttttagttagtattgtttacgtatatagtagatgattagtatttgttaaagggattaatatattaattaatagatgagtgaatgaatgagaaaacgatttttaggtttaaatggtttatttttttatttgtttaattgttatttttttaaattttttgatttcgtatgtaaattgtagttttattgtttttcgatttttttatttattatataacgtgtgtatttattatgtttttcgttttttttgttttcgttagtagaatgtaaattttatgaggttaggaattttcgagttatgttgcgttagtgtaatttaagagttcggaatagtgtttggtatatagcgggtatatggaagaataaatgtgtgaaggtgtgaatgaatgaataattgaaagaataaatagtagtttttagttttatagaatacgggttataattttaaatgatttgttattttgtttataaataatagagatgtaggagtaagtgttgggttgtgatttgttaatatgttaagtcgtttaaataaaattgtttaatagttcgttggtcgtttatttgtagtattgggttttgagtcgtatatttttatttcgttgataaagaaattgattagatagtttaagtggtttgttgcggaagatagggttggtgttgtatcggtcgttgtttttttagtttttttttggttttttttttgacgcgacgtagattttagttttggagagtttgttattcgtttttcgtggtgggagattagaggtttggtgtttttgggagcggcgagcggtgttcggcgtaggatagaaagggagtgcgcgttcgagttttttagatttttgggaattcgcgttattttttcgtttttgtttattttcggtcgcgttgttagtttttattagcgttaataggttttagacggagcgggtcgggcgttgggttaatgtaatcggcgcgttatttggggcgtaggttatattattagttcggttttcgttaggtacggttagaattagttagttcgcgttttgtcggtcgtttcgcgtttttagttttttttcgggtttcgttcgaacgttatacggcggagtttagttttagttcgcgttttagagtttgttaaggcgtcgtcggtcgggggtcggtagggcgtaaggtattagggattttttcgtcgtcggatacgtgagtgcgttttgagcgcgggatagggttaggtttgtttgggaggttcgggtcgagacgcgttagtagagggttagcgagtttgtagtgtagtgacgttaagtgttcgagaaggtttttgtggttgttgaagtgtcgcggatttgagttggggagggggtcggtacgttgtttttagtttcggtgagtttaattttagttatttggggtaggcgagagtgggtgaacgaggaaaagtgttgtagggtttttagtcgtttttagagggttgttagaagtttttaatttttgagtttcggcgtgttttaatttttgtttttaaatttttttagcggacgcgcgtttttttttgggaattttgcgttcgtttagcgcgcgtttattttagtgtttaaggcgttttcgggtggttttgggagttgtaagtagggaggaacggtcgggtaattattttttttttttttatttaagtagagtttcggcgtgtttttaggatcggtaaagtttttttcgttagtcgtatttatgtttttggcgcggatgaattcgtaggtgtagttcgagaataacggggcggatacgggtttagagtagttttttcgggcgcgtaaaattgcggagttgttggtggtgaaggagcgtaacggcgtttagtgtttgttggcgtttcgcgacggcgacgcgtagtttcgggagatttggggtaagaagatcgattttttgttgttcgtagtcggtttcgtagtggatttggttaacgtgtggcgttttttttatttttgttataagaacggcggcggtgagcgtggggtcgggttgggaatttgaatttgggaggtttattgtttgtagcggtggttgggataggagttggaatatatacggaagggaggcgaggagataggggtaaatttggggcgtagaaagaattggatagggttaacgggaaaaaaaaaagattggagttttttggaaggttatttttttaggttttttgtagagtatttcgagtttattttagcggaagtgttaggattgggtattttggaagtaaaatagtagaagagtgaaatcgagttatgattttaaagttatggtaggggtatggatggaaaggatagaatttggggtgttaggttgggtgggggagtttgattttttgatggtttgttggaagggaggtggagattttaagagtttttgaaggggtattagaagtgggtgggatttgataattaggtttatagtgattttaaatttagtattttgagtttgggggtaggaatttttgggttagaagtagtgggaatatttcggttttttgaaggtatttggggaggttttgtggttttggggatagaaatatataagaagaagttagtattagaaataatgttatttttagggagtatagtttaggtggaattaggttagtaggtgttaagaattggtttggtttttaaggtaggaggtttagatgattggggtgaaatttttatttttttaagttttagtcgtattgtagggaggagtgggagaggggtttgaagaagattttagtggaatagttatatttttttttttttttgttggatggtttaattggttatttgtttgaaaatgagagtttagagattatttatagttaatttaggaagaataatatagaatttcgggttagggaagcggtttggaagttagggtgttggtttttattttttagtttttttttgaggggttttgtttttgcggtgtttagttttgttatttttgttgggatgagtttagaggtattttgtaaagagtgtgggaaaatagattttttgaggaagaaattggagaagggggatttagttttgaaagtttttttttttttattgggttgtattgtttggcggtagttgtgattttggatttaagggaggttagagggaggaagggtaagaatttggagttgggtagagggaaagtttatgatttgtttataggttttaggatttataattttgtttttatgtgtattttggatatttgttttgggacgggtaatatttggtgtttgtaaaaaaggagtggggtcgggtatggtggtttatgtttataattttagtattttggaaggataaagtgggtagattgtttgagtttaggagttcgagattagtttgggtaatatggtgagatttcgtttttattaaaaatataaaaatttagttgggcgtagtggtgtacgtttgtaattttagttacgtaggaggttgaggtaggagaattatttgaattcgggatgtggaggttgtagtgagttaagattacgttattgtattttagtttggattatgggtgatagagtaagattttgttttaaaaaaaaaaggagtgggattattatagagtataggtggttttgagtagaggattttgagtaagaaagtagttagtttttttaacgagaaagttaatttaaggttggagttgatagatggaggtttgcgtttatggtttttttgatattttttgagatgggtttgttattgttagatattttgagattagatagttgggatagtagttttgagttttaggggtatttgaggtttggggtttgattcgtggggaaataatttgtgattttgcgggtttaatgtttgtgtttggttttgggatggttatgggtagagagagaaaggtgagaaaaggagaagttaatttagaggtgaaatttttttatttttggcggttgtagttttttaggcgttattgggtaggtttaagtatggttgtttgggtttaggaagggagaaaatgtagattttttgtattttttaagaggtagggagatgatgaatgagagattttaagattcgttatttcgtttgtttttagtgatcgttttagattgtttgtttttagatagtggaaggttttgttattaattagtaatatttttttggttttttttggcgtgaggtataatgttaggttttgtaggggttacggttattaagaggtatgaattattatttttgtttgttaggagttttaattattcgagtttttattgttatgttgttagaagttttttttattgttttatgtgtttgttgaaattaaaagtatttagatggttaatttgataagttagttagatggatattttagggtttttattgatattgtgtgttttttagttattgttagtaaaataaagagtatttgttgtatgtagtgtattataaattaggtttttaggatgtaaaatggagtaaatttgttacgagttttagtttttaggtgaagttgatcgagggtattttttttcgggtttgttattttaaaatatagtttattttaagttgtttggtggtttgtttttttgtgggtttgttttttaaataggaaaaggtataatgagggtagagattgtgattttttaatttttgtgtttttaatgtttaagataagttttagattataggaatgtggtagaaggtgtttaagaaattgttgttgaataagttaatgaaatgttttaagtttttaaagatttttaatcgtatttagaaataataatagaaatatttagtggtaattaataaagtgaagttatatataatagtggggtaggggtagtttatttattagtggttttagttgtggagttttgggttttagtttttagttgtaaggttttggtaagtttttaagttttagtttttttatttgttaaatggaaataatggtgtttagtttagaatattgttgtggggattaaatataataatttatcgagagtttggtatggattgtggttttaggaaaggtggttgttgattttgttaatgttattatgatgatgtatgaaatggatggagagataagtgttttagataaatgttttaaaggtttgaggaagggttgtttaggaagggttgggaggaggtgggttgtggttgaagtttagttgttttggatggggaaggtgtagataagcggtgagaagggaggagatttttagttgtgtatttggggtaggaatgtatatggaattattttagagaataggagtgtaggttggttgtagggtaagttaggagagataagggtgtaggggtaagttggggttaggttgtagaggttttgaaagttaggttaaggggtggggatattatattagtgaatttttttttttggttaggatgtttatagttggtgttagggagtagtgtagttttttattttagattatgaggtaatttttttttttatttattttttatttttttagatatgtttagttagttttttttgggttttatttttgcggaggttttttggtttttttgtttttttgtggattaatttttatttagtaatttttaaattagttttagagatgagagtgagtggttaggaaggtgggtttttgtagttgtagaagtagtcgtttaagattggagtttgagtttgagttttgttttttattgtgtgatttcgggtatagtatagtttttttttgagttttaagtttttagttataggtgaatatgatttgagataatattataagatttatttttttttaatgttttggtttagggttatattgaagttaggatttatttagtttgttatttaatagtttttagtgtgtttttttggtgttagtattaatattgtaatttttgtaattttgattgtttatgttggtttagaatggaggatattttgaaatgatgaaggtggtaatggtttaggtttttggttaatgttttttgaatgaattattggaaaagattagtttgtttgaatattttttttatggttagttgttgggatgtacgggttgtaggaggttttgggaggggaaagttatttttagaaatttcggagttttgtttagaatttttttaaatagttggtttttatgaggaggtagtattaggtagtgattttagagtttttttttgtatttgtgattttggtttgtgttgatttttggggaagagtaggaagattgattgggtgtttatttttgttttttttttagggaagtggttattgtgaattaatttttgtatatggttgtttttgtttgagttttgttttgaggttagtttagagttgtgtattgtagagaaatatagtttttaggtttagggtttgagtttaatttttgttagaaaggtaacgatagataaattatttatttttgttgatttgagttttagtttttttatatagaagaggagaataattatagtatttttttgtagggtgagatggtattagagataatatatgtaaattttttgaaatgatgttatataataggggttttataaatgtagttattagtattttgttattgtttaatgatattaattgtatgttagatttaggagtggggtaggattttgattttggaagtagtagaatttattttaagatgaaattgataaaaggaaataaggttggaaaatagttttatttgggtttggagtttaagtatgatagatttaggaattaggggatgggttttgttttattttttaatagtttaattttattttaaaatagatttattatttggtaaatggggtttataatttttgtatggggttttatgattttttgtgattttgcgtttttagcggatttttttttttttttaaggaagtttagagttttagggatttttagttttttgggagtttttgtggttaaaatatttgggatttttaatattgagtatgaagtagtagttgttatagaggttaggagtttgtaaatttagtgtttttatatttggtttggttgtagggggttatttatattttgggtttgttaagttagatattgattgttagtttagatgtataatgagttagttagttggtgtggtatttagttgataagtttgtatattttttggtagaaatgtggtgtttatttgggattttgatttgaggttattggtatggtttggtttgttattttaagtttgttaaaaggatttgaaaggggttgtttttgataagattgggatttaatagggataaatgttatattttgttttgtagttttaaatttaattgtttaagtaaggattaggttatagtataagtggagaaaggttttagggtttttattagttgtattttttatgtgagttattgttgagatttattatttagttaaaaaaaatttattaaatgtttattatatgttaggaatatggagatgagtaaaagaaaatttttgtttttaaggggtttatgatatgttgtagatttcgtaaaagtttgttatttttgattttaatattggaggtattaattttaaatgggggaggtgaggttttgttttgttatttgtgggttatatttttttttgtgatgtagttttgagtaattttttgatgtgttttttttaaagagattaagatggaggaaatggaaattagaatttttatagagattttattaaagttatagttttattaggaaaaattaagtttagattttttaaagtgacgagtagatggagaattattatatgaggaggggtagttcggcgttagtttttttgaattttatttttatttttttatttagagtagttgggtttaatttattaggggagtgggtgtgtttttttagtgggtttgtttttaggttttttatttagtaataataattaatatagaagacgtttgtgattatatgtttgggggttttttttagtatattaggtaagtaattaagtttgtagtagatattagttgagtgttttcgatttaatttaattttggtgttgtttatttggagatagtattagattttataggttgaggtatttttataagaatgttttttattttgtgtttttataatgagttttaggttgttttattgtgtttttgatttattgtttataaattagggttttttttattttttgtttgggtttgattaatttgttagagtggtttatagaatttagaggaatattttattatattttttgttatggtttagatatggtttgtttgtttttattaaaatttttgttgaagtttgaattttagtgtgggagtgttgggaggaggggtttagtgagaggtgtttgggttatgagagtggattttttataaatggattaatgttttttggagagggtaagtgagtttttacgttatttttttggttttttttttgttatgtgatttttgtatttttgattttttttttttttttgttatgagtggaagtagttagaggtttttattagatatagttgtttaattttgaattttttagttattagaattatgagatatataaattttttttttttatagattttttagttttaggtattttgttatagtaatgttaaatagattaaggtatttttttatttttattttgggtttttttagttgaggttttattatagttttgtgtattattatgaaatttatttgtttatttatttatttatttgtttatttattgttttattgtttttggtttaaaatattaatagtttttgttgtaatattggggtacgttaggttttagaaaatagaatttttttttttttgatttttttttgttttttttttatttgtttttttatttttttaaggtaggatttttttttggttttttttttttggagttggtagtaataaaattttttgatttattttttaattgtgagttataaaatttttattttagaaggagttttgttttaggttttgggggaaggaatgttgtatagggagatcgagaagaatttgaatagataggttttgttgggtttttttatttagtttattagtattatattatattttatttaattatggtggttaaatatgtttatttaatgatatttttatagaaggtttaagaggatagggtttaggagttttaggagaggtaaatatatggaggtttttgagtaggaaatgtttgaggggttattttagttttagaatttttttagggttagttaaggtttggtttggcgtattttgtttttcgttttggtcggtgtttttattttttaaatttttttattgtatgtattttttttttattatttttatgttattttttatgtagtattatagggtattttttttaggtaatggggttggttgtggtttgggggtattttttgttttgtatttgtttatggttagtatttttgtttgtatataagagtagagtagttagttttatttgggatagggatttggggattttagagtattgtcgtagagttttgtgtgtggtttttagttggcgtttatgttgtgttttataaagggtttagttattttttattatataagatagtttttattttttgtttttagtggatagagttgttgtatatttgtttttgagtataatgataagatatgagttttatttacggagtatttattaagtgtttggtattttatttttgttatttttgattattatagtaaattagtgatataggtattattatcgtatttataaagggggagttaaggtttagagaaggtatatttagataagttatatagttatatatagtagggttgagggataggattatttttaggtttaggtatgaaggtttgttttatttttatgttttagagagtataattttgttttttttttattttatgggagttaagtgtgtttgtttatttagtatattttttatacgaatattttattattttttaatattcggacggtggaattttttgtttaaatagttttaggtatttttttgggtttatatgaatattttgttgggtttttttttttgtggtgtgggttgtgttgcgggaggtgggggtgtttgtaaggcgggtggatatagtttggatatttatgtgtaagagttttgatatggttagattgagttgggaggaagtaggggtagggtaaacgggtttttttttgtatttttatattttagtttggagttttaagagttgagaattttaattttgaattttataatagaattattataaaggtttttttgttaaagtaggaagatagaatatgttttatttaatagttgttgatttgttatttttaaatgtgtcgaagtgtgagtagttttgttttttgattaaagttttatttttttttgatgtttattgtgttgttagggtatttttggggtgttggggaagggggataaatttagtttttttaagtgtggattaaggtttttttgggggttttggtgtatgatattagtagcgatagtttgtagttgagttgtgtgtattaagggaattattttgtggattggtattttttgtatatattaaggtgtggttagaatttatagttcgaggaattttgtttttaataaattaggtgttaggggagttttttttttttttgaagtttttttttgattatattatttttatttttttcgagatttttagtaggttttggttattgtattttttattgaattttttttttaggttttttagttttttatttggggttttttttatttgttgggggttgttttagtatattttattttaaatttaatgatttcgggtttttttttttgggtatttggtatttgtatagaggtttttagagtttttttgtatttagaagagtttttttttaatagtgggatgggaggtagtgtggttgggttagaggtgatgggattaatgttttttttattaaatttatttaaaggttattgtttagagttttttttatggtcgatagtttttttttttatgtggttgtgtgagtgcgttgatatgtaaaagtgtgtgtttattttgtatgagtatgtataggtgtgtatttgtgtgtatgtatatggtttttggagatttttaggtattgggtattgagttttttatgaggtatgttttgtttgtgtttttttaggtttgtttttattagtttagtatttatgtagttagggtattttaagataagattttggttttgtagttttgagattttcggattttgtgtgaggttggttgtagttggtattgttatatatggagatggagtaggattatataagtatggtagttataagttttgtagagtagtattttttagggggtttgtaacgagtttcggtttttagagaattattgtagagttgtttataaaagaggtaattttagttgattttatttatttttggagtttttttttgattttttaatttgaagagtttatttttgtaagaggagaaggaaatttttttaggtttttttttgtaagagtttttgggtaagttagttgtttttttttagaataaggtattggttacgggtagttggttgtttttttatttttatttagttattttattattttttggtttttttaatttgtttttatttgaatgaagttttggttggtttatattaaatgtatttatagagaagagtcgtaggtatatgtagatttattatttttttttttttttttatgttattgtgttttttagttagtagaggaagaataattttaaattgggtagtttatttatgtgttggtagtgttatttagaggtttagagttgaggaaattggttaaagtgagatgtttggttaattggttgatgttgtttttttttttttttggttatgtagtagagtattgagtcgttgggggtaatttatagtggcgaggtcggagtagcgatttttagttttttttttttttacgtttttttgggttattgatttttatttttaggtttattaaagattttttgtttatttgtttgttttgtttttttttttttttttttttttttttaaatttttttttttgagttagtattttattttgttatttaggttgtagggtagtggtatgattatagtttattgagttttaaattttgatgtttaggttgtttttgagtttttgggtttaagtaagttttttgttttggtttttttaagtgttgggattataggtatgagttattgtgtttggttttattaaatagtttaatatagttatttaattgttttttgttttggttttagatttttaaggggagtagtagttggttataaggtagagtggggttgcgttagatttaggtttgaagttaagttttatatttgttagttggataagtaatttaatttttttaagttttagtttttttatttgtaaaagggattgtggtaatttttttttaggggtggttttaaataaataattatgtaaaaatttgtgtgtagtttggtatataataggtgtttaataaacggtatttgttatttttattaattttattgtttatttttatttatattagtatattagtattattattattgttagtaatgtgtatagggatatgggttaggtggtaaattagttttttttatgtgggagagggagaaaggaagagaatgaaaggaagaaatgaggaaggggagaaatagtatatggttattttagagatttttagtttggagtagtggttgtagtattgggttagtttatgattaatagattatatggtttagttggttttagattttttattttagaataatttattttttgattttatttagatttatgttttttatttaggttggaatgttttagaatttgtggggtatgttggaaatagttttggagtttttgagttaggtagatttggatttaaattttagatttataatttattagtaggataaggtcggttaggttatttaatttttttaatttttagtttttttatttgaaaaatgggtatagtagttgttatgttagagggtttttgggtagtgtaagtgggattaagtttaggttttgtttgatatataggagatgtttattttttagtagttttattttttttttttttttgttttgttttttattattgatttattttttatttataagggattaggttttttagtattagggttaatattttatgttttttatttaggagaggtattttgagaaataagtggagattgatagtttgagtagttgagtgagtttgattttaggtattatgtgattttgttatagttttttgttattttgaaattttagtttttatatttgtaaaatggaaataataatgatttttgatttttgtggtgaggattgaatgaaagtgtttggagtttagaaggggacgagtaagtgtgagttgttggtatttattgttaatattgttaatgttattattgttaaagtattttttgtttttttgatgtgggtaggttagagagtatttggtttttagggttataatattttagttaaaggttagtggtaataggagtttggatttggtttggttatttttagttgtgcgtggaaaggagttggtgtgttgttttgggtatatttgtaagttggggtttatatgatatgtgttttagtgagttatttcgtagagttagaatttattaagtatatttcggattgttagggtgtattgagaattgtttttgtaatttagatacgtttaagtttattaggaatttttttaggaattaattgttgtttggtgtttagggattttattaagtttttgtgatgttttgggtgggtgatttttttggttagagatttgaatttttgtttttttgttttagttatttgtaatagtggggatttagtgggtcgtaaggtcggaatgtgaattcggtttttattatttattagtagtattaaaaggagttattagatttttttttttgttttttagtttgttttgggggtacgtaatgattttgattggttattatgtttgtaggttgttgtgaaattttaagaagaatttagtgagattatgtttgggaaagtaagttatatatatttttatgtgataggatgttagtaaaattagaaatttcgttatgtaaatttaggtattgtttttttttttttggttttaatttttttgtttgtaaaaggaagggtttgggttagattggtatttttagagtgatgatttataaaagaaaaagtttagtgtttaaataaatttggtaaaggttatatttgtgattttttttttggtatattatagtatgtatttgtgtattaaaggttaggagaagtttgtaagaagtaaatttattttgttttgtttaatttagattttattaatttgattatagaattttattattatggttatgattattattattataaatatttttatttttatgataattagtattgattgttgcgcgtcgtttttggaaatagttagttgagtagacgtttaggatttttgtagtttttgtagatacggatttaagattgggaggggtaggggtttgttaggttatattttgtttttgtgttttttagg

SEQ ID NO: 1692 - DNA, 17934 bp, Artificial Sequence
  chemically treated genomic DNA (Homo sapiens)
tttggaggatataggggtagagtgtgatttgatagatttttgttttttttagttttggattcgtgtttgtaagagttgtaaagattttgggcgtttgtttagttggttgtttttaaaggcgacgcgtagtaattaatattaattattataagagtaagaatatttgtggtagtaataattataattataatagtgaggttttgtggttaaattagtaaaatttaggttaagtaaagtaaaataggtttgttttttgtaggttttttttagtttttgatatataagtgtatgttgtgatgtgttaggagggggattataggtgtagtttttattagatttatttaaatattgaatttttttttttatgaattattattttgggaatgttaatttaatttaaatttttttttttataggtaagaaaattgagattagagaaaaagagatagtgtttaaatttatatgacggagtttttaattttgttggtattttattatataggggtatatgtggtttgtttttttaagtatgattttattggattttttttagagttttataatagtttgtaaatataataattagttagggttattacgtatttttagggtaaattgaggggtagagaagggagtttaatggttttttttggtgttgttggtaggtgatggaagtcggatttatatttcggttttgcgatttattaggtttttattgttataggtggttgaagtaaaggggtagaggtttaagtttttgattagggaagttatttatttagaatattatagaaatttgatggggtttttgggtattaggtagtaattaatttttgggagaatttttggtggatttagacgtgtttgagttgtagagataatttttagtatattttggtagttcgggatgtgtttagtggattttgattttgcgaggtgatttattgggatatatgttatatgagttttagtttgtaagtgtgtttaaagtaatatattagtttttttttacgtatagttggaggtggttaggttagatttaaatttttgttattattggtttttagttaaggtgttgtaattttggaaattaaatattttttgatttatttatattaagaaaataggaaatattttaataatggtaatattagtaatattaataatggatattagtagtttatatttgttcgtttttttttgagttttaagtatttttatttaatttttattataaagattaaagattattattatttttattttatagatatggaaattaaggttttaagatagtaaagaattgtggtaaagttatatgatatttagggttaaatttatttagttatttagattattagtttttatttgttttttagggtgttttttttaagtaggaagtatgaagtgttggttttaatgttgagagatttagttttttgtgagtagaagatggattagtggtggggggtagggtagaaagggggaaaaggtaaaattattgggaaatgaatattttttgtgtattaagtaggatttgggtttgattttatttatattatttagaaattttttgatatagtaattgttatatttattttttagatgaggaaattgagggttggagaaattaaatgatttgatcgattttattttgttgataagttgtggatttaggatttgggtttaggtttgtttggtttaagagttttagagttgtttttaatatgttttatagattttggaatattttagtttagatgaaggatatgagtttgaataggattagagggtaggttgttttgaaatgggggatttgggattagttaagttatgtggtttattggttataggttggtttaatgttatagttattgttttaggttggaagtttttggagtggttatgtgttatttttttttttttttattttttttttttatttttttttttttttttttttttatatagaaagggttggtttgttatttgatttatgtttttatgtatattgttgatagtaatggtggtgttggtgtgttgatgtagatggaggtaggtagtggggttggtgaaagtaataagtatcgtttgttgagtatttgttatatgttaagttgtatataagtttttatataattatttatttaaaattatttttgagagagaattattataattttttttatagatgaggaaattgaggtttagaaaggttaagttgtttgtttaattagtaagtatgaagtttggttttaaatttggatttggcgtagttttattttgttttgtggttaattgttattttttttgaggatttagagttagggtaaggggtagttagatagttgtattaaattgtttaatagggttaggtatagtggtttatgtttgtagttttagtatttagggaggttaaggtaggaggtttatttgagtttaggaatttaagaatagtttgggtattagagtttgaggtttagtgagttatgattatgttattgttttgtagtttgggtgatagagtgagatgttgatttaaaaaaaaaaatttagagagagagaaaaagagagaagaaaataaaataaataaataaataaaaaatttttgataggtttgaagatggaagttagtggtttaagggaacgtggggaaggaaaaagttaggagtcgttgtttcgatttcgttattgtgggttgtttttagcgatttaatattttgttgtatggttaaggaaggggaaaagtagtattagttagttaattaggtattttattttggttagtttttttaattttaaatttttgggtgatattgttaatatataggtaaattgtttagtttggagttattttttttttgttggttgggaggtatagtaatatgagaaaaggagggaagatgatgggtttgtatgtgtttgcggtttttttttgtgagtgtatttgatgtgggttagttaaagttttatttaggtggaaatagattaagaagattaaagagtggtgaaatggttaagtaggaatgaaaaaatagttagttattcgtggttagtgttttattttaaaagaggatagttagtttgtttaaggatttttgtagaaggaaatttgggagagtttttttttttttttgtagaagtaaattttttaggttgaagagttaggaaggagttttagggatgagtgaagttaattgaagttgttttttttataaatagttttgtagtggttttttggaaatcgaggttcgttgtaaattttttaaaaagtattgttttgtaaggtttgtaattgttatatttgtgtggttttgttttatttttatgtgtggtagtgttagttgtaattagttttatatagggttcgagagttttagaattgtaaggttagaattttattttggaatgttttggttgtatgggtgttgggttggtgagggtagatttggaaaaatataggtagggtatgttttatgaggagtttagtgtttagtgtttgggagtttttaaaaattatatgtatgtatataaatgtatatttgtgtatatttatgtaaaatggatatatatttttgtatgttaacgtatttatataattatatgagaaaaagaattgtcgattatgaaagaaattttgaatagtggtttttggatgaatttagtaagaaaagtattagttttattatttttggtttaattatattgttttttattttattgttagagagaaatttttttgggtatagaagggttttggaagtttttgtgtaaatgttaagtatttaggaagggaagttcggggttattaggtttagagtgggatgtgttggagtagtttttagtaggtgaggaggattttaggtagagggttggaaagtttggaggaagggtttagtgaggggtgtagtggttaagatttgttgaggatttcgggggaggtggaggtagtgtggttaaagaggagttttaggaaggagagaggtttttttgatatttagtttgttgaggataggatttttcgaattgtgaattttggttatattttgatatatgtaagaagtgttaatttatagaatagtttttttgatatatatagtttagttataggttgtcgttgttggtgttatgtattagagtttttaagaaaattttggtttatatttagggaagttagatttgttttttttttttaatattttaagggtgttttaatagtatagtaggtattaggagaaggtgaaattttagttaggagataaggttgtttatatttcgatatatttaaaggtgataaattaataattgttaaataaaatatgttttgtttttttattttgataaagagatttttgtagtagttttattataaagtttaaggttggaatttttagtttttggagttttaggttggaatgtggaggtataggggaagattcgtttgttttgtttttatttttttttagtttaatttagttatgttagggtttttgtatataggtgtttaagttatgtttattcgttttgtagatatttttatttttcgtagtatagtttatattatagaagagggaatttagtaagatgtttatgtagatttagaagggtgtttgaggttgtttgggtagggaattttatcgttcgggtattggagggtggtggggtattcgtatggggagtgtgttgggtgggtaggtatatttggtttttatgagatggaaagggggtagagttgtgttttttgaagtatggaggtagggtaggtttttatgtttggatttaaagataattttgttttttagttttgttatgtatagttatgtgatttgtttaaatgtgttttttttgagttttagttttttttttgtaaatgcgataataatatttgtgttattggtttgttgtgataattagagatgatagaggtgaagtgttaggtatttagtgggtgtttcgtaaatgggatttatgttttgttattatatttaagagtagatgtgtagtagttttgtttattggaaataggaagtaaaggttgttttgtgtggtggagggtggttgggttttttgtggagtatagtatgaacgttagttggaggttatatataggattttgcggtagtgttttgggatttttaagtttttgttttaagtggggttggttattttatttttgtgtgtaaataagagtgttgattatgagtaaatgtaggataaaggatgtttttaggttatagttagttttattatttagaaagaatgttttgtagtgttgtatgaaggatggtatgaaggtagtgggagggggatgtatgtagtgaagagatttagggaatggaagtatcggttagagcgggggataggatacgttaggttaaattttagttgattttagaagagttttgaagttgagatggttttttagatattttttatttaggaatttttatgtgtttgttttttttgaagtttttgaattttgtttttttgggttttttatggagatgttattagataggtatgtttggttattatgattgaatggagtatgatgtaatattaataagttgagtgggaaagtttagtaaggtttgtttgtttagatttttttcggtttttttgtgtagtatttttttttttagggtttggggtaggattttttttgaaatgggggttttatgatttataattagaaagtgggttagagaattttgttattgttagttttaagaaagaaaagttagggaaaaattttattttggagagataagggagtagatggaaggagggtaggagaaggttaaagagagagaggttttgttttttgaggtttaacgtgttttaatgttataataagggttattggtattttgagttaggaataatagaataatagatagatagatggatagatagatagatagataggttttatagtagtatatagagttatggtaagattttagttggagggatttaaggtgaaggtgagggagtgttttggtttgtttagtattgttataatagaatatttgaggttagggaatttataaagaaaagaggtttatatgttttatgattttggtgattggaaagtttaaggttgggtagttgtatttggtgggggtttttggttgtttttatttatggtagaaaaggaaaggggattaggggtatagagattatatggtaagaggggaattaagagagtggcgtgagaatttatttattttttttaaaggatattaatttatttataagggatttatttttatgatttaaatattttttattaggtttttttttttaatatttttatattggggtttaaattttaataggagttttagtggagataaataaattatatttaaattatagtagaaaatgtaataaagtgtttttttgagttttgtgagttattttagtaaattaattaaatttaagtaaggggtggggggaattttgatttatagatagtgggttagaagtatagtaaaataatttggggtttattataggaatataaagtgaggggtatttttgtgggaatgttttaatttgtgggatttgatgttatttttaggtagatagtattagaattgaattgaatcggaggtatttagttggtgtttgttgtagatttgattatttgtttgatgtgttgggagaaatttttaaatatgtggttatagacgttttttgtgttgattgttgttgttgagtgaaagatttggaaataggtttattgagggaatatatttatttttttgatggattaaatttagttgttttaagtagaaaaatgggggtggaatttagggaaattggcgtcgggttatttttttttatgtggtaattttttatttgttcgttattttggaggatttggatttgattttttttaataaagttgtggttttagtaaaatttttgtgaagattttggtttttattttttttattttagtttttttaagagaaatatattagagggttgtttagaattatattatagagggaaatatgatttataaataatagagtaggattttattttttttatttgggattaatatttttaatattggaattaaaaatgataaatttttacgagatttgtagtatattatgagttttttaaaggtaaggatttttttttgtttatttttatatttttggtatatgataggtatttagtaaattttttttggttaaataatggattttagtagtgatttatatgaaggatgtagttaatgaaagttttggggtttttttttatttgtgttgtggtttaatttttatttaggtagttaggtttgggattgtagggtaggatataatatttatttttattaaattttaattttgttaggaatagttttttttagatttttttgataagtttggagtaataagttaaattatgttagtgattttagattagggttttagatgagtattatatttttgttaagggatgtatagatttgttagttgagtgttatattagttggttggtttattgtgtatttgagttgataattagtgtttggtttggtaagtttagggtgtagatagttttttgtagttaggttagatataagagtattgagtttgtagatttttgatttttgtagtagttattgttttatatttagtattaaggattttagatattttggttataagggtttttaaagggttgggggtttttaagattttgagtttttttggggagaggagagagttcgttggggacgtagaattatagaaggttatgggattttatgtaggaattataaattttatttattaggtgatgaatttattttgagataaggttaggttgttaggaaatggagtaaagtttattttttgatttttgagtttattatgtttgggttttagatttaagtgggattattttttagttttatttttttttattaattttattttaggatgaattttgttatttttaaaattaggattttgttttatttttaagtttagtatgtagttaatattattgaataataataaaatattaatgattatatttatggagtttttattatgtgatattattttaaggagtttatatatattgtttttgatgttattttattttgtaagaaggtgttgtggttattttttttttttgtgtaaggaaattgaagtttagattagtaaaggtgagtgatttgtttatcgttatttttttagtaaaagttagatttagattttgaatttaaagattatatttttttataatgtatagttttaagttggttttaggataggatttaaatagaagtagttatgtgtaaaggttaatttatagtggttatttttttggaagaaaggtaaaaatgagtatttagttaatttttttgtttttttttagggattagtatagattaggattataggtgtaaagggaaattttagaattattgtttgatattgtttttttatggagattagttatttgagaaggttttgaataaagtttcggaatttttgagagtggttttttttttttagagttttttgtagttcgtgtattttagtagttggttatggggaagatgtttagataggttgattttttttagtaatttatttagaaaatattagttaggggtttaaattattgttatttttattattttaaaatattttttattttgggttagtatgaatagttagaattgtagaggttatagtgttaatattggtattagaagagtatattgagggttgttaaataatagattgggtgagttttggttttagtgtaattttgagttagggtattggaaaggaataaattttgtggtgttattttaggttatgtttatttatggttgggaatttgaggtttagagaggggttgtattatgttcgagattatatagtgagaggtagagtttagatttaaattttagttttaaacggttgtttttgtaattgtaaagatttatttttttgattatttatttttatttttggggttaatttgggaattattggatgagaattgatttataaaaagatagagaagttaggaggttttcgtagagataaagtttagagggagttagttgagtatgtttgaagggatgaggggtaagtgagagaaggagttattttatagtttgagatggagggttgtattgttttttgatattaattgtgaatattttaattagaaagggaaatttattggtataatatttttattttttagtttggtttttaaggtttttgtagtttggttttaatttgtttttgtatttttattttttttggtttgttttgtagttagtttgtatttttgttttttgagatgattttatgtatatttttgttttaggtgtatagttggagattttttttttttttatcgtttgtttgtattttttttatttagagtagttgagttttaattatagtttatttttttttagttttttttaagtagtttttttttaggtttttagagtatttgtttaaagtatttgtttttttatttattttatatattattataatgatattaataaaattagtagttattttttttaaggttataatttatgttaggttttcgatgagttattatgtttggtttttataataatgttttgagttgagtattattatttttatttgataagtgaggaaattgaggtttggagatttgttaaagttttatagttagaaattggaatttaggattttatagttaagattattaatgaataggttgtttttgttttattgttgtatgtggttttattttattagttattattgagtgtttttgttgttgtttttgaatacggttggaggtttttgagggtttggagtattttattagtttatttaatagtagttttttgggtattttttattatatttttgtgatttaggatttattttgggtattagaaatatagagattaaaaagttatagtttttgtttttattgtgtttttttttgtttgggagatagatttataaagagataaattattaaataatttggagtgagttgtgttttgagatagtaagttcgggagaaagtgttttcggttagttttatttaaagattggaattcgtgataagtttgttttattttgtattttaagaatttggtttatagtatattgtatataataggtgttttttattttgttggtaatgattaaagagtatatagtgttaatgaaagttttggaatatttatttagttgatttgttaaattggttatttggatgtttttagttttaataaatatatagagtaatgggaagaatttttagtagtatgataataaagattcgggtgattaaagtttttggtaggtagaagtggtggtttatgttttttggtgatcgtgatttttgtagagtttagtattgtgttttacgttaagaggaattagaaaaatattattgattaatgatagagttttttattgtttagagataagtagtttggggcggttattgaggataggcgggatggcgggttttaaggttttttatttattatttttttgttttttaaaagatatagagaatttgtattttttttttttttgggtttaaatagttatgtttaaatttgtttagtaacgtttgagaggttgtagtcgttaaaggtgggaaagttttatttttggattagttttttttttttttatttttttttttttgtttatgattattttagggttagatataaatattgagttcgtagagttataagttgtttttttacggattaggttttagattttagatgtttttgaagtttaggattgttgttttagttatttggttttagagtatttgataatgatagatttattttaggaggtgttagggagattatggacgtaaatttttatttgttagttttaattttgggttaattttttcgttggaagagttaattgtttttttatttaagattttttgtttagagttatttgtgttttatggtgattttattttttttttttttgagatagagttttgttttgttatttatggtttaggttggagtgtagtggcgtgattttggtttattgtaatttttatatttcgggtttaagtgatttttttgttttagttttttgcgtagttgggattataggcgtgtattattacgtttagttaagtttttgtatttttagtagagacgaggttttattatgttgtttaggttggtttcgaatttttgagtttaggtaatttgtttattttgtttttttaaagtgttaggattataggtatgagttattatgttcggttttattttttttttgtaaatattaagtattgttcgttttaaagtaagtgtttagagtatatatagaagtagagttgtaagttttagagtttgtgaataggttatgagttttttttttatttagttttaaatttttgttttttttttttttgattttttttaagtttagagttatagttatcgttaagtaatgtagtttagtggagagagagaggtttttagagttgggttttttttttttaattttttttttaaaaggtttatttttttatattttttgtagggtatttttgagtttattttagtaaaagtggtaggattgggtatcgtaggagtaaagttttttaggaaggagttagggggtgggggttagtattttgatttttagatcgtttttttggttcggggttttatgttattttttttggattggttgtaggtgatttttaggtttttatttttaggtaggtggttagttggattatttagtagaagggggagagagtgtggttgttttattggagttttttttaggttttttttttatttttttttgtaatgcggttagaatttgaggaggtagaggttttattttaattatttgggttttttgttttgaggattaggttagtttttggtatttattggtttgattttatttgggttgtgttttttgagaatggtattatttttgatattggtttttttttgtgtgtttttatttttaagattatagggtttttttaggtgtttttagaaaatcgaagtatttttattgtttttggtttaaaggtttttgtttttaggtttagagtgttagatttagggttattgtgggtttggttgttaaattttatttatttttggtgtttttttaagagtttttggaatttttattttttttttagtagattattaaaaggttaggtttttttatttaatttggtattttagattttgttttttttatttatatttttattatgattttagggttatgattcgattttatttttttgttgttttgtttttagggtgtttaattttgatattttcgttggaatgagttcgaggtattttgtaaagagtttgggaaaatgattttttagaggattttaattttttttttttttcgttagttttgtttagttttttttgcgttttagatttgtttttgttttttcgtttttttttcgtgtgtattttagtttttgttttagttatcgttgtagatagtggattttttagatttaaatttttagttcgattttacgtttatcgtcgtcgtttttgtagtagaggtaggggaagcgttatacgttggttaggtttattgcgaagtcgattacggatagtaggaagtcgatttttttgttttaggtttttcggggttgcgcgtcgtcgtcgcggggcgttagtaggtattggacgtcgttgcgtttttttattattagtagtttcgtagttttgcgcgttcgaaggggttgttttggattcgtgttcgtttcgttgttttcgggttgtatttgcgggtttattcgcgttagaagtatggatgcggttggcgagaggaattttatcggttttgggggtacgtcgaggttttgtttggataaagggaaaagaggtggttattcggtcgtttttttttatttgtaatttttaagattattcgggagcgttttagatattgggatgagcgcgcgttgagcggacgtagggtttttagaaaagagcgcgcgttcgttggaaaaatttggaaatagaggttggggtacgtcggaatttaagagttggagatttttgatagttttttgggggcggttgaagattttgtagtattttttttcgtttatttattttcgtttgttttaaatggttgggattgaatttatcgaggttgagggtagcgtgtcgattttttttttagtttaggttcgcgatattttaatagttataggagttttttcggatatttaacgttattgtattataaattcgttagttttttgttggcgcgtttcggttcgggttttttaggtagatttagttttgtttcgcgtttagggcgtatttacgtgttcggcggcgaggggatttttggtgttttgcgttttgtcggttttcgatcggcggcgttttggtaggttttagggcgcgggttggggttgggtttcgtcgtgtggcgttcgggcggggttcggggaagagttggaggcgcggggcggtcggtagggcgcgggttgattggttttggtcgtgtttggcgggggtcgggttggtaatgtagtttgcgttttaggtaacgcgtcgattgtattaatttagcgttcggttcgtttcgtttggagtttgttagcgttaatggagattgatagcgcggtcggggatgggtaggggcgggagggtggcgcgggtttttagggatttgggggattcgggcgcgtattttttttttattttgcgtcgagtatcgttcgtcgtttttaaggatattaggtttttgattttttattacggggagcgagtgatagattttttagaattggggtttgcgtcgcgttagaaaggaggttaaaaaaggattggggaagtagcgatcggtgtagtattagttttgtttttcgtagtaggttatttaaattatttggttagtttttttattaacgaaatgggaatgtgcggtttagggtttagtgttgtaaataggcggttagcgggttgttgggtagttttgtttgagcggtttagtatgttgataggttatagtttagtatttatttttgtatttttgttatttatgggtagggtagtaggttatttgaggttgtgattcgtgttttgtgaggttgagaattattatttatttttttaattatttatttatttatatttttatatatttgtttttttatatgttcgttgtgtgttaggtattgtttcgggtttttggattatattggcgtaatataattcggagatttttgattttatggagtttatattttgttggcggagatagaggaaacgggaaatataataaatatatacgttatatgatgggtgagggaatcgggggatagtggggttgtagtttgtatacggggttagggaatttgagaaggtaataattagataagtaaaggagtgagttatttggatttgagagtcgtttttttatttatttatttatttattgattaatgtattaatttttttagtagatgttgattatttgttgtgtgcgtgaatagtgttggttagagaggagatagtttttgtttttaaggagtttttagattagtgtatagagtttattataatttagtgtggttaggatgtgttgtgattatagatgtgtggaagtagggtggagttgaattagtaagggaagtattttgttgatttaaggaggttttagagaggtggtcgtgttaagtgggttgggtggggtttggattagtttagttatattgatttttttattttgtaaatattttaagtttaaatttattttaagatttttatatttgttgttttttttgtttgagttgtttaggttttagtttagaggttttttttcgacgatttaaatcgaaaatatacgtttattttattttattattttatttatttatttgttatatcgttattcgaatttgttttagttgtttaattttatgtttttttttgggtggtatgtgagttttatgagtatagggattttgtttgttttttatagtacgtgttttggtatttggaacgtattagagtattaattagtttgtgaagtgaatgagttaatgaatgaaagaatggtggtgtgtggcggtgtttagagtatttgtattagagggataattatgataaatgttttttgggtaggatgtagaggggagaggaagggaaatttagaggggtatgggtttttttggtttttggggaagatgatagaaggtaggtgagggaaaagattgagtagaggtttgaggataagagtttagaattgtaggtttttatatatgaaaggtgtttattttttttgatttattggacgattatgataattttgtaaggaaagtaggaagagaattatttttttacgtattaggttaggaaattgtggttttgtggattaaagggatttgtttaaggttttatagattggaagttatagagtggaaatgagaatttaagttttttggtttttagtttttgttttttttattaagttatggtggagatatttagaatttttttagtagttatggttttttttttttttttattttatattttatttaattagtttttaagtgttgagaattttatttttgaaatattttgtaaagttataatagaggatttttattattttttattgtagtagttttttagttggttattttacgtttagtatttttttagttgtatgatcgttattagttgttagagttttatttagaatttaagtgcgattattttatttttttgtttgaaatttttttgaaatatattaatatataaatgtgatttaattaattttggatttgaggtaattttatttttttttttatatttttttgtatatgttaatttttttataatgagtatttgatatttatgtaattagaaaaagataatttataattttaaaaaattttttaatttttttaagataatgtttaaatattttgaggagtatagataagattttggttatttaattatattttttgttattttaattttttttttattttttttataaattttttattatttttaaaatatgttttattttttagtagtatgagagatattaaattattagtggttttttgagtattttgtgtttttttatatttttgggttttttaatatgttgtttttattatttttttttttatttggagaatttttatttattttttaaaatttttagttatttttattgtgaagttttttttgataattattttttataatagagttaaattttttttttatattgttgtttatttgtttgtatagttatttgtgagatttttttattagcgttaaagatagtgcgtgatgtattttgttatttaaatggtgttttagaaatatgtataatatagaattagaagagtttttttttttttgttgggtttggtgtttttgattggtttcgttttgtattggattttttaagaaataattggaaataaagattagaatataagtaatttatttaggagataattttggaagtaatcgttggggagaggagaagtgagatagtaaagggaaggaaattaggagaaagtagattaaggagtatttgttgttggggaaattggtgtttagttttggtgggggtttcgggagattgtatagagtacgttttggggttgttttatttgaggggtaagaaaattagagtatttatttatgaaggtcgtttttagagtgttaattttttagtaagtttagtttgtttgataagagggatgagtttgttttgttgttagagaaaggttaatagtagagttttaggtattggtagtaggaagttattgggttgggtttgtattggtaggaatagtggatgataaggggtgtgggtatggagttggaagtgtttgttataagggtggagggaggtatttttttttaatgcgtacgttattacgggggttaattagtaagtttgggagttttatttgtggttttagagattatcgggggttagtagtgaggatattaggttgggattgggttaaaagggaaggcgtttttttttatttttcgtttagatttatcgttatggggttatgtggtttttttgggagtttttttttttgtttagttaggtggtttgagggtaagttgtgtatgggaggttggagtattattagagttaatgtgatttttggggagttattatttttatttattatggtatttggtgatataggttatggggtaaaaggtaatggttgatgttgtgagtttatttttggttatttttttatagatattggggttttgatatataatagttgggttgggatatatttagaatttaagggtttgtgttcgttgaggacgttattagaatttatatttttatggtattaatgaggagattaaggaaaaaaaggaggagaggtttgtttatatatttgttttttttatttttttttttttttttttttttttttttttttttttttttttttttttttttttttttttttttttttttttttttttttttttttttttttttttttttttttttttatttttttttttttgttttttttttttttttattttttttttttttttttttttttttttttttttttttttttttttttttttttttttttttttttttttttttttttttttttttttttttttttttttttttttttttttttttttagtttttttttttttttttttttttttatttttttttttttttttttttttttttttttttgattttttttttttttttttttttttttttttttttttttttttttttttttttttttttttattttgtttttttgttttgattaggggataataggtat

SEQ ID NO: 1693 - DNA, 7190 bp, Artificial Sequence
  chemically treated genomic DNA (Homo sapiens)
  unsure 390, 434, 601, 808, 845, 1616, 1942, 1966, 1972, 1979, 1985: n is a or g or c or t
  unsure 2013, 2036, 2048, 2052, 2054, 2058, 2066, 2073, 2075, 2087: n is a or g or c or t
  unsure 2097, 2172, 2497, 3292, 3300, 3395, 3791, 5481, 5484, 5513: n is a or g or c or t
  unsure 5939, 5944, 5954, 5967..5968, 5977, 5984, 6015, 6041, 6045: n is a or g or c or t
  unsure 6087, 6103, 6116, 6135, 6152, 6241, 6254, 6435, 6616, 6635: n is a or g or c or t
  unsure (6722, 6768, 6777, 6798, 6806, 6817): n is a or g or c or t
atattttattaatattgagttttttagttataaatatgtatatttttttgtttgtttagatttttaaaagttttttatagtaatggattttaggtttttagtgtataagtttcggatacggtttatttttaagtattttgtttcggatgttattgtaagtgaaattattttaggttttattttagaattgtttgttgttagtatatagaaatataattggtttttattagattttatggttttgttaaatttatttataaattttagtagttttttgggtaaattttttaagattttttataaatatgaaatttattaagaaaaattttgttattaatattttaatttttggggaagttttttgttttgtagttagatattcgttattgnttatgattatatttagggttattttttggttatttttttttggntagatgatgaatttgatgtatggtttgaatatgtgtttattgggaagtttttttttattggttttttatagaaggttatgatgatatagttttttattttttggtgggggtagtgtgttgtgtatagatatatgtaatttaggttttaacgaatgtatttttttcgnttaatgttataagaaatttttatgtagttagaggtttgggttaaggaagcggtttttatgtagtaagagtgggtgtttgtttatggaatttatcgcgttttttagatttgtttaagttttgtgtcgtaaatattttatttgaggacggtaggatgttgtttatataatttttgtgggttcgataataaatagtttttgttgggacgnttagtttttatggaaatagagttttttgagtttttgntatggtttagggttgtttttatttaaaaggagaggacgtatttttaggagagcgtttagtttttatttaattgttattttttgcgttgtttataatattttcgtttgatatagattttttaatttttattggttttgttagattagtgtttttaaagtgtggtttttgggttagtagtgttagtgttatttgagaattttttagaaacgtaggtttttaggttttattttagatttattgaatttgcgtttttaaggatggagcgaggtgatttgtgttttttatgtatgtaaaggtttatgtaggtgattgtgatgttagttaaagtcggagaataatattagattgtgtggttttttggggtagtagtttgtttatttagattagtagtagaattttttttattttgggttttatttaaaattaaacgttttatgaagaatataaaataggttagagaagtattttcgagtgttttgtattttattttgtaaatcggaagagttttattaggtatgatattttttttttagtggtagttttgtttgttagagatagcgtgtttttttttattttggatatatattttgattaattagattaatggatttatagaaagtttattaaggtggtaggttttgaaaatgtgttatttttttttttaatttttagtaagtacgtgttttattaaggtattttggtattttttattttttgttttttaggttgatttagtttgatgttattagtgtggtagattattgtgatatnttgtgtagtggtaagattattaagatgtttgtgattaaaattattagtgaktcggaaaatgatatagttttgagagaagatattggaagtgtattgttgtttttgttatgcgagaggaaattattttttttttgaggtggttttcggggagggtataggggtgtagtagtgagtagggttttttstttggakmtagtattttttattatttttagaatttggatagataaggtttgggatttgattttttatatttttggataaaagttatttttgtttattggtttttttatttttgttttttttaagttttttatttttagggnttttttagtattagtgagagagtngggttnttaaagnttgagntgggttttttgggattttttttgtaagnatataggatatttttaatatagnaaatatataggnaggnanatgnttgttatnttatttntnttgtttttgttnttttttaganatagtatttatggggggagtattsacgttgttttttaaattaggcgagatacggcgtaatatttagtattgaggnttttttaggaggtagtatttaaggagggggggattcgtgggttaaggttgttttggagatagtagttagtggttaggggttttttgtgggttttgtagttgcggttttagttagtggggagaggtatcgagtatgggtaggaagtgtagaggtaggggggttttatttgtttgtatttaacgttttgagtttatagtagttatagtagtaattataatgataataaagtcgatttggtatttagggtaaagttttaagtatgtaaaggtcggtcgtttgattaggtttgattagtttataattatattgtttttatttgtatagnttacggagtatttttgttgtgggaggatggagatttatgggtttggtagttgcgttttttttgtgttatttatgagtttaattttcgtagttagtttgtttttagagtatttaaagtttttttattttaatttatgtggttggaagtcggggttgaggtaggggtggaggaatgttttttgttttgatagagtgtaggttatatgtgtgtgattatttagtggttttttttgagtgtggtaggtgtattttttgtgtgttattggttagtaaggatgtggttgtttggatttgtgtgatttttagtttttgtatttttttgtttgtattttgttagttttgggttataattttgcgtttttgtagcgtttgtaatttttttttaaacgttgtttgtttgtgtgttgttttgtttcgagatagggttttattttgtggtttatggcgtaattttagtttattataatttttattttttagttttaagttatttttttatttttgtttttttagtagttgggattataggtgtgggttattatgtttggttaatttttttttttaaagttagggttttgttatgtggtttaggttggttttaaatttttggttttaagagatttttttttttcggttttttagagtgttgggattataagcgtgagtttttatttttggtttgtgtatttttaatatatttgaatatttattttttttgtgtgtgtagatttaatagagtttttttagttatttgtaaagttttttttttgggagattgtttttttaattttgttgntttggggntaagstttggtttatttttttttattgaaatttgtgttatggagataataggggtagagagattttttttgtggtagttattgatatattatagnttcgaggtggtatattttttttttttgaagtttttttatttttttggcgatgaagttttatttttgatgggaggtggtgttaggaggtttttaggtggttaggttaggagggttttattttgaggaatgggattagtgtttttataaaatagatttcggagagttttttttagtttttagcgtggggagatatagggagagaattgtttgtaatttcgaagcggtttttattagatatagagtcggttaggttttggtttcgggatatcggaatcgttagaattgaaggtttttgtgtgagtttttaggttgtggagttttttgttatggtagttttagggggttattaggtttttatttgattttaatttagcgtgaagttatagttttgagtgntttttgtttgggtgttagtttcggagtcggggagtcggggagcggggggcggggaggggagtggtggtgtgcggggagtgcggggcgggcgtagggggtggggtatcgcgttgcgggcgggtattgcggagttaggtattaagggtttttgttttttttattgttgagcgcgggttgtaggttggaatggttggagagttttagggttcgtttggacgtttagggtagggtgtttacgggagtatcgagggtatacggggaggaacgtcggggttcgggcgattttaggggcgacgtatagagttgggcgcggttatttatttcggtgttttttaaggatttggatattttgggttttggcggttcgggggttttattttttcgcgcgttgaatggaagaaatttcgttcgggtatttcggaaggaaagtttcggagtttattcggttttggagtcggatattaatcgttagggttttttaggttcgtttcgggaaatggtttttttaggcgagtgcgaggcgggtttttcggtttcgatgtaggcgtattagatatcggtaaggcggggattaggtttaggggatttcggtcgtttcgaggtcgcggagattttaaggttacggaaggattcgcgttttcgtagttcgtacgtcgggaagcgtgtagagttttcggcggggtttcgagttcgttggttagagcgtggagcggcggggtgggagggacgtggtttttagagcgcggggttatcgtaggggtttttgatggggagggagggaagggtcggttcgacggggttttagtagtttttcgcgcgtagtcgttcggtttttttttcgtttagttgggagtcgttagttttgggcgttcgaagatagcgggtgttcggggtagtttttaggggtgcgggcgagggcgtagggcggtttagatagttttcgcgtggaaggcgttcgtttagattcgcgacgtttcggatttttaggttttcgtatttcgtgttcgaggtttcgggacgcgtaggatagtggagtcgtggtcgtcgtttgtttttagttatttgcgttcgggaggcgggggcgggggcgcgtttcggggaggtgaggaggaggagttaggacgcgagggcgatttcgacggcgggagggcggggcggggcggattttgtttattggataagagttcgaggtcgaggttgagatcgtttatcgtttcggagcgggaggggaggtttcgcggaacgttttcggcgttaggattcgcgtgtaaagtttaggttcgggcggttaggtgaggttagcgtcgttcgcggtatcggggcgtttcgtttttttcgtagatttcgaagtggggcgtaggggcgggggtcgggggtcgggtatagtttggggttttcgcgtttcgtagatcgcgtcgtttttaaagtcgttaatagtcgcgggtgtcgagcgtttttcgatagcgttatatgggattttgaggtcgttcgaggcgcgaggagggtgtagggttgtttttggtttcgttttaggtttagaatcgggtgggtatttggtgtagttatcggtttaggggacgcgtgggtgtttatggttgtgattcgggggttttggttttttttcgtggaatttaattttattaggggtgcggcgtattttagattcgatcggagtgggtttagtatattnttnttttatttcgggggggttttgtttgtgtngggggtggtggcgggcgcgggttgcgcgttggtgttttgggtagggcggggaggtcgggcgaggattcgttaggtagcgtcgttttttgttttgggcgcggtgaggaaggacgttttttaacgggatatattttggtgtgtagatttaaaattcgtttttgaggtttcgcgtataggagcggggttaggtggttttagggcgggggcggtttgtcggagattcgcgattttcgtattcgacgtttttttttaacggggttttttgttcgcgtcgcggaattttttcgtcgggtgttttatttatcggaggggtcgtgtcggttgaggttgatatcgggtgcgtggtatagttcgtgatagtttatgggtgaggttgtgtataaatttggatgtagggaaagttgttttttagagtttttatttganatttnttatagtcgntgtgtgtgtgtgnntatttgtgngagtgtnagtatagtatgtgtgtaagtgtatgtgtttntttgtgtgtgtgtgagtgtrwatgtntgtntgtgagtttgtgtgtgtttgtgtgtttgtgtgtgcgtgcgtncgattgaaatacgttnytgttggmtttanatsmtagaagtcgttttgnmtggggcggtgtagatntttttgtttttttgtttagcgttataggggggtttatgtagtcgtttggataggatttttcgggttattttgttggtttaggagttagntttcgcgatgaanttttgtttatttttcgtttagtttttttatacggggtggtgttatttgttttaggtggatgtggtttgtatagatattttttgaggaagtagttgtgatggttatgtttaaattttttttatagtggttgattttgtttatataaattttgttttttattattgagtataaataatataantttaggtttggtggtttatgtttgttattttagtattttgggaggttgaggtaggaggatcgtttgagattaggagtttaaaattagttttggtartaatagttagattttgtttttataagaaaataataataataataaaaaaatatatataaaaataatttagtcggtgttgtggtgnatatttgtagttttagttntttaggaggttgaggtgtaaggattatttgaatttaggaggttgaggtagtgagttgtaattataattgtattttattttgggtggnagagcgagattttatgtttttaaagaaaaaaaaaagaaaaaagaanatagatgantagttatgaagataatattgnatgttttnagaagaatgtnagattattttttggaagtgtgggggaaggtggaagtgatatttatgtattgttagtagaaagttacgttagagtttatatagttttgtattttgataggagtggggaggggtgtaggggaaggagaggtaaattagagtgtttgttttgaggtttttatgggttagtgttttagttttgtggtgagggttggtattttttagttttcgtgttttagttgtattattttaggtgttgagaacgtatttatttttttttagaggaatgttcgtgaatgtttcggggttttgtttttcgtattaggtatgtttttagttttggttgttgaattgttgcgtttttgttgtgtgtttattttttatattggttgaaga

SEQ ID NO: 1694 - DNA, 7190 bp, Artificial Sequence
  chemically treated genomic DNA (Homo sapiens)
  unsure 374, 385, 393, 414, 423, 469, 556, 575, 756, 937, 950, 1039: n is a or g or c or t
  unsure 1056, 1075, 1088, 1104, 1146, 1150, 1176, 1207, 1214, 1223..1224: n is a or g or c or t
  unsure 1237, 1247, 1252, 1678, 1707, 1710, 3400, 3796, 3891, 3899: n is a or g or c or t
  unsure 4694, 5019, 5094, 5104, 5116, 5118, 5125, 5133, 5137, 5139: n is a or g or c or t
  unsure 5143, 5155, 5178, 5206, 5212, 5219, 5225, 5249, 5575, 6346: n is a or g or c or t
  unsure 6383, 6590, 6757, 6801: n is a or g or c or t
tttttagttaatatgaaaaataaatatataataggaacgtaataatttagtagttagggttagggatatatttggtgcggagggtagagtttcgaggtatttacgggtatttttttgggaagggatgggtgcgtttttagtatttgagatggtatagttggggtacgggagttgggaagtgttagtttttattatagggttggggtattggtttatggaggttttaagatagatattttggtttgttttttttttttttgtatttttttttatttttattaaagtgtaaggttgtgtgagttttagcgtggttttttattaataatgtatggatattatttttatttttttttatatttttagagagtaatttnatatttttttnagagtatntaatattgtttttatgattgnttatttgtnttttttttttttttttttttttttaaaaatatgaggtttcgttttnttatttaggatggaatatagttgtgattataatttattgttttaattttttaggtttaagtgatttttgtattttagttttttgagnagttgagattataggtgtntattatagtatcggttaagttatttttgtgtgtgtttttttgttgttgttgttgtttttttgtagagatagggtttgattattgytgttaaggttggttttgaatttttggttttaagcgatttttttgttttagttttttaaagtgttgagatgataggtatgagttattaagtttgggnttgtattgtttatatttagtaataaagagtaaaatttatataagtaaaattagttattgtaaagagagtttagatataattattataattgtttttttaaaaagtgtttgtataagttatatttatttagggtaggtggtattatttcgtgtgagagagttgggcggaggatggatagggntttatcgcggganttagtttttgggttagtagggtaattcgggaaattttgtttaaacggttatataaatttttttgtaacgttgagtaggagagtaggagngtttatatcgttttakntagggcgatttttgksatntggakttagtarnagcgtgttttagtcgngcgtacgtatatatagatatatagatatatatagatttatanatanatatwyatatttatatatatataggngagtatatatatttatatatatattatattnatatttntataggtgnntatatatatatancgattgtagnaggtnttaggtggaggttttaaaaggtaattttttttgtatttaagtttgtatataattttatttatgagttattacgagttatattacgtattcggtgttaattttaatcggtacgattttttcggtgggtaaaatattcgacgaaggggtttcgcggcgcgagtaggagatttcgttgggagagggcgtcgggtgcggagatcgcgagttttcggtaaatcgttttcgttttggggttatttgatttcgtttttgtacgcggggttttagaggcgagttttgggtttatatattaaaatgtgtttcgttagaaagcgtttttttttatcgcgtttagaataagaagcggcgttgtttggcgagttttcgttcggttttttcgttttgtttagagtattagcgcgtagttcgcgttcgttattatttttnatatagataaagttttttcgagatggagnggnggtgtgttaaatttatttcgatcggatttgggatgcgtcgtatttttagtagggttaagttttacgagaagaaattaggattttcgagttatagttatagatatttacgcgttttttaagtcggtgattgtattaggtgtttattcggttttgagtttggagcggggttaggggtagttttgtatttttttcgcgtttcggacggttttagggttttatgtggcgttatcggggggcgttcggtattcgcgattgttggcgattttggagacggcgcggtttgcgggacgcggggattttagattgtgttcggttttcggttttcgtttttgcgttttatttcggggtttgcggaaggagcggggcgtttcgatgtcgcgagcgacgttggttttatttggtcgttcgggtttgggttttgtacgcgagttttggcgtcgagagcgtttcgcgaagttttttttttcgtttcggagcggtgggcggttttagtttcggtttcgggtttttatttagtagatagggttcgtttcgtttcgttttttcgtcgtcggggtcgttttcgcgttttggttttttttttttattttttcggggcgcgttttcgttttcgtttttcggacgtagatggttgggagtaagcggcggttacggttttattgttttgcgcgtttcggagtttcggatacggggtgcgggggtttgggggttcgagacgtcgcggatttagacgggcgttttttacgcgggaattgtttgggtcgttttgcgttttcgttcgtatttttgggggttgtttcgggtattcgttattttcggacgtttagggttggcggtttttagttggacggggagggagtcgagcggttgcgcgcggggaattgttgggatttcgtcgggtcgatttttttttttttttttattaggggtttttacggtggtttcgcgttttggggattacgttttttttatttcgtcgttttacgttttgattagcgggttcgggatttcgtcgaggattttgtacgtttttcggcgtgcgggttgcggagacgcgggttttttcgtggttttggggttttcgcgatttcgaggcgatcgaggttttttaggtttagttttcgttttgtcggtatttagtgcgtttgtatcggaatcgaggggttcgtttcgtattcgtttaagaaaattatttttcgggacgggtttggaaagttttggcggttggtattcggttttagggtcgaatggatttcgaggtttttttttcgagatgttcgggcgggattttttttatttagcgcgcggaggaatggagttttcgggtcgttaaggtttaggatgtttaggtttttagaaggtatcgaggtgagtggtcgcgtttagttttgtgcgtcgtttttagggtcgttcgaatttcggcgttttttttcgtgtattttcgatgttttcgtgagtattttgttttgggcgtttaggcgagttttggggttttttagttattttagtttgtagttcgcgtttagtagtgagggaggtagggatttttggtgtttgatttcgtagtattcgttcgtagcgcggtgttttattttttgcgttcgtttcgtatttttcgtatattattattttttttttcgtttttcgtttttcggtttttcggtttcggggttggtatttaggtagaagntatttagggttgtgattttacgttgagttggaattaagtgggagtttagtgattttttggggttgttatgataaaaaattttataatttgggggtttatatagaagtttttagttttaacggtttcggtgtttcgaggttaaggtttggtcgattttgtgtttggtgagggtcgtttcggggttgtagatagttttttttttgtatttttttacgttaggggttggggagagtttttcggggtttgttttatgagggtattggttttattttttagggtggagtttttttggtttgattatttgaaggttttttgatattattttttattaggggtgggattttatcgttagggaggtgaggggattttaggagagggggatgtgttatttcgaanttgtagtgtgttagtggttgttatagaagggatttttttatttttattatttttatggtataggttttaataaaaaggagtgagttaggstttgnttttagantagtagggttgaggaaatagttttttaaggaaaagattttgtaggtgattaagggagttttgttaaatttatatatatagagagaatggatgtttaggtatattaaaaatatataggttaggagtgagggtttacgtttgtaattttagtattttgggaggtcgaggaaggaggattttttgaggttaggagtttgagattagtttgggttatatggtaaaattttgattttgaaaaaaaaaattagttaggtatggtggtttatatttgtagttttagttattggggaggtagaggtgggagaatagtttgaagttgggaggtggaggttgtagtgagttgagattgcgttatgggttataggatgagattttgtttcgaaataaaataatatataggtaaatagcgtttgggaagggattgtaagcgttgtaggagcgtagaattgtgatttaaagttaatagggtataggtaggaaggtgtagggattagaggttatatagatttaggtagttatatttttattgattagtagtatatagagaatgtatttgttatatttaggaggggttattgagtgattatatatatgtaatttgtattttgttaagataaagagtatttttttatttttgttttaatttcgatttttaattatatgaattaggataaaggagttttgggtgttttaagaataaattaattgcgggagttgggtttatggatgatatagagaaagcgtagttgttagatttatgggtttttatttttttataataggaatgtttcgtganttgtgtaggtagaagtagtgtggttatgagttgattagatttgattaaacggtcgatttttgtatgtttggaattttgttttaaatgttaagtcggttttattattattgtggttgttgttatggttgttgtgggtttagggcgttgggtgtaggtaggtggagtttttttgtttttgtattttttgtttatgttcggtgtttttttttattggttgggatcgtagttgtagagtttatagggagtttttggttattgattgttgtttttaaagtaattttggtttacgggtttttttttttttgggtgttgttttttgggaggnttttagtgttggatgttgcgtcgtgtttcgtttgatttggaagatagcgtsgatgttttttttatgagtgttgtntttgagaggngataaagatagngngagtganatgatagntatntntttntttgtgtatttnttatattgagggtgttttgtgtntttatagaggaagttttagggagtttantttagnttttaangatttngtttttttattggtgttggaaagnttttgggggtagggggtttggggagggtaagggtgaggggattagtaggtaggagtggtttttgtttaggggtgtgggaggttagattttagattttgtttgtttaggttttgagaatgatggaaggtgttgkmtttaggsaggaggttttgtttattgttgtatttttgtgtttttttcgggggttattttaggaggaagatagttttttttcgtatggtagggatagtagtatatttttaatgtttttttttagagttgtattatttttcggmttattggtggttttagttatagatattttgatggttttgttattgtatagnatgttatagtggtttgttatattgatgatattaggttgaattaatttggggagtaaaaaatgaaaaatgttaagatgttttggtaagatacgtgtttgttaaaaattgaaagagaaaataatatatttttaaaatttgttattttggtgaattttttgtgggtttattggtttgattggttaaaatatatatttaaaatgaaagaaaatacgttgtttttggtaagtaagattattattaagaaagaagtattatatttggtgaggttttttcgatttgtaaggtgaggtgtaagatattcggggatgtttttttggtttgttttgtgttttttataaagcgtttggttttgagtagggtttagagtaagaaagattttgttgttggtttggatgggtaaattgttgttttaggaggttatataatttggtgttgtttttcgattttagttggtattatagttatttatataaatttttatatgtataggaggtatagattatttcgttttatttttagagacgtaggtttagtaggtttgaggtgggatttgaggatttgcgtttttagaaagtttttaggtgatattgatattgttggtttaggaattatattttgagaatattgatttggtagaattagtgggaattggagggtttgtgttagacggagatgttgtaggtagcgtagaaaataatagttgaataagagttgaacgtttttttggaaatacgttttttttttttgagtaagagtagttttgagttatantagaaatttagggagttttgtttttatagaagttgancgttttagtagaagttatttgttatcggatttatagaggttgtgtagatagtattttgtcgtttttaggtggaatgtttacgatataaggtttgagtaggtttggaaggcgcggtaagttttatgaataagtatttatttttgttgtatggagatcgtttttttaatttagatttttggttatatgagagttttttatgatattgancggagaaaatgtattcgttggggtttggattatatgtgtttatatatagtatattgtttttattagaaagtgaaaggttgtgttattatggttttttgtgaaagattagtgaaagaaagttttttagtgggtatatatttaaattatgtattaggtttattatttanttaaggagggatggttagaggatggttttaaatgtagttatagntagtggcgaatgtttggttatagagtaggaggtttttttaaaaattgaaatattgatgataagattttttttggtagattttatgtttgtagaaaattttgaggaatttatttaaaaaattattagaatttataaatgaatttagtaaggttatgggatttgatgaaaattaattgtatttttatgtattggtagtaaataattttaaaataaaatttaaaataattttatttataatagtattcgaaataaaatgtttggggataaatcgtattcgagatttgtgtattgaaaatttagaatttattgttgtgagaaatttttgaaagtttagataagtagaggagtgtgtatgtttgtgattgaaaggtttaatattaatgagatgt

SEQ ID NO: 1695 - DNA, 8099 bp, Artificial Sequence
  chemically treated genomic DNA (Homo sapiens)
ttattacgggatgtgtggtagtattagtttttttagaagtatcgtgttttttttagtagttggtttttttttttagattttaggtttggtttgtggattttatgtaggtaggattgtgtttgttttgtttttttttttttttttttttttttttttttgagatagagttttattttatcgtttaggttggagcgtagtttggttgattgtaatttttgttttttaggtttaggcgatttttatgtattagttttttgagtagttgggattatagatatgtattattacgttcggtttattttttgtatttttatttttatttatttatttgagatagagttttatttttgttatttaggttgaagtgtagtggtttaattttagtttattgtaattttcgttttttggggttaggtaatttttttgttttagttttataagtagttgagattataggtattcgttattatatttagttattttttgtatttttagtagagataggattttattatgttggttacgttggttttaaatttttgattttaggtgattcgttcgttttggttttttaaagtgttgggattataggcgtgagttagttggttcggtttgtttgttttgtttttgaggagtcgagtatatgtgggtttacgtatatttttgttgagggagtgtttttttatgaagaaggttagattttatgtttattgtttcgggcggtattagcgttttataatttttattatttttgggagatgttttgggaattttagtttttttttgaatagaggatacgaattgttagttggttttatgatttgtaattaattttattttaacgttaaatttatagtttatttgtttttgtttgttttgagaaagaaagttgagttttttgagaaatgaatttattttgattttgatatatgaagttaaagtttaatatttttgtagtgtttttttgtttagaaggtattgataggtattaagtagatggagcgttataggtatttttaaagggttgggtgtttatgattaatcgggataattatatgtttgtttaggtacgggttgtttttggttatagagataaagtgtgtggaaagaggaatggagattcgattagaagtttaaatagaaatagtttttttttatttggagttagggattgggggaatggagtgtattagttttaggagagttaagagaaagttaattatttttattggttggttaattgtattttttatgtgtagagatttagggggacgaggtttttgtttgttagttgttattttatagtagaggtggggtttacggtattatttttagtttgttattagtttagtttggaataatagtatatatttaagatgtaaaggaaggtttttttttggggttttttttggatatggagaaatttaaagattgtttggagaaggttatagttgtaatattgatttcgtttgtaatttttttatttagtaggataaaaatattttttaaaaaaagaaagtttagaagagggtatttttagaaattaatttttttaataatttatatttttttatttttgggttagtttgtttttagttattgttatgtgtaagttttgatagaaaaagttagttagggttttgtagaattagaaaaaataggaagagagtttggggttttataggtaggagtttgtaggtagaaagggtttcgggtatatggtatttttttttggtagattcgattagttatcgagaggagtttttttttatttggtagaggtagaggagtaagttaagaaaaggagatgtgtgttttttttgagtggttgtaattttgtgtttgtattttagattttatgatgagggtgggggtttagtaggagaattttagaaagtatagttggatagagagagatagtttgtggggagaggttgttcggttatgagttgtttgagggatgttttgggtttttttgtattggggttattttagtttgttgatgtaaaattttttaattaaaaaattaagaagaattaggggatattttaggaaataagatttttgtaatggtttagaatataaatagaaatagcgtattatttttttaggagttgtttattatagttgttaggaatttaggattggatgttttcggggttgaatttttgaggatttttgagaatatacgttgtttttaaaaatttatttatttgtatatattttttattttttttgtaggacgttttaaggaagaaagtaaataaaatttagaataaattatttggtttttgaggtaggagggtaattgtttattgttgttgttaaatgtttattttttttttttaaagtattgtttttgagatggatcgtatttttttttcgtagattttttgggtttgggtagagaggttagggaacgtttgggtgatgtaattggagtttttatttaagtgagaggaaagtggtagtatagaaaatagaagaggtttttgtagaaaattgtggggttaggttaggtatggtgttttatatttgtgattttagttttttgggaggttaaggcgggtggattatgtgaggttaggagtttaagattattttggttaatatagtgaaattttatttttattaaaaatataaaaattagtcgggtatggtggagtacgtttgtagttttagttattcggaggttgaggtataagaatcgtttgaattcgggaggtagaggttgtagtgagttaaaattgtgttattgtatattagtttgggtaatagagtaagattgttttaaaaaaaaaaaaataaaattgtggggttagtgggaggaagagtaagggaaggagtagttttgttaattcggtgttttttagtcgtatagggaaaagttttttttttttgttatttggtttttaagttcgttagttgtttaacgtataaaatatgttattgatataggtcggagggaagtatagaggtttttttaaataatataattattgattattaagtttaggtttaatttagttgaatatttaaatatgttgatattttattatgtaataaaataataatattttttggtttggtaaatggttatttatggtgggtgagaggatgtgtggttattttaaaagtttattaagtttagttgagggtttaaggaagggggaagtggggggaggttaaggttaggtagtagtataaatggtgagtagggtgaggttatggagatcgtttttgttagaatttatatttttttgagtggtgtttgtatttttgagtttggggtgggtggtggagggtttaataagtgtggtatagtttaagacgtttatttttttttatatatatatagtttttagttatatgaagttgatttattttttgttgttgtagatatttttggtaataatcgatttttttaaaatttttattttttattttatagaaaaaatgtagtaaacgttaaattttagtgattgatattgtttggtgtttatgtttaatttttgtttatgtttatagttatagttatttttgtgaagttattattttgtgttttgattttttatttattatgtttttgtttttatatgtgtaggtagttaagttgtagttattaaaaattttaaataggtaggagatatttatgcgttatttttattagttagtttttagttatttttttaattgttggatttggagggttagttttagattattgtagttataaatagtttatttttggttattttttttagaagggtttagtgttattttagttaggtagaaacgtattttaatttttaaattgttttaagagtttgaaaagtttaggtttagaagaaatagagtgagtagttgaatagttttataattgttgtttataattttataataggttataggtttaaagtttaaaagggtttaaatttttattttacgtttgacgatttagattttaagttagagttgagttgatttttttgcgtttaggttacggcggtgaaatgaaggtatagtagtttcggttaggtttttttagtggaggtatagggggacggcgaaattaattattttagtattagtaatttgtatatttttttttttaggttttttggaggtaaggcgattttgtttgttttttattgtagaataataaggggtttagttataggagttgttggtaagtggaaagaagaataaatggtgagtagtagtgtcgtttaaggattagtcgggtttgtaaatgtataatgggaacgtagaaaggttatgtgtagatagattggatatagtcggaggtagtttaaatttgttttaatttttttaggggttaaaagacgagtgatagaatttgtagttgatgagttggggtgttttacgaagggtggtttttttatttttgttttttgtttttttttttttaaaattatagttgtagttgatataaaatataattttgggtgtgtagtttaaatgatggtgaggattgttttgtttgttgaaaggtagaaacgtttttgtttgttattgtttttttaatatagtatttaagataaagggggtgttttgtgacgttttggagttttttttatatttttttgagttgttggtaaattataagatgagagtttagtggtttaaagggaagcgagtgttttgttttttagtttagtttgtgtaaattttggtgatttgttgtttatttgtgttggttttattgtttttttttgaaattatttgattgttatttgatgttttgtataggttgagaaatttagttgaatttatggattgttatgtagtaaataggatgttttatatttaatagatgtatttgtaatttcgttaattaatgtagtttaagatgtatgatgagttaatattaaagatgagtaaaatgtttaattttttttttttttttttgtgtgtttttttaatagagttaatttcgacgtgttaatttcgacgatagagagttcggaggtgatttataaatttaagtatttagagattaattgggatttttggtagatggatattagtgttatttattaattagtaggatggagacgacgtttttgaatttttagaagtagttattagcgtgtgaagatggagaagattgttaggaaaacggagttttatagaaggttgtttttattttaggggataaagtggagttcgggtaaatatttaatgggtatttagtagttttaagttttggtgcgggagatgatatacggtattttattttagcgattattattattttagtggttgagttttattaaggggaacgggagatttggggtaagaaggtggattttttttttttagtgattggttatgttgtggatttgggtaatgtttggcgttttttttatatatgttattagaatggagggggttagtattataggttgcgagtagaggttgtgatttagggtgggttgtgattcggagtgggttgtgattcggggtgggttgtgattcgggtgggttgcgatttggggtgggttgtgatttgggatgggttgtgattcgggtgggttgtgatttggggtgggttgtgattcgggtgggttgtgatttggggtgggttgtgattcgggtgggttgtgatttgggatgggttgtaggtttttttgagaggttagaagatagattatgtttttttagtttttattggcgtaagattaggaatatgatgatttagattttcgagttggtagaaaagttaaatttcgttaggcgtggtggtttatatttgtaattttagtattttgggaggttgaggtaggtggattatttgaggttaggagtttaagattagtttgattaatatggtaaaatttcgtttttattaaaaatataaaaattagttgggtatggtggtgggcgtttgtagttttagttatttgggaggttgaggtaggagaattatttgaatttgggaggtggaggttgtagtgagtcgagatggtattattgtattttagtttaggcgatagagcgagattttgttttaaaaaaaaaaaaaaaaaaaaaaagttaaatttttagtaagttaaaagttgaagatagcgtgtttgaggtttttcgggttgtgaagttgggtgaagtttttttaaatttgattttatagatttttagtattattagcgttttatttattgaagggttttttttttattttgtattttttaggttttgtttttttttagttagaagtgagggaatggtcgttagttttgtgttgagtttttttatttttgttggtaagttttgttgggaagagtttacgagggtaggtttgcgtaagggaaaatttggaggtggttttagagttttagatgtttttgattttttggatttgtgtgaggttagagaagggtattagcgttaagttttaaattttaattattagtttgggtagaatttaagttggattagatttatagtatgatattaatattaattttaaattacgtatggttggtttttttatttttttttgggatgttagatttttgaggttagaggttttattttgttttttgtatttttaaagttttttaagtagttaatttgtagattataaaaaatagtagttgattgtaggtatgaagatgggaatttgggggagagtagagtagtggggaaaagtgaatgggtttggggtttttggatttgttattagtataggaaaataataagaagtgggtgttagatgcgttaagtttgatttttatgggaattttgataatagatttgggagggtagttataaagaggtttggggattatttatttgtgttatttttatttttttcgtgatttaatatagagtggtttggatttatttttttttaaagatttttgtttatgtagttgtaaaggtagttttagggggtttttggaagtttagcgttttttgtttaggaggagtaaaagttataattattttattttttgttttagaggatttatttttagtttgggtattatgtaaggggttgggttattggtgatattttttcgatatttattttttagcgtaaagttgattaagtaaattttttggaggaaggttattacgagaatatatggttttattttcgagtcgggtttatttagtgtgattgtaaattatatggatttttttgatttgtatagattttaggtttttgggtttagagtattttatagtagggaaaattagggaaaattatagttgatttattttttaggttaaaaatttaggttgtaggttagtattttttaatttggtatttttaaatttagttttagttataagatttaggagatattagtatttttagttaggtagtagttttgtgtttgtttgttttgtgaaaaattattttgtttagttatttttgtaaacggcgtttgttagggagtattttggtttaatggaattatggaagtgtagttaaatattaataattatgtgtttggagttatagataatattgatgaataaagatattgatttggtgatttatagagagttgtagttgttgttatagattgttataggtgatttgttttaagggttttaggtattggttgtatcggaattatttagggagtttgaatataatttttgtgttgtgtttatgtttggagatttcgttttaggaggtttggggtagatttaggaatttagatgattatgatgtgtggttatatttgggaaatttagttttttttaattgtgtttttttatagggaggaaattggggtttagagaggggaagtggtttagcgttttttaggtagttataagtggatgtgattttgtttgttttgtcgatttttaaattaggttttttttttaattgtttttttggttttttttgaaattttattttagttatggtgttttttttacgattgtttttagtaaagtattgagattagaggagtatagtatgaggttatttagtttagggtggtttttgatatttatattattcggcgattgtgatttttagttatagattggttgggttattttgggatagacgtgggtagggagtgaaattgttttttatttgttttagg

SEQ ID NO: 1696 - DNA, 8099 bp, Artificial Sequence
  chemically treated genomic DNA (Homo sapiens)
tttgaggtagatgaaagataattttattttttgtttacgtttgttttaggatagtttaattaatttgtgattgagaattatagtcgtcggatgatgtgagtgttaggagttattttgggttgagtggttttatgttgtgtttttttggttttagtgttttgttagaagtagtcgtagggggagtattatgattaaaatgaggttttagaggaggttaagagagtaattgggaagaaagtttggtttgggagtcgatagaataggtaggattatatttatttatgattatttggagaacgttgggttattttttttttttgagttttaattttttttttataaaagaatatagttgaggagagttgagttttttaaatgtagttatatattatagttatttagatttttgggtttattttagattttttgaagcggaatttttaagtatgggtataatataaaaattgtgtttaagttttttaggtgatttcgatgtagttagtatttgggatttttggaatagattatttgtgataatttgtagtaatagttgtaattttttgtgagttattaaattagtatttttgtttattagtattatttatggttttagatatatgattattgatatttggttatatttttataattttattgagttagaatgttttttgataagcgtcgtttgtaggagtggttggatagggtagttttttatagaataagtaagtatagagttgttatttaattggagatgttggtgttttttggattttgtggttgaggttgaatttaaaaatattaagttggggaatgttaatttgtagtttgagtttttagtttaaagggtggattagttgtgattttttttaattttttttgttgtaaaatgttttgaatttagaaatttgaggtttgtgtaaattagaaaggtttatgtaatttatagttatattgggtaaattcggttcgagaataaaattatgtgttttcgtgatggtttttttttaaagagtttgtttgattagttttacgttggggaatgagtgtcggggaaatgttattagtgatttagttttttatataatgtttaggttaaaggtgagttttttggagtaggagataaggtgattatgatttttgttttttttaggtaggaagcgttgagtttttaggggttttttggaattatttttgtaattatatggatagaaatttttaaaagagagtaaatttaggttattttgtgttaggttacggaagaagtgagggtgatataaatggatgatttttaaatttttttgtagttgtttttttaaatttgttgttagagtttttatgaaaattaagtttgacgtatttgatatttattttttgttatttttttgtgttgataataagtttagaggttttaaatttatttatttttttttattgttttgtttttttttaggtttttatttttatgtttatagttagttattattttttataatttataagttaattatttgagaggttttaggggtataaggaataagatagggtttttggttttaaaaatttaatattttaggaggagataggagggttagttatgcgtggtttgaggttggtattaatgttatgttgtggatttaatttagtttaaattttgtttagattggtaattaagatttaggatttaacgttgatgtttttttttgattttatataggtttaaaggattagaagtatttgggattttgaagttatttttaaatttttttttacgtaggtttattttcgtggattttttttagtagaatttgttagtaggagtgaagggatttagtatagggttgacggttatttttttatttttggttgggggaggatagagtttggagaatgtaggatgagaaggaggttttttaataaatggagcgttaatgatgttggagatttgtgaggttaggtttgggagggttttatttagttttataattcggagagttttagatacgttgtttttagtttttggtttgttggagatttgattttttttttttttttttttttttgagatagagtttcgttttgtcgtttaggttggagtgtagtggtgttatttcggtttattgtaatttttattttttaggtttaagtgatttttttgttttagttttttaagtagttgggattataggcgtttattattatatttagttaatttttatatttttagtggagacggggttttgttatgttggttaggttggttttgaatttttgattttaggtgatttatttgttttagttttttaaagtgttgggattataggtgtgagttattacgtttggcgagatttgatttttttattagttcgaaagtttaagttattatgtttttagttttacgttagtgaagattgaaaagatataatttgttttttggttttttaagaggatttatagtttattttaggttatagtttattcgggttatagtttattttaggttatagtttattcgggttatagtttattttaggttatagtttattcgggttatagtttattttaggttatagtttattttaggtcgtagtttattcgggttatagtttatttcgggttatagtttatttcgggttatagtttattttgggttatagtttttattcgtagtttgtgatattgattttttttattttggtaatatatgtaggggaagcgttagatattgtttaggtttatagtatagttaattattgagagaaggaaatttatttttttgttttaggtttttcgttttttttgatgaagtttagttattagggtggtggtggtcgttgggatagagtgtcgtgtgttatttttcgtattaggatttggaattgttgagtatttattggatatttgttcggattttattttgttttttggggtgggaataattttttgtagaatttcgtttttttgataattttttttatttttatacgttgatagttgtttttgagaatttaagggcgtcgtttttattttgttggttagtaaatgatattgatgtttatttgttaaggattttaattgatttttgggtgtttggatttgtggattattttcgagttttttatcgtcgggattgatacgtcgggattgattttgttggaaagatatatagaggaaggagaaaaaagttagatattttatttatttttggtattaatttattatatattttaaattatattagttaacgggattataaatgtatttgttaaatgtgagatattttatttgttatatggtagtttataaatttaattaaattttttaatttatatagggtattaaatgataattaagtaattttaaaaggaaataataaaattaatataaatagatagtaaattattaaggtttgtataggttggattggagagtaaagtattcgtttttttttgagttattggatttttattttgtggtttgttagtagtttagaagaatgtgagagaggttttaaagcgttatagagtattttttttgttttggatgttatgttggggaaataatgataagtaaaggcgtttttgttttttagtaggtaggatagtttttattattatttaagttgtatatttaaagttatattttatattaattatagttatgattttaaaaggaaaaaagtaaaggatagaggtaaaaaggttatttttcgtgaggtattttagtttattagttatagattttgttattcgttttttagtttttaggaaggttggggtagatttgagttgttttcggttgtgtttagtttatttgtatatggtttttttgcgtttttattatgtatttgtaagttcgattggtttttaaacggtattgttgtttattatttgtttttttttttatttgttagtaatttttgtggttaagttttttgttattttgtaatagagggtaagtaaggtcgttttgtttttaggagatttagggagaagagtgtgtaggttattgatgttggggtggttggtttcgtcgtttttttgtgtttttattgggagggtttggtcggggttgttgtgtttttattttatcgtcgtggtttgggcgtagggaagttagtttagttttggtttgaggtttgagtcgttaaacgtggggtagaaatttgagtttttttggattttaaatttatggtttgttataaagttgtaagtagtagttgtaagattgtttaattgtttattttgttttttttgggtttgagttttttaaatttttgaaatagtttgggagttgaaatacgtttttgtttagttgagatgatattggatttttttagaaaagatagttagggatggattgtttataattgtaatgatttgaggttaattttttagatttaatagttaggaggatggttaggaattggttaatagaaatggcgtatggatgttttttatttatttggggtttttggtgattgtaatttagttatttatatatgtgaagataaaaatatagtaagtgaaaaattaggatataaaatagtagttttataagaatgattatggttataaatatgagtaaggattagatatgaatattaggtaatgttagttattagggtttggcgtttgttgtattttttttgtaaagtggaaaataaaaattttaaagggatcgattgttgttaaaaatatttatagtaataagagataaattagttttatgtagttaggggttgtgtgtgtgtaaggggaggtagacgttttgggttgtattatatttgttgggttttttattatttattttaggtttaagaatgtaaatattatttagaaggatatgaattttgataagagcgatttttataattttattttgtttattatttatgttattgtttggttttggtttttttttattttttttttttttgggtttttaattaggtttgataggtttttaaaataattatatatttttttatttattataggtaattatttattaggttaagggatattattattttattatatgatgagatgttaatatatttaaatatttagttaaattaaatttgaatttggtagttagtggttgtgttgtttaaaaaggtttttgtattttttttcggtttatattaatgatatgttttgtacgttaaataattgacgaatttgaaggttaaatggtagggaggaagagtttttttttgtgcggttggagggtatcgagttgatagagttgtttttttttttgtttttttttttattggttttatagttttgtttttttttttttgaaatagttttgttttgttgtttaggttggtgtgtagtggtataattttggtttattgtaatttttgtttttcgggtttaagcgatttttgtgttttagttttcgagtagttgggattataggcgtgttttattatgttcggttaatttttatatttttagtagagatggggttttattatgttggttaggatggttttgaatttttgattttatatgatttattcgttttggttttttaaagagttgagattataggtgtgagatattatgtttggtttggttttataattttttgtaagaattttttttattttttgtattgttattttttttttatttaaatagaagttttaattgtattatttaagcgttttttggtttttttatttaggtttagagggtttacggaagggaaatgcggtttattttagaagtaatattttggggagaggaaatagatatttagtagtagtagtgagtagttatttttttgttttaggggttaaatgatttgttttggattttgtttatttttttttttgaggcgttttgtagagagggtagaaaatgtgtgtaggtaggtagatttttgagggtaacgtgtgtttttaggagtttttaggggtttagtttcgaaggtatttagttttgaatttttggtaattatggtaagtagtttttggaagagtaatacgttgtttttatttgtgttttgagttattatagaggttttgttttttgaaatattttttagttttttttaattttttaattaaaaaattttatattaataggttgaaatggttttagtgtaagaaaatttagagtattttttagataatttatgatcgggtagtttttttttataggttgtttttttttatttagttgtgttttttggggtttttttattgaatttttatttttattatagaatttggggtgtaaatataaagttatagttatttagaggagatatatattttttttttttaatttatttttttgtttttgttaggtagaggaaaatttttttcggtgattaatcgggtttgttaggagaagatgttatgtgttcggggttttttttgtttgtaagtttttgtttgtggagttttagattttttttttattttttttgattttgtagagttttggttggttttttttattaagatttgtatataataatggttgaaaataagttggtttaggaatagagaagtgtgagttgttaagaaggttggtttttgagaatgtttttttttaagttttttttttttaaaaggtatttttattttgttgggtggaaagattgtaaacgaggttaatattatagttgtgattttttttaggtagtttttgagtttttttatgtttagaaaaagttttagaaggaagtttttttttgtattttggatgtgtgttgttgttttaggttgagttggtgataggttgagggtggtgtcgtggattttatttttgttgtggaatgatagttggtagatagaagtttcgtttttttaggtttttgtatatgaggggtgtagttgattagttaatgggagtggttgatttttttttaatttttttgaagttaatgtattttatttttttaatttttgattttaagtaaaaaaggattgtttttatttaaatttttgatcgaatttttatttttttttttatatattttgtttttatagttaggagtaattcgtatttgaataagtatgtaattatttcgattggttataaatatttagttttttggaaatgtttgtgacgttttatttatttgatgtttattagtgttttttaagtagaaagatattatagaaatgttgaattttgattttatgtgttaagattaaagtgagtttattttttaggaaatttaatttttttttttaaaataaataaaaataaatgaattgtgggtttaacgttgagataggattagttataggttatagagttaattggtagttcgtattttttatttagagggaggttgaagtttttagggtattttttaagagtgatgggaattatggaacgttggtgtcgttcgaagtagtaaatatggaatttggttttttttatggagaagtatttttttagtaaagatgtgcgtaggtttatatgtgttcggttttttagaaataaggtaggtaagtcgggttagttggtttacgtttgtaattttagtattttgggaagttaaggcgggcggattatttgaggttaggagtttgagattagcgtggttagtatggtgaaattttgtttttattaaaaatataaaaagtagttgggtgtggtggcgggtgtttgtaattttagttatttgtgaggttgaggtaggagaattgtttgattttaggaagcggaggttgtagtgagttgagattgagttattatattttagtttgagtgataagagtgaaattttgttttaaataaataaataaaaataaaaatataaaaaatgagtcgggcgtggtggtgtatgtttgtaattttagttatttagaagattgatgtatgagaatcgtttgaatttgggaggtagaggttatagttagttaaattgcgttttagtttgggcgatagagtgagattttgttttaaaaaaaaaagaaaaagaaagaaaaaagaaataaggtaggtatagttttgtttgtatggagtttataggttaagtttaaaatttgaaaaagaaaattaattgttaggaaaaatacgatgtttttggagaggttggtgttgttatatatttcgtggtga

SEQ ID NO: 1697 - DNA, 9299 bp, Artificial Sequence
  chemically treated genomic DNA (Homo sapiens)
tcgttttttgggtttaaacgatttttatgttttagtttttcgagtagttgggattataggtatatgttattatgtttagttaatttttgtagtttttagagatagttaagattttgttttttaaaaaaaaaaaaaaattaaaatttttttttaaaaataaaataaaataaataataataataataaaaatcgggcgtagtggtttacgtttgtaatttttatattttgggaggttaaggcgggcggattacgaggttaggagattgagattattttggttagtatggtgaaatcgcgtttttattaaaaatacgaaaattagttgggtttggtggcgcgtgtttgtaattttagttattggggacgttgaggtaggagaattttttgaattagggcgtcggaggttgtagtgagtcgggatggtgttattgtattttagtcgggcgatagagcgagattgtatttaaaaaaaaaaaaaaaagttgggtatttatttgtaggtatttattattaagttttagttatttgggaggttgaagttggaggattgttttagtttagaaggttaagggtgtagtgagtttatgttttgtttaatatgtttatttaaatagtttttttttgttttgtaagtttgtatttatatagttattttttttttttttttgagatagagtttcgttttgttatttaggttggagtgcggtggtgcgatttcggtttattgtaagtttcgtttttcgggtttacgttattttttttttttagtttttcgagtagttgggattataggcgtttgttattacgttcggttaatttttttttgtatttttagtagagattgggttttatcgtgttagttaggatggttttgattttttgattttatgattcgttcgttttggcgtttcgaagtgttgggattataggcgtgagtcgtcgcgttcggtttttatagttatttttgtataagtgttttgttttgggaaattaggtgttttgtaattgttgtgattgataatgatattggagaaggaatataagacgaaggaagttgattttgggtaggtaattttattttattttgtaatttttttttttttttgtatgtttgtgagaatattttaagattgaagaagttgtggagagaagagtgaattgtttgggaatttttttattatttttttttttaggatagtataaagaataaattattgttattttatgtaagaaatgtgagaattgtggttataaattatttaatatattattttgtatattatttttttattatttatataatttattgcgatatattttgtttttttttttagagttgttaaatttttgttatattagtattggttaaattaggtgttaaatgattgagttttaagatgggtaaattatgatttcggattatatttttttttgtttggcggttgggaaatttcgtaagttttgtgtgtttttattagattgtttttgaaggcggtggttttttgtggattttcgtagagcgttaacgttggtttaaaaaattttaaagttagattatttaaaaggtatataaaaggtagttatattatttataagttattttttagttttaaaacgtgatgaagtatttttagttgtttttttttgaattaatttagtaatttttttttttgttaggttcgcgttgttgttaagattttagatgaaagacgtttcggggatttcggtattttgggttttttcggttcggatatttttgattaagcgttgttttttggcggcggttttgttgttcgacgtttttttagtttagtggagtttattttttttggtttggaatttggaagttgatgtaatagttatttcgagggggcggggagtcgggaattcggggtggaagagacggttttcgggagatttttttttcggtttcgaggaggtatatttttcgtttcgtttttcgttttcgtttttttaataaggggtttttcgtttgggggtattatcgagatttagttaagtatttcggggtcggaggtagttgtggttaggggttggggcgttcgtttagatttttgtttggtcgttagtttatgtagggttgggagggagggaagaggaagttgagcgtttatggggtggaggattagtttttaagggtattcgcggttatttttattttttcgtagtaatttagttgtgcgggagcgaggagcggatagggagcggtttgcgaggtttcggtgtttggatttttgcgcgtttttcgtttatatttattataatttttttttttagcgttttttagagtcgggggaagggcgggggttgtttggttaggtggagggaacgtaagggacgtttgttggggtgaggttttggttttttatagttagatttgggtttcggggttattttgttttttagaggggtaatgaaggcggacggtggttgggttcgagtttgggaaggcgttgttttagggtcgtagattgggggtttaaaggaaggagggaaataaaagggagataaacgatagggaggggttcggagaaagcgagggtggtgggggggtggggatgggagaaagggataaaggtgagtgaggttagtaggttgggcgggggcggagagggggatgggaacgattaaggggtaggttagtaaggatcgcgggttaggggagagttttttaggggtagagtagcgggtcggcgtatggtggggagttgagtgtatgtttcgaagttcgttgtagagtttatttgtatatgtgtgaatttgagcgttcgttttttttcggttttttttttttttgttttttattttttcgcggttatagtatttagttttcgttatttttacgtcgtatttagatcggttatttgagtttgggtgtgaggtagagtagataagaattttttggatttagggaaagagtgttagatgataggttttttgttttgttttgttttttttattaatgaaataaaagttcgttttaaattattttaggttttttagtaaaattgtgaaagttatatttttttttttgtttttaacgtattattgttaaaaagagtattttcgggtattttttgtttaggagttagagcggtagttaaataggagggtttggagagtaaatttaaggatatgcgtaggagtttagttatttgggaaattaaatagataatatagtttatttatttatttattaatttagtaaatatttattaattgtttatgtgagttttgtattgcggggatatagtagtgaataaagtttttgtgacgtttatattttagtgggagtgttgatagtaaataaatgatatcgggaatggataatattattgggaagtatgttttaggtagggagaataggagttgtaaaagttgtgaggcgggagtatgtttgttgtgcggttatcgtagggaagttagtgaagttggagtggagtggggaagatagtagggaggtttatgtagataaggatagtttttttttttttaggattttttttacgatttggattcgattttagagtgtaattaaggggtcggtaagttgggtagtaggttgagagtgtttaaaggatattaaaatatttttggaataatttaggtatttggtgttagtgtattatgatttttgtgttttggtgaaatatgagttggtttttatttagtgatatagatttattgataattttttatttggattgtttgtgtttggagtaattttttaatagataggtgtaaattgtaggatgtagttttggggttagttagttgatagttgtttaaaggcgttagttatagttgtaattttaaaaatttttgatgtattgtgaatgttgttttttgagggtaagagatttatattattatttatattttaagtggtttattatgtttattaagaagttgtttgttttagaagattgtatgtgatgaagatatgtaataattttttttttttttttttttggattggagtgtttattgtaattttcgtttttcgggtttaagcgatttttttgttttagttttttaagtagttgggattataggcgttcgttattacgtttgttaatttttgtaaatttagtagagacggggttttattatgttggttagattggtttcgaatttttgattttgtgatttgttcgattcggttttttaaagtgttgggattataggcgtgagttatcgtgttcggttgatgtgtaataatttttaattttaaatataaagaggtttatataatttgtattttaggaaaattgatattttttttatttttgttaagtaaacgttcgacggatgtttaaataaaattggttcgaagggatgttaatttattagtttgtttagggtgttatggtttagttggtttttatttggcgatatatatcgatattatttgaattaattagagattttagttgtgagtgagtttgtttggtgtttaaatgtgtgtttggttgtttttttataagtggttttttttggtttgtattatttttttttggtttgttttaggggttgaaatggtattgatatttttgagatgggattgtagagttttttttttttaattatgggatcgtattttttttgtagaattaaggatagtatatgagtgggagatgagtaggaaatgggatgagtggagttgtaagaggtattagaggttattgttaatggaggggaaagtttaagtgtttagtaaatgtagggtaataaggaaggggggggtgaggttgaggtagggaggagaaggagttgagatttaggtatttggtgttagtgtagtagagaaggtgtttggaggcgggtaggtattgaggttttttgggtttgattaggtagttttagttttagttcgttttttggttttttttcgttgtcggttagagttatatatgtgtttttttgttttttattttagttttcgttattttttgttttttttgttttttagagttaatagttgttgtagtatgagcgatacgtttggtttttttaattagtattttttttttttttttgatttagttggtagtttttttttttcgtatttgtttaaaggttattggataggtaagaggtgggagaggagggataatgggcgagaggggaagtgtaggaggaggatggagttttaaaaattggttgaatggagatttaagagttttttgttttttgattttagttttgtttttttttgggttgaattttttgtttagagattttagtttttttttaatggaagttttggttataggagtaaataattttttttttgttttattttttttttttttttttaaagagattgttttagttatagtggaatatagaaaaataaatagagaattggggagggaggagttgagtttttagtttggagtgatggggaaatttagttatattagagtgtatttgttttttgtttttgttgttaggggaggtagtatagattgattggagttaggaaggtaggatatggggtttttgggagagaaagtgtgtttttatagtagttttttgagtttggttgaggagttaagatttcgaattatgtattagtttttggagaaattgtgttttggtgttgttattcgagggtgaggttagggtgaggggttttattggttgttttgtttagtattgtatattggaggttttgttgttagtttttgaattaaattttttttataagttgtaggatgagtgtgttgttttgtaatttttattgggtgtttagagatgaatgtattttagatagggaaaggtaataagggttgttgttattttatggggttttttatgtaaaatttggggtgggttaggtacggtggtttatatttttaattttagtattttgggaggttgaggtgggaggattacgaggttaggagttcgagattagtttggataatatggtgaaattttatttttattaaaaatataaaaattagttgggcgcggtggcgggtatttgtaattttagttatttgggaggttgaggtaggagaattcgggaggtagaggttgtagtgagtagagattgtgttattgtattttagtttgggggataaagtaaaattttatttcgggtaaaaaaaatttaaaaattaaaaaaaaaaaaaaattaaaaatttggggtagaagagtttttttgggagagtttaggggtgttgttggttttaggttgtttgaatggtggggttgtttgaatggtggaagtattattttaagatttagggttttagggagaaatgtgagttgttaaagatggtgtttttttgtttagggtgttaggtagtggttgagaaaagagggggtttttatgtttttaatgtatggtagttttttttgtttagtgcgtacgggtagattgaagtaggttagagtttattagtattttttggtgttattattagggcgtgttgtttgttggagtgtgggttttatttttagtagatttttgttttaaaattttacggataggattttattttttagatgttattagttaggaatgaaattttgtatatttttttttttatttttttttatagttttttttttttttgtttttttttttttttttttttttacgttatattaggatatatgtttattttttggtgttagtgaatttggttttaaaagggtaggcgtgatgatgtgtttgtgtttttttttttgtttgttttagaagtgggtattttagtaatagtagtattgttaagaggatttgtaattattttttatttttgtaaagaatgagaaaggggaggggtagttaggaaggagattaataaattttgttggagtttttcgtttaggttatagattgaaggatgatagaggttttttttttttttaatttagtttgtttatatttttttttaggtaatttatgtagataatttttgtttaaaagtaaggtttaaggtggtatcggtggtttacgtttgtaattttattattttgggaggtagaagtaggtggattagttgaggttaggagtttaagatcggtttggttaatatggtaaaatttcgtttttattagaaatataaaaattaggttgggtataatggtttatgtttgtaattttagtattttgggaggtcgaggtgggcggattgtttgagtttaggagtttaagattattttggttaatgtggtgaaatttcgattttattaaaaataaaaaagattagttgggcgtggtggtgtgtatttgtaattttagttattcgggaggttgaggtaggagaattgtttgaatttagtaggtggaggttgtagtgagtcgagattgtattattgtattttagtttgggcgatagagtaagtgtttgttttaaaataaataaaataaaataaaataaaataaaataaaaatatcgaaataaaaatataaaaattagttaggtgtaattttagttatttaggaggttgatgtatgagaattgtttgaattaggaggtggtggaggttgtagtgagttaagatcgtgttattgtattttagtttgggggatagagtgagattttgttttaaaaaaagaaaataaataaaaaaaaaaaaaaataaaaggaaggtttagagattaaggtaggttagggggatggggagatggagagatagtatatttgtgtgattaagagtatatgagttttggaggttttatgagataatgtgtttaagtttttagtagtgtgtttggtttagtaagtgtttaataagtgatagtaattattattataggagtattttggagaaaaggagagttttttttagaaggattttagattattgtgagtttgttttgggagaagtatgatttttgggaacgtttatattagaattttttttttagattaaattaaaagtttaaagagttagaatgggaggatgtatggtagagatgttttttagagatatttagatttttattttttggttgtagaataattaaagagggttagaatagataggagaagaaatagatagttggattttagaatggatagggtttatttttgttggtaaaagagatttagaatattagatttaaagtaaataataaagatagtataaattatgtgatttttaaaaagtgtttagttttttttgtttgttttgggtttgtttgtttaatagaatttagtgaaatttgatttttttatatttttttttaattttttttttttgagatggagttttgttgtgttgtttaggttggagtgtagtggtttaatgtgggtttattgtaagtttcgtttttcgggtttatgttattttttttatttttttgttttagtttttcgaatagttgggattataggtgttcgttattacgttcggttaatttttatttttttgtgtttttagtagagacggggttttatcgtgttagttaggatggttttgattttttgattttgtgattcgtttgttttagttttttaaagtgttgggattataggcgtgagttatcgcgtttggtttgatttttttatattttttaggaaagtggagttaatttatatttgaggaaggcgtttataggaatttatgtttattttagagattttggtatgttttgttaagaatgaaaaggtacgtgggtttggtggggatgtagttagatatttgattttttgattgtgttttttttgaagtagtttgaggtttagattttggggtagtggtttaggtttggaggtaattttttagtttttttttgtatggggaagtgtgtagagtttttttagaatatttagttatatggtgtagagattgtttttatattttttgtaattttagtatgggaataagtttttgtgttatattgtgtaattttttttttttttttaaatgtttggggtgagagagaagagaggttagggtggggtatggaggatatagagagagagagtgttgtgtatttttttttcgttattgttttgtttttagttaatttgttttgggatagtttttttagggttatagatattgtatttagttgattgtttttttttttgggtttttggttttagagtagagttgataaaggagatttttgagagagtatttttttattatagaaagtgttgagttaagagtttttagttgttttttttgtagatgtgaagggttagtgaattttggatttagatggttgtttaatattttttttttttttttttatttttttttttgcgggttgttttattttttttattttttttgtttaaatttatagg

SEQ ID NO: 1698 - DNA, 9299 bp, Artificial Sequence
  chemically treated genomic DNA (Homo sapiens)
tttatggatttaagtaagaagggtggaggaggtgaggtagttcgtaaaggaaggagtgagggagggggaaaggagtattaagtaattatttgggtttaaggtttattggttttttatatttgtaaaaggggtagttaggagtttttggtttagtattttttgtgataagaaggtgtttttttaggaattttttttgttagttttgttttgggattaggggtttagaagaaaggatagttagttgagtgtagtatttgtagttttggggaagttgttttagagtaagttagttgaggataggatagtagcggggaaggaatatatagtattttttttttttgtgttttttatgttttattttagtttttttttttttttattttaagtatttaagaaagggaggaaggttgtatagtgtgatataaaggtttgtttttatgttgagattataggaagtgtaagagtagtttttatattatgtgattgggtgttttaagagaattttgtatatttttttatgtaaagagagattggggggttgtttttaagtttgggttattgttttaaagtttgagttttagattattttaaaagaaatatagttaagagattaaatatttgattgtatttttattagatttacgtgtttttttatttttgataaaatatattaagatttttgggataagtataaatttttataaacgttttttttaaatataagttgattttatttttttaaaaaatatgaggaaattaggttagacgcggtggtttacgtttgtaattttagtattttgggaggttgaggtaggcggattataaggttaggagattaagattattttggttaatacggtgaaatttcgtttttattaaaaatataaaaaaataaaaattagtcgggcgtggtggcgggtatttgtagttttagttattcgggaggttgaggtaggagaatgaggagaatggtatgaattcgggaggcggagtttgtagtgaatttatattaggttattgtattttagtttgggtaatatagtaagattttattttaaaaaaaaaaaattaaaaaagaatatgaggaaattagattttattgaattttgttggatagataggtttagaataggtagaggaagttgagtattttttggaaattatatagtttatgttatttttattatttattttaaatttggtattttgagttttttttattaatagaaatagattttatttattttgaaatttaattgtttgtttttttttttatttgttttaattttttttggttattttataattagagaatagagatttaaatatttttgggagatatttttattatatatttttttattttagttttttaaatttttaatttaatttaggaggaggattttggtgtgagcgtttttagagattatgttttttttaagataggtttataatgatttgaaatttttttggaggagattttttttttttttaaaatgtttttgtaataataattgttattatttattgagtatttattgggttagatatattgttaaggatttaagtatattattttatggaatttttagagtttatatatttttaattatataagtatattatttttttatttttttatttttttggtttgttttagtttttaggttttttttttatttttttttttttttatttattttttttttttgagatagagttttattttgttttttaggttggagtgtagtggtacgattttgatttattgtaatttttattattttttggtttaagtaatttttatgtattagttttttgagtaattaggattatatttggttaatttttgtgtttttatttcggtatttttattttattttattttattttattttatttattttgagatagatatttattttgtcgtttaggttggagtgtagtggtgtaatttcggtttattgtaatttttatttattgggtttaagtaatttttttgttttagtttttcgagtagttgggattataggtgtatattattacgtttagttaattttttttgtttttagtagagtcggggttttattatattgattaggatggttttaaatttttaaatttaggtaattcgtttatttcggttttttaaagtgttaggattataggtatgagttattgtgtttagtttaatttttgtatttttagtagagacgaggttttgttatgttggttaggtcggttttgaatttttggttttaattgatttatttgtttttgttttttaaagtgatgggattataggcgtgagttatcgatgttattttagattttgtttttggataggaattatttatatgaattatttgggggaagatgtaagtagattagattaaaaagaaagaaagtttttgttattttttagtttatagtttagacgaaaggttttaataaagtttgttaattttttttttggttgtttttttttttttttattttttgtagggataagaggtgattataagtttttttggtagtgttgttattgttagggtgtttatttttaaagtaaataaaaaaaaaaatataaatatattattacgtttgtttttttaagattaaatttattggtattaaggggtgggtatgtgttttaatatgacgtaaaagaaaggaaggaaggagggataaaggaagggaaaattgtgagggggaatggagagagaagtgtatagggttttatttttgattggtagtatttgaaaagtgaagttttattcgtggaattttgagatagaaatttgttgggggtaaaatttatattttagtaaatagtacgttttagtggtagtattaggaagtgttagtggattttaatttattttagtttgttcgtgcgtattaggtaagggaggttgttatgtattgagaatatgaagattttttttttttttaattattatttagtattttggataagaaggtattatttttggtagtttatatttttttttgagattttgggttttagggtaatgtttttattatttaggtagttttattatttaggtagtttgggattagtaatatttttaggtttttttaaaggggtttttttattttaggtttttggtttttttttttttttggtttttgggttttttttattcgagatggagttttgttttgttttttaggttggagtgtagtggtataatttttgtttattgtaatttttgtttttcgggtttttttgttttagttttttaagtagttgggattataggtgttcgttatcgcgtttagttaatttttgtatttttagtagagatggggttttattatgttgtttaggttggtttcgaatttttgatttcgtgatttttttattttagttttttaaagtgttgggattaaaggtgtgagttatcgtgtttgatttattttaggttttatatgagaaattttataagataatagtagtttttgttgtttttttttgtttgagatgtatttatttttgaatatttagtgaagattataggataatatatttattttatagtttgtggaagaaatttgatttagaaattggtagtagggtttttagtatgtagtgttgggtaggatagttaatggagttttttattttaattttattttcgaatgataatattaaaatataatttttttaggaattagtatataattcggggttttggttttttagttaagtttagggaattattataagaatatatttttttttttagagattttatgttttgtttttttggttttaattagtttgtgttgttttttttaataatagaaatagaaaatagatatattttggtatgattagatttttttattattttaagttagaagtttagtttttttttttttagttttttgtttgtttttttatattttattgtggttaagatagtttttttaaaaaaaaaaaaaaaaagtgaaataaaaaagaaattgtttatttttgtggttagggtttttattaaggaagggttgaagtttttgggtagaaggtttagtttagggagggatagggttgggattaagaaataggaggtttttgggtttttatttagttaatttttaggattttattttttttttgtattttttttttcgtttattgtttttttttttttattttttatttgtttagtgatttttgggtaggtgcggggaggaggggttattagttgagttaggggagaggggaaggtgttagttaggagaattaagcgtatcgtttatgttgtaatagttgttgattttgaggagtagaaaaagtagagggtaacggggattgaaatggaaaataggaaaatatatgtgtgattttggtcggtagcggggaggggttaggggacgggttggagttgggattgtttggttagatttagaggattttagtgtttgttcgtttttaggtattttttttattatattggtattaaatatttgagttttagtttttttttttttttattttagttttattttttttttttttgttgttttatatttattgagtatttaagtttttttttttattgatagtgatttttgatgttttttgtaattttatttattttattttttatttattttttatttatgtattatttttagttttgtagaggggatacgattttatggttaggggaaggaaattttgtagttttattttaagagtgttagtgttattttagtttttaaagtaagttaaggggaggtaatgtaagttaaggaagattatttatagggggatagttaagtatatatttaaatattaagtaagtttatttatagttgagatttttaattggtttaggtgatatcgatatatgtcgttaggtaagagttaattgggttatggtattttgggtagattaatgagttggtattttttcgaattagttttatttaaatattcgtcgaacgtttatttagtagaggtgggggaaatattaatttttttggaatataaattgtgtaagtttttttatatttaaaattagaaattattatatattagtcgggtacggtggtttacgtttgtaattttagtattttgggaggtcgagtcgggtagattataaggttaggagttcgagattagtttggttaatatagtgaaatttcgtttttattaaatttataaaaattagtaggcgtggtggcgggcgtttgtaattttagttatttgggaggttgaggtaggagaatcgtttgaattcgggaggcggaggttgtagtgagtattttagtttaaaaaaaaaaaagaaaaaaattattatatatttttattatatgtaattttttgaagtaaataattttttggtaagtatagtaaattatttaaaatgtggataatagtataaattttttgtttttagggagtagtatttataatgtattaggaatttttggaattataattgtgattaacgtttttaagtaattgttagttggttggttttagggttatattttgtaatttgtatttgtttgttggaaaattattttagatataagtagtttaggtaaggagttgttaataagtttatgttattggatgaaagttaatttatattttattaagatatagaaattatagtatattggtattaaatatttgaattattttaaagatattttagtgttttttagatatttttagtttgttatttaatttgtcggttttttaattgtattttggagtcgggtttaagtcgtaagggaggttttagaaagagagaagttgtttttgtttgtatgggtttttttgttgttttttttattttattttagttttattggtttttttgcggtggtcgtatagtaagtatgttttcgttttatagtttttgtaatttttgttttttttgtttggaatatgttttttagtgatattgtttattttcggtgttatttgtttgttgttagtatttttattagaatgtaagcgttataagagttttgtttattattgtattttcgtagtgtagggtttatatagatagttaataaatgtttgttgggttaataaatgaatgaatgaattatgttatttatttgattttttaggtggttaggtttttgcgtatgtttttgaatttgttttttaggtttttttgtttggttgtcgttttggtttttaagtaaggagtattcggaggtattttttttgatagtaatgcgttaaaggtaaagaagaaagtatggtttttatagttttattgggaggtttagaatgatttgaaacggatttttgttttattaatgggaaaagtaaagtaaaataaaaagtttattatttaatattttttttttggatttaggaaatttttgtttgttttattttatatttaagtttaggtgatcggtttgggtgcggcgtggagatggcgagagttaagtgttatggtcgcgaaagggtgaagggtaggggaggaaaaggtcgaggggaggcgaacgtttaggtttatatatatgtaagtgggttttatagcggatttcgaagtatatatttaattttttattatgcgtcggttcgttgttttatttttgaaaagtttttttttggttcgcgatttttgttggtttattttttggtcgtttttattttttttttcgttttcgtttaatttgttggttttatttatttttgttttttttttttatttttatttttttattattttcgtttttttcgggtttttttttgtcgtttgttttttttttattttttttttttttttgggtttttagtttgcggttttaggataacgtttttttaagttcggatttagttatcgttcgtttttattatttttttgaagaatagggtggtttcgaggtttaggtttggttgtgggggattaggattttattttaataggcgttttttgcgttttttttatttggttaagtagttttcgtttttttttcgattttaggaagcgttagaagagggagttgtggtgggtgtaggcgaagggcgcgtaaaggtttaagtatcgagatttcgtaaatcgttttttgttcgtttttcgttttcgtatagttggattattgcggggaaatgaaaatgatcgcggatatttttagagattggttttttattttatgaacgtttagttttttttttttttttttttaattttgtataagttggcggttagataggagtttgggcgagcgttttaatttttgattataattgttttcggtttcgagatgtttggttgaatttcggtagtgtttttagacgggaagttttttgttgggggggcgggggcgggaggcggggcgaggaatgtgttttttcggagtcggaggaggggtttttcgaaggtcgttttttttatttcgggttttcgatttttcgttttttcggggtagttgttgtattagtttttagattttaaattaaagaaagtgggttttattaagttgggaaggcgtcgggtagtaaagtcgtcgttaggaggtagcgtttaattaaaaatgttcgggtcgagggggtttaggatatcggagttttcggagcgttttttatttgaagttttagtagtagcgcggatttaataaaaaagggagttgttgaattagtttaagaaaaggtaattggaaatgttttattacgttttaaggttaaaagatggtttgtaaataatataattattttttatatattttttggataatttagttttggggttttttaagttaacgttggcgttttgcggagatttatagagagttatcgtttttaagagtagtttgatagaaatatatagagtttacggaattttttagtcgttaggtaaggaggaatgtagttcgaagttatgatttgtttattttgaagtttaattatttaatatttaatttagttagtattgatatagtagagatttgatagttttgggaaaagaagtagaatatgtcgtaataaattatgtaaatagtaaggaaataatatgtaaagtagtgtattgagtaatttgtagttatagtttttatattttttgtatgaggtgatagtgatttgttttttgtattgttttaaaaagggagataatgaaagaatttttaaatagtttatttttttttttataatttttttaattttagaatgtttttataggtatgtaaaaaggaaaagagattgtaaaatgaagtagaattgtttatttagagttagtttttttcgttttatgttttttttttaatgttattattaattataataattataaggtatttaattttttagagtaaagtatttgtataaaagtaattgtaggggtcgggcgcggcggtttacgtttgtaattttagtatttcgggacgttaaggcgggcggattatgaggttaggagattaagattattttggttaatacggtgaaatttagtttttattaaaaatataaaaaaaaattagtcgggcgtggtggtaggcgtttgtagttttagttattcgggaggttgagggaggagaatggcgtaaattcgggaggcggagtttgtagtgagtcgagatcgtattatcgtattttagtttgggtgatagagcgagattttgttttaaaaaaaaaaaaaaagtaattgtataaatataaatttatagaatagaaggaggttatttggataaatatattagataaaatatgagtttattatatttttgattttttgggttaaagtaattttttagttttagttttttaagtaattgggatttggtggtgggtgtttataggtgggtatttagtttttttttttttttttagatgtagtttcgttttgtcgttcggttggagtgtaatggtattatttcggtttattgtaattttcgacgttttggtttaagggatttttttgttttagcgtttttagtagttgggattataggtacgcgttattaagtttagttaattttcgtatttttagtagagacgcggttttattatattggttaggatggttttaattttttgatttcgtgattcgttcgttttggttttttaaagtgtggagattataggcgtgagttattgcgttcggtttttgttgttgttgttgtttgttttgttttgtttttgggggggggttttggtttttttttttttttaagaaatagagttttggttgtttttaaaaattataaaaattagttgggtatggtggtatgtgtttgtaattttagttattcgggaggttgaggtatgagaatcgtttgaatttaggaagcgg

SEQ ID NO: 1699 - DNA, 5829 bp, Artificial Sequence
  chemically treated genomic DNA (Homo sapiens)
aagtaggatgaagttgttttttagagttatagttatcgttttgggataggtagaggaattgaggtttagggaaaggtagttgttgttttatttatataggaatgagttgtgaaaatttggttgtttgttagattttgaaagagttttttgttttgtgttgttttttggttttgagatttggaaatatagtgaattttaggtaagaatatagtgatttttagttaagggtgaagttggtatttgttattagaatggggcgattcgaaatatatttttttttagatttgagtaacggggttttttttttgtattttatattttaggtcgttttgtgttttggggcgttttttttaaaattgtttatgtttttttggagtgtttgaagttagttaggattaatggtgttatggggtagagaattttagtttggattgagaattgtatgggttttagtttaagggggtgttttttattttgtatttttttttttattgttagaatttagggtagttattttattattttggatggtttttggtaggagtttgtggttgtttttgttttttttttagggttttttaggttatttttgtgtaattttaaaggggttttttagttgatgttttttttttttttttttgattgatttatgttttttcgggttagtgttgagttataatggattaggtagagatattttttgtgtaaatgagatgttttttttattttaattttgagtttttttagggttggttatataatttataagatttaatgtaaagtgaaaatgtggagttgtttgtttaaaagtaggaaaaaaagtgttaacggtattaaaattaattttttaattttttttggtagtttttttttagatttgttatggtgttaaaaaaattatttattgttgtttttttataagtatgtggatatttatagggagagtgtagatttttagaggtgcgtagggtttttgtttcgttatttggtgtgtgtaggatttattagttgttagggtttttttgttattagtattttggtagttagggataagcggttatattaataatatttgagatagtaattggaagttagtatttagagaaggtataaaggatgatgtagttttataagtaatgatgtaattaattttaataaatggtattgggaagtgtagaggtaagtaggttttattagttagggttttttagagaaatagaattaatagttgattatttggttatttatttatttatttatttatttatttatttatatttatttatttatttatatttatttgttagttaagatttgtttatttgtttgtttatttatttattaataggtttaattaggtttattttgttaagaaataagattatgttttgttaaatatttaatgggatagagttagatgggtttagatttaaggattaagttatttagttaaagattgatagttttttgtgcgtttaatgtgtgtagggatacgtcggtaataaaaataatgtgtaatgtattgaggggattagatagtttgttgagtgttttttaaatattttttataataattgtacgattttagaggtagtaatatttttattttttagtggaggtagttgaagtttaaagaggtttagtgatttgtttttaatttgtaagtttgattttgaagtttaggtttttaataattatgtggtgtcgatttcgtgggcgtgtttttttttgtagttttaggtttagtgtaatatttgatatgtggtaagaaatgttaaataatttttgtgtgaatggtttgtataaatgaatgaaggaatttataggatttaggtagaaggtaataaagggtgtgtgaaatagatttttttttttgagatagagtgttatttttgtagtttagtggtatgattttagttaattgtaattttgttttttaggttgaagtgatttttttgttttagttttttgagtattataggtatatattattatgttcggttgatttttgtatttttagtagagatgggattttattatgttggttaggttggttttaaatttttgattttaagtgatttatttattttagttttttaaagttttgggattataggagtgagttattatttttagttttgagatagattgaatgagttagttttaggttaagatttggttaggagtggaagtgttttttattagataggttttggggattagtatgtgagtaatttgttttagaaaagtttaattttgtgtgtgtcgttaattcgttatgtagttttgggtttggatttttttttaagggatttagttttttttatgtaagttgtgggtttggtttaggggttagtattttttgtaaaggattagacgataagtattttaggttgtgtagtaaatattttaggtttttgttgttattgtagtggaaagatagttttagataatatataaattaatggatgtgtggttatgtgttaataaaattttatgaaaataggtaattaggtggatttggtttaaggattgtagtttgttgatttagaaaatttttgaagttttttttttagttttaatattttatgatgtaaatatttagaattaattatgttaaagataataatgattatatattattatttttttatgatatttatggaagatattgttaattgggtatagggtttttttttgatgagaaaggagttggttttaattagttaattatagattgagtaattagttaattatagatttaaaaaaaatttaagttgtagtattttttttttaattttttttttttttgagacggagttttagtttgttgtttaggttagaatgtaatggtataattttagtttattgtaatttttatttttagggtttaagtgatttttttgttttagttttttgagtagttgggattataggtgtgtgttatattgtttggttaatttttgtatttttagtggagatagggttttattatgttggttaggttgtttttgaatttttgattttaagtgattcgtttattttggttttttaaagtgttaggattataggtataagttatcgtgtttagtttttttttattttttaagaaataaatatttagaaaattttagataattttttgagtgtggtattgaggaaaataggaataaatagagagagagagagagagagagaataggaattttgtgagagaaattaaattattttttgggtggtggaagtgagaataaaaattttgatttgagagtgttattatttattggtggaaattatagtttttattttttttttatttattttattaagtattttaattaagagtgaatgtatttggtttatagtagttattttgtgtatattaatttttttttttttttttttttattaaaatttgattgatgattgattatgtttaagttttttgatttattaaaatttaaattatggagtgatttttgtataaagggatttgttgttagttgtttgtttggttgtggaatatttaaatattttatgtggggttatcgttatttgataatgagtgggttttttatgtttgtggaaagttttataaatttttattttaggaatgaatgggagaattttaagtatgaagataatgagttaagagtttggagtttgtagttagatgagttttggttgaattttattttattttatttttttaagatagggtatcgttttgttttttaagttggaatgtagtggtataattatggtttattgtagttttaaatttttgggttaaagcgatttttttggtttagttttttaagtagttgggattataggtatacgtacgttattatgtttggttaattttttatatttttttgtagagatggggttttaatatgtggttagggttggttttaaatttttatttttaaggaatttatatattttagttttttgggtagttgagatagtaagtgtgcgattttatatttagttatgggttgaattttagagataatggtcgttttttttataattagaagtaatttatgtagattgggtagtaaatagaatgggtttaattttttgttgttatgtgagatttgtaagggattttggggaattttaggaagtaattttttaagattttaaattattttatagttaaatgtagattatagtgattgatgagttgttttttttttttattttagatttattttaattttttttagtgggaagggatattatttatttgttttttttatttagagtttttttatgtttttaattttataattttttgagaagggttgatttgttagtattattttattttatagttgagataattgagttttagagagatttgtggagagcggagtttttttttagtttttatttgtgagtgttttttttgtgttaggtatagaataggtattggggatataacggtgtaaatattttagggaattaagtattagttggttgaacgagttgaatttttgagaaagaaattgtattgagtaattagtagagttttataatgtttgagagtttagtaatgtgagaattagaattagtaatgtgagaatagaatgtattgtataaagttttagtagggagtttgtgtttggttttagttttaggttcgggtagtatttttgtaattgattattttttttttttttttatttataaggttaatggtttgggattttgtgatgtttagggtttagatggatattgagatggtttttttaattaattaattttttaggttaatttttttttttttttttttgatagttgttgtgttggttttatagttttatttggtataggaaagataaataatttttttggtgttaggatttttggtttttggttacgttttttgtttatgtaatagtagttgggagaggtcgaaagaattttggtggggttatatttattggtgaaagaataaatagtgaggtttggtattggttattagagttatttttgtttttattatgaagtttagcggtttttttttttttttggtgttgtttgttttgggaattttggtattttgggttgtggaaggttttggaaagtgtaagttggagttattttggtttaatttgggttgtagggttagaggtggggtttttttgtggtgtgggtgtgtttttttttgtaggttttgattttttagtttagtttcgggagatttttttgagggtggaatatatgtttggttgagttttaaggtttgtgtgatagtttgagtttttggaaatgttttttttatgtagttatgttgttagtttaggttttatttttttttttttttttttttttttttttttttttttatatttcgtttttttttttatttgtttgcgatttttaaattattagtttttgattttgtttttttgtgtttttgtttttgttattttgtttttgtgtttttgttttgggttttagtttttaattttttttatattggttttatttatttttgtttatttttttttatttttattatttttagtttttttttttgtttttgtgtagttttgttttgtttttgggtgggaggttttgattagaagtttgttgttttttttttgggtgtgaaacgttttttgtttatttgtttaatttaattaagtttattaatatatttggagattaggtaggtatgattttttgggttttgtggatagttattgaggtaagggttttttttttttaaaagtggtgttttgtttaggaggtatgatgggtttttagtatttagtttttttttgattttttgattttttttttaaaagt

SEQ ID NO: 1700 - DNA, 5829 bp, Artificial Sequence
  chemically treated genomic DNA (Homo sapiens)
gtttttgaagagaaagttaagaggttaggaggaggttgggtattgaggatttattatgttttttgaataaagtattatttttgagggggagagatttttattttagtagttgtttataaagtttaaagggttatgtttgtttgatttttaggtgtattgatgggtttgattaaattagataaatggataggggacgttttatatttaagaaaagggtagtaggtttttagttaagattttttatttaagagtaaaataaggttatataaaggtagagaggaaggttgggagtgatggagatggagagaggtaaataaagataaatagaattagtgtgagagaagttgagagttaaagtttaaggtagaagtatagagataaaatagtagaagtaaagatataaggaagtagagttagaaattaatgatttgagagtcgtagataggtgaagaagaaggcggagtatgagagagagagagagagagagagagagagagagagagtgggatttgggttgatagtatggttgtatagaggaagtatttttagaagtttaaattgttatataaattttggagtttagttagatatgtattttatttttagggaggtttttcgaaattaagttgagggattagagtttatagaaggggatatatttatattataaggagattttatttttgattttgtagtttagattagattagagtgattttaatttatattttttagagttttttatagtttaaggtgttagagtttttagggtaagtagtattaggaaggggaagaggtcgttggattttatggtgaaggtaggagtgattttgatggttaatgttaaattttattatttatttttttattagtgggtgtggttttattagaattttttcggttttttttagttattattgtataagtaggaaacgtagttagagattagaaattttgatattaaggagattgtttattttttttatgttaggtaaggttatgaggttaatatagtaattattagaaaagaaagggaagagattggtttgggaagttggttgattaaagaggttattttagtgtttatttgagttttaaatattataagattttaggttattagttttataggtggagagagggaagaagtggttaattgtaaaggtgttattcggatttggaattaaaattagatatagattttttgttgagattttgtgtaatatattttatttttatattgttaattttgatttttatattattggatttttaggtattgtgaaattttgttgattatttaatgtagttttttttttaaaagtttagttcgtttaattaattgatatttagttttttgaaatatttatatcgttatatttttagtgtttgttttgtgtttgatataggaaaagtatttataaatgaaagttgaagaagagtttcgttttttataaatttttttggagtttagttgttttagttgtgaaatgaaatgatattaataagttagttttttttagagggttatgaaattaagggtatgaagggattttgaatgaaaagaataaatgaatagtatttttttttattaaagagaattgaaatgaatttgagataaagggggaaagtagtttattagttattgtaatttatatttagttgtgagataatttgagattttagaggattgttttttaaaattttttaaaattttttatagattttatatgatagtaaaaaattaaatttattttatttgttatttagtttgtataggttgtttttaattataaagagagcgattattatttttaaaatttagtttatagttgagtgtagggtcgtatatttgttgttttagttgtttaggaggttgaggtgtatggattttttgagagtaggagtttgagattagttttggttatatattgagattttatttttataaaaaaatgtaaaaaattagttaggtatgatgacgtacgtatgtttgtagttttagttatttgggaggttgagttaggaggatcgttttagtttaggagtttgaggttgtagtgagttatgattgtgttattgtattttagtttgggggatagagcgatattttgttttaaaaaaataaaataaaataaaatttaattaaagtttatttagttataaattttaagtttttgatttattatttttatgtttggaatttttttatttatttttaaggtgaaggtttgtggaattttttatagatatgaaagatttatttattattaagtagcgatggttttatatgaagtatttaagtattttataattaaataggtaattggtagtagatttttttatataaaagttattttatggtttgaattttggtggattagaagatttggatataattaattattagttaaattttggtggaaaaagaaaaggaagaaaattaatatgtataaggtaattattatgagttaggtgtatttatttttagttggagtatttagtagggtaggtaagagagaaatggaggttatgatttttattaatgggtaatgatatttttaggttaagatttttgtttttatttttattatttaggggataatttgattttttttatagagtttttgttttttttttttttttttttttttgtttgtttttattttttttagtgttatatttaagaaattatttggagttttttaaatatttattttttaaagaatgaaaaggggttgggtacggtggtttatgtttgtaattttagtattttgggaaattaaggtgggcggattatttgaggttaggagtttaagagtagtttggttaatatggtgaaattttatttttattaaaaatataaaaattagttaggtagtgtggtatatatttgtaattttagttatttaggaggttgaggtaggagaattatttgaattttggaggtagaggttgtagtgagttgagattgtattattgtattttagtttaggtaataaattgagatttcgttttaaaaaaaaaaaaaattaaaaggaaaatgttatagtttaagttttttttaaatttgtgattgattgattgtttaatttgtgattgattgattagagttagttttttttttattagaaaagagttttgtgtttaattagtaatgttttttatgggtgttataagaagataatagtatataattattattatttttgatataattggttttaaatgtttatattatagaatgttaagattaaaaagaggattttaagggttttttagattagtaaattatagtttttggattaaatttatttagttatttgtttttataaagttttattggtatatagttatatatttattaatttatgtattgtttaaggttatttttttattataatggtaatagggatttaaaatatttattgtatagtttaaaatatttatcgtttggttttttatagaaaatgttaatttttagattaaatttatagtttgtataaaagagattgaattttttagaagaagatttaggtttaaagttgtatagcggattaacgatatatataagattgagtttttttaaaataggttatttatatgttgatttttagaatttgtttggtggaggatatttttatttttaattaaattttaatttgagattgatttatttaatttattttaaggttgggagtggtggtttatttttgtgattttagaattttgggagattgaggtgggtggattatttgaggttaggagtttgagattagtttggttaatatggtgaaattttatttttattaaaaatataaaaattagtcgggtatggtggtgtgtgtttgtaatatttaggaggttgaagtaggagaattattttaatttgggaggtagagttgtagttagttgaggttatgttattgggttataagagtgatattttgttttaaaaaaaaaaatttattttatatattttttattgttttttatttaaattttatagatttttttatttatttatataaattatttatataaaagttgtttaatattttttattatatgttaggtattgtattaggtttagggttatagaaaagagtacgtttacggagtcgatattatatggttgttaagaatttgaattttaaagttagatttataggttggaagtaaattattgaatttttttgaattttagttatttttattgaaaaatgagagtgttgttgtttttggagtcgtatagttgttgtgaggagtatttggaaagtatttagtaaattgtttggtttttttagtatattatatattgtttttattatcggcgtgtttttgtatatattaagcgtatagggagttgttagtttttaattaaatagtttagtttttgggtttggatttatttggttttgttttattaaatgtttgataaaatatggttttattttttgataaaatagatttgattgggtttattggtaggtaggtagatagatagatagatagattttaattgatagatagatatagatagatagatagatatagatagatagatagatagatagatagatagatagttagataattaattattggttttgtttttttggaaaattttggttgatggaatttgtttgtttttgtattttttaatgttatttattaaagttggttatattattatttgtgaggttgtattattttttatgttttttttgaatattggtttttaattattgttttaaatgttgttagtgtggtcgtttgtttttgattattagggtgttggtgatagggggattttggtagttggtgggttttgtatatattaagtagcgggatagggattttgcgtatttttgggagtttgtattttttttgtgagtatttatatatttgtggaggagtaatagtaaataatttttttaatattatggtagatttagagagaaattgttaaagaaagttaaaaaattaattttagtatcgttaatatttttttttttgtttttgaataagtagttttatatttttattttgtattgagttttgtaaattatgtagttagttttggaggggtttagggttgaagtgagaggagtattttatttgtataagaaatgtttttgtttaatttattatggtttaatattgattcgagagagtataggttaattagaggaaaaaaaaaaagatattaattgaaaagtttttttggagttgtatagagatggtttggaaagttttgaggaagagataggagtagttataggtttttgttaggagttatttaaggtggtaggatgattgttttagattttagtaatgggggaaggagtatagagtgagaagtatttttttggattagaatttatgtagtttttagtttaagttgggattttttgttttatggtattattgattttggttggttttaggtattttaggggaatatagataattttgaggaagacgttttaaggtatagagcgatttgaagtgtgaggtgtagggaaggagtttcgttgtttaggtttaaggaagaatgtgtttcgggtcgttttattttgatagtagatgttagttttatttttaattaaaagttattgtgtttttatttaaaatttattatgtttttaagttttaaaattaaaaaataatatagaataaaaaatttttttagaatttggtagataattaggtttttatagtttatttttgtgtgaataaggtagtaattatttttttttgggttttagtttttttatttgttttaagacggtaattgtgattttaagaaatagttttattttgttt

SEQ ID NO: 1701 - DNA, 17721 bp, Artificial Sequence
  chemically treated genomic DNA (Homo sapiens)
gtattggtacgattttagtttattgtaattttcgttttttaggtttaagcgatttttttgttttagtttttaaagtagttaggattataggcgtcgtaattatgtttagttaatttttgtatttttagtagagataggattttattatgttggttagggtgattttaaattttgattttaagtgattcgtttgttttagttttttaaagtgttgggattattggtatgagttatcgtgttaggttttgaaatgttattttagttattaatttgtaattttttggttttagaggttgggtatttttttagatttttagtgatatttggattttttttttggtgaattgtttagtttttttttttgttttataatttttattatatgtaatttttatatgtaggtattattatttttttagtttgtttttgaaatagtatattgttttgttgtttaggttggagtacggtggtaaaaatatggtttattgtagtttttgatttttttggtttaagtattttttttgttttagttttttgagtagttggtattataagtttatattattatgtttagttaatttatttttgtagagatggggtttgattatgttatttgggtttaaatgatttttttttatttagttttttaaagtgttaggattataggtatgagttattatatttggtttttttttttttttttttttttttttttttgagatagagttttgttttgttttataggttggtgtgtagtggtacgattttagtttattgtaatttttattttttagttttaagtgatttttgtgttttagtttttttagtagttgagattataggtatgtattattatgtttggttgatttttatatttttagtgttgttatgttggttaggttggttttaaatttttgattttatgtgatttatttgtttcggatttttatagtgttgggattataggtgttagttattatttcgatattatttgaaatttttattttattatgagagagttttaggagttaattgaagatagatttttggtatgaaaattatatatgtaaaaagattgattttagtatatgaaattaaatttaatatttatattaaatgtttttaaatatggtaaaatggttttttttggtagtttattttattatgttttgaatgatttgtttattatatgaaataatttttataaatatagtaatttaggtttgggtatagcggtttaagtgggaggattgtttaagtaatcgagtttgagattagcgtggataatatggggagatttttttttttttaaaaaatagttgagtatggtagcgtattgttaaaggaaatagagtttttttggtgggtgattaaaatgttttggagttagatagtagtgatggttgtataattttgtgaatatattaaggttttcgttttatttattatttaattgtattttttaaaacgattaattttatagtatattaattatatttttaaataataaaaataaaaagaaatggttgggtgcggtggtttatgtttgtaatcgtagtattttgggaggttgaggcgggcggattataaggttaggagtttgagattaatttgattaatatggtaaaatttcgtttttattaaaaatataaaaattagttgggcgtggtggtatacgtttgtaattttaggtattcgggaagttgagataggagaattatttgaattcgggaggtagaggttgtagtgagttattgtattttagtttgggtggtagagcgagatttcgttttaaaaagaaaaaaattaaaaaataaaaagaaatttggttttatattttgtttaaatttatttttttaattattatgtaatatgtttacgtaatttgtttaaattttgatattaaatgtaattgtgagaatttttatgatttagaaaaatttaagtaagttttataaaaatatatttttttttttatttttttttttttttttgagatatagttttattttgtcgtttaggttggagtgtaggtttttatgtttatttgtgagatgtatttttggtatattatttttttgatatgagatttaaaatttttttttttattttgtgataatttaatttttttgatatataaaaattgtatatatttatttgtttgagatggagtcgtattttgttatttaggttggagtgtagtggcgtgattttggtttattgtaattttcgtttttcgagtttaagagatttttttgttttagttttttaagtagttgttattataggtttgtattattatattcggttgatttttgtatttttaggagaaatagggttttattatgttggttaggttggttttgaatttttgattttaagtgatttatttattttggttttttaaagtgttgggattataggtatgagttatcgtattagatttttaaaaattgtatatatttaaggtgtattatttgatgtttagatatatattgtgaaatgattatattttatatattatttttacggagttattatttttgtatatttggttaatattattttatttttttttttttttatagatattttttgtatattatatagaagttaagggtattttgggggaagagtttaaagtttttttcgtggagttaaaaatatatatatattatgtatatataagttatttagtaattttagatgtttaataaagaatattggaggttcggtgtggtggtttatatttgtaattttagtattttgggaggtcgaggcggtcggattataaggttaggagtttaagattagtttggttaatatggtgaaattttatttttattaaaaatataaaaattagtcgggtgtggtggtgggcgtttgtaattttagttattcggggggttgaggtaggagaattgtttgaatttgggaggtagaggttgtagtgagttgagattacgttattgtattttagtttgggtgatagagtaatattttgtcgtaaaaaaaaaaaagaatattggaggttgggcgaggtggtttatatttgtaattttagtattttgggatgttagaggcgggcggaatattttgagtttaggagttcgagattagtttatataatatgttttaaacgtcgtttttataaaatatatagaaattagtcgggtgtggtggcgtgtttttgtggttttagttatttgggaggttgaggcgggaggatcgtttgagttcgggaggtcgaggttgtaatgagtcgagatggtgttattgtattttgacgatagagcgagatttcgttttaaaataaataataaataaggttgggggattaaatattttttagtgtttaaggatttgtcgtttttttttttgtttttatgtttgtttttttttgtttgtttttatatagattaagtaggttttaaatttttagtaggagtttatatttatttttttaagggggagggggaataaatatttatatatatatatatatatatatatatatatatatatatattggagttcgagacgaggtttaagtaatatgtcgaaatttcgtttttattaaatataaaaaatagttgagcgtggtggcgtacgtttatagttttagttattggggaggttgaggtgggaggatcgtttgagtttaagaagtcgaggttgtagtgagtcgagatcgcgtcgttgtattttagtttgagcgatagggcgaggttttgttttaaaataaataaataaaaaaaaaaggaaaggaaatataatatagtgaaatgaaaggattgagagaaatgaaaaatatatacgttataaatgtgggagggcgataattattcgtagaaagcgtgagaagttattataagcggttttttcggttatcgtattgtttcgtttttagaagtttcgggcggcggaagtcgttatttttaagaagggacggggttttacgttgcgtattcgcgggtttgttatggcgatgagtagcggcggtagtggtggcggcgtttcggagtaggaggatttcgtgttgtttcggcgcggtataggttaggtgaggtcgtagttagtgtagtttttttattagcgtttttagtatttttttttcggtttaatttttttttcgtagtttcgggatagtattaagtcgattcgtttattggagttgtggttcgcgtttttttacgtttttttttatttcgttttttgcgaattatattcgtaagtttttttttcgagtagtttgggttttttgatagcgttgagtggaggttttgtcgcgatttggtagtagtttattttgtttatttttttttggttggtgtgggggaggtgggggtattaggttagggtgaagtaggggaattatttaggagtttgttaagatgatttgaattttagaataagatgttattaatagagtgaaagtatttggattttgggtatattttgaaatcggaggtaataggttttttagatagattcgataacggaggttattttgaatagttgaaaagataaagttgttttttgttgaggtgggaaagagaagattgttagtagagtaggttttttaggagtttagttttgggtatagtatggtaggggtgaatttggttggagtgagttggagagtaggagaagagaaatttaaggtaatatttgattagtttgggtaatatagtgtgatttcgagtttgtaaaaattagacgggtgttgtggtgcgcgtttgtggttttagttatttggaaggtttaggttttggaaggtttagggaggtggaggttgtagtgatttgtgattgcgtttttgtattttagtttgggcgatagagttagattttgttttaaaataaaataaacggtcgggcgcggtggtttaagtttgtaattttagtattttgggaggtcgaggcggtcggattataaggttaggagatcgagattattttggttaatacggtgaaatttcgtttttattataaatataaaaaattagtcgggcgtggtgacgggcgtttgtagttttagttattcgggaggttgaggtaggagaatgttatgaagtcgggaggcggagtttgtagtgagtcgagatcgcgttattgtattttagtttgggcgatagagtaagatttcgttttaaataaataaataaataaataaataaataaataataaaaatatcggtaggtatattttaaggaattttatttaaaaaaaatttttttagagataagttcgttttttgtggtttaggttggagtatagtggtatgattttagtttatggtagcgttgattttttggttttaagcgatttttttttggagtcgttgggtttaaaggagtgagttattacgaaattttattataaatggagggtagagaaattgggtaataaatggagggggaagtgagttaagaggaattttaattatgtgtgtgtggttttaaaagaggggggttttgttttgttgtttaggttgttggggtgttagtggcgtaattatgaattattatagttttggatttttggttttaagttatttttttatttttgttttttaaagtattgggattattagtgtgagttattgtattaagataggagtaatatgttttagtatgtttgtgggttgataggaaagatgagaatgggaaagttgatgtcggaaagaagataatggttagagtaatgttttagagtaggtaagaagggatggatttggtttttgttggaaatattagcggtttttttggtgatagttatatagttaatatatttatgatacgtgaatgggtagataggatggtaggagattttgaaagtttttttgatttttattgtttttttagtgaaagaagtaaggttattagttagaagttgggatgggagaggaaagagaagatgggaagtagatagttttttagaagagtgggtaagggttggattagggaagtttagtggaaatattgttaggtaatataaagagtttatttgagattcgtggttatgagttgaaggagattagatagtaagattgtgtatgagggtatttatagagtaaatggagagttgaaattaatgtagttgtgattttattacgtggatatgaagaagtgagggggagaagtataaaggagtttttttaatgattgattatggaatttaagttggttaagaaaggaagtgagaggtcgggcgcggtggtttacgtttgtaattttagtattttgggagattgaggtgggtggattatttgaggttaggagtttgagattaatttggtcgatatggcgaaattttatttttaataaaaatatagaaaaattagtcgggaatggtggtaggtgtttgtaattttagttatttaagaggttgtggtaggagtattttttggatttaggaggtggaggttgtagtgagtcgagattacgttattgtattttagtttggacgatatagtgagattttattttaaaaaaaaaaaaaaaagaaaggaagtgaggattttaagattttgagagatagtttaaaaagtgggaggatcggtcgggcgttgtggttgatatttgtaattttagtattttgggaggtcgagttgggtagattataaggttaggagttcgagattagtttggttaatatggtgaaattttgtttttattaaaaatataaaaattagtcgggtatggtgttacgtgtttataattttagttattcgggaggttgaggtagaaaaattgtttgaatttgggaggtagaggttgtagatagttgagattattttattgtattttagtttgggtaataagagtaaaattttgtttttaaaaaaaaaaaaaaaaaaagaatataaaaattagtcgggcgtggtggcgcgtgtttataattttagttatttgggaggttgaggtaggagaattagttgaatacgggaggcgaggtttgtagtgagtcgagattgcgttattgtattttagtttgggcgatagagtaggattttttttggaaaaaaaaaattagttgggtatggtggtaggtgtttgtagttttagttattagggaggttgaggtaggaaaattatttgaattcgggatgtggagtttgtagtgattcgagatcgtgttattgtattttattttgggcgataaaatgagattttgttttaaaaaaaaaaaaaaaaaaaaaaagtgggaggattaatgtattgttagttttaatgaagtggaatgattgtttttattaaattattagtaggagtaagttgtagagtttagaaggtgatggttaagagagtgggatttttgaaattgtatttatggagaggttgtggttattggttataataaataaatatagttgaagtgagtgagtagttgagatttggggatgtattagtttatttttatattgttataaagatatatttgagattaggtatttataaagataagaggtttaattagtttatagttttgttgtttgtataggttttttttgtggaggtttaaggaaatttatagttatggtggaaggtgaaggggaaataagtatagtttttatatggttagtaggagagagagagaagggggaagtgttatatattttaaaataattagattttgtgagaacgtttattaggaaatagtatttggggatggtgttaaattattagaaattatttttatgatttagtcgttttttattatgtttatttttaatattggggattataatttagtatgagatttgggtaggaatatagagttgtattatattagaggatgtataagattgtggtggagaggagtttagagatttgtaaatatagggtaattgaagggattatttatatggatatttaaattattaaaaattatgataggagtagtgttggagagagaattgcgatgtaaatattaaggaatgaggaagagtgattcggtaggttgtaggtgattgtaataggaaacgataatagattgtgagtttggtgataagatttttttttttttttttttttttttttttcgagatagggtttttttttgttgtttaggtgggagtgtagtggcgcgattacggtttattataatttttttttaagtttaagggatttttttattttagttttttaagtagttggaattataggtgttgattattatgtttggttattttttgttaggatttttaaggttgggaattttgagaggggaatggaggagaataatttgaaagtgtaagtaaggagtagggaagatttttttttttttttttttttttttttttgagtcggagtttggtttagtcgtttaggttggagtgtagtggcgagattttcgtttattgtaagtttcgtttttcgtgtttacgttattttttttttttagtttttcgagtagttgggattataggcgttcgttattacgtttagttaattgtttttttgtatttttagtagagacggggttttatcgtgttagttaggatggttttaattttttgattttgtgattcgtttatttcggttttttaaagcgtttgggattataggcgtgagttatcgcgttagttagagtagggaagattttttttttatatttttagtaggtatagtgatatgaagtgtgtggaggagaaaagaggaaatatttattatttgagatggttgcgaaaggaaaaggtatttttagggagttagattttatttagagtaagaaatgaagggatgatttagaggttaaaagagtggattttatgaattatttaagggagtatagtggaagttttaggaagtggtaggagaaggtagaagatggtagggtgttgggaataatttgagaaatttgagttattggaaatgattgagaattagatataaaggtagttttggtggttcgttttggttgtcgttgttgtgtaacgaatttgttaaaatttagtggtttgaaataataaagaatattttattattttttattgtttttgtgggttaggaatttgtgagagtcgtgttgggtagttttcgtgcggttgtttcgtggttgtatttatatagttgttagagttatagtagttggggattgagtagttagggattggtaggttattttttttttttatgtagttttatgaagatttttttatgtggttttaatgtgtgggttggtttggatttttttatagtatggtggttttagttggattgttgttttgtgattttttttatttttttttgttttgtttttagataattattgatttattttttgttattatagattagtttgtatttttaagaatttttataaacgtggaatgatagagtattttttttgttacgttttttttatttattatagttattttgatttttatttattttattgttgagtagtattttattgtatgtatatattatattgtatttattcgtttgtttgtgaatatttgggttttttttagtttgggattgttaataagtagagttattatgaatattagtgtataagattttatatagttaaggttggtagatcgtttgagtttaggagtttgagattagtttgggaaatatggtgaaatttttatttttattttaaaattaaaaattaaaaattttttataaaaaattttaaagaagattttgtatagatatacgtttttattttttttgagtgaatatttaggttttagggtagatgtattttaagtttttaaggagttgttaaatttttttttaaagtggtggttgtattatgttattttttaatataatagagattaattgagtaaagaaaaatttaaaagttggatagtttttataattaaataggtttagaatagtttttttattttgtattttgattagtaatgtatgaaagttttatttgtttagtgtttttgtaaatatttggtatggttagtttttttaattttaggtattataatagatatagtggttttttgtgattttaattagtattttttaatgattagtgttgttgttgattattttatgagtgtatttgttattcgtatattttttttggtgaagtgtttatttaaattatttgggttttttttttttttgttttttttttttggagatagtgttttattttgttatttaggttgttgtgtagtggtgtaattatatagtttattgtagtttttattttttgcgtttagtttttttgttttagttttttgagtagttgaaattacgagtatacgttataatgtttggttaattttttaaaattttgtagaaataaggttttattatgttgtttgggtttgtcgtgaatttttgggtttaagtaatttttttgttttagttttttaaagattgggattgtaagtatgagttattgtattcggttaatttatttattttttaattgaatttttttgttgttgaggtttgagagttttttatgtttgttgggtataatatttttattagataggtaatttgtatgtattttttttcggtttatattttggttttttattttgttaataacgtttttttaagaatagaaaattttaattttgttgaaatttaattttttagttttttttttgatggttttgagagaggaggtaaaaaaagattaggtaagtcgatagttagatagagttttcggtagaattttttttttaataaaaagtagtttaagaaattattttttttttaataaggagtagtttggaagatcgggttgtaaatatgtataaggaagtagttttggtatagagggggagttttttgggtaattagtaagttttatatacgtaaggtgggtatgtgaagtaaatatagtatgtgaagtaaatatagtggattttagtatatatttagataaggaagttggaagtttgtatgttgtgagttgttggggttgtttgtagttgtacggagagaaaggggtatttggggttaggtatgtttattatggtggttttatttttttttatttagtatatgtataataggaaagagataagtaatgtggagtagtttaggttaaggatttgtttgtataataaaaggttggggtgggggatgttagagatttacgttttgtgtagatggtaatatttggttttaattggttttttgttttttatgtgtagataagttattttttttttattagtttatttataaaaatgtttgtattttattgtggaatgggaattttttttaggatttttttttgtaggagagagttagttttttttttttgtttattaaatttttgttttagttttatatttttggtgtgttagcgtttttgatttttttagcgtgagattaagaatttcgggtgttattttaggtaataaggttattttagtttgtttttttgttataggtaatttatgattatagattttttttttttttttttttttatatagtttagagttttagttttatatttaggtttgtaatttattttgtattaatttttatatgtggtttagtgtaggtggaaatttggtttgtttttgtataaggatttttaatagttttattattattttttgaaattattatgttttttttattaaattatatttgtaattttagttaaaattagttatatatattatagggttatttttgatttttaattttgttatattgtttattagtgtatattgatgttagtattatatttttaattattattgttttagggtatgttttgtaaattaaaaataaaattataggtttttttcgtttttgtataattaattgaatggatttatttttttagttaagggtattttaaaattaatttgaaaaattagtttaagttatgatgggaagggggagttggatatgttttattatattttattattttttggaattattgatagaatagatttttaaagtttgaaaagaaatatttataatttattttttttgaagtttgttatttgggagttttatttgtatgataaaattttggtttttataattttttatggtaatttaaatatttttttttgttgataataatttttttaattagttgttaattagaaaatttttaaatttttttatgatttagaaatttttttatttttattttgagttgttttgttttttttgatagaatttatgtatattttatatatattgattgatgttttatgtttttttaaaatgtataaaataaagttgtattttattattttggggatatgttattaggattttttgtggttgtgttataggagcgtttttaattttggtaaaataaattttttaaattgattgaaatttgttttagttatttttggtttatagttttaaagttagataatgtaaattgtttagttttggtttatttttgtttttagtagttttatataaattttagaattagttttttaatttaatatattattttttttttagatttataattaaatatatttgatgttaataattttgttttatgtttttcgttttttttttttgagataagagtttcgtttttgttgtttaggttggagtgtagtggcgcgattttggtttattataatttttattttttaggtttaagtaatttttttgttttagtttttcgagtagttgggattataggtatgcgttattacgttcggttaattttgtatttttagtagagacggggttttattatgttgattaggttggttttgaatttttgattttaggtgatttatttatttcggttttttaaagtgttgggattataggcgtgaattattatgtttggttagttttgttatttttaaaatttaagtttttttggttatattttggttggatgaagcgtatttttaatagattattttggaaaggttagtgagtacggtatttttttatattttagattttttttagttttgttattttaaggatagttaggttgtatataaaatttttggtttatattttttttttataaatttttatgagaaagtttaatgataattgattttttttattttgtaatttagtttttttgtttagaggttttttgaggatgggagggggtttttttttttatttttaggaattttttttttttttaaatttttaattattagattattaggaagattgtttgttttgttttgtttttattttttagggattttatttatatatacgttaaataaatattgtttgttaatgtattaattattttgttttttatttatttttgtttttttggtttttttttatggttttgttttggtgttttttagatttttagttagatgtatttgtttttgggtattttgtaattagtattatttttttttttgtcgttttgttttttgttcgttttgaaattatttgttttttggtttggtaataatagttgagatatgaggagtttgagttgttatttgtttatgtattttgttttaagattgtatttttttattgatattattggttttgattttgtgatttttttatttttttaggattattttttattttttattgtttgttttttttttttttgagatggagttttattttgttatttaggttggagtgtagtgattttggtttattgtaatttttgtttttcgggttttagtaatttttttgttttagttttttaagtatttgggattataggtgtgtattattatgttcggttaagttttgtatttttaatagagacggggttttgttatattggtaggttggttttaaatttttgatgttaagtgatttatttattttatttatttttgtattttaaagtgttgggattataggaatgagttgtcgtgtttagttttttttttatttttttttttttttttcgagatagagattataggtgtgagttattggatttagtttgtttttattttttttattaaatttttaaggaatatttttttttttaagtgcgaatgtaattttaagttagttaatttttttgtgattattttttttatttgtaaagtgatttaatgattttaagtattttttttttttgagatagggttttattgttattttggttggagtgtagtggtacgatttttgatttttatttattgtaatttttttttttttggtttaagcggtttttttattttagttttttgggtagttgggattatagatgtgaattattacgtttagttaatttttgtattttttgtagagatggggttttgttatgttgtttaggttgggattattaagtattttttattatatagtaagattgatattttatattggaatatatttgtttttatataacggagattaataggaaaatgataagtttgggtgcggtggtttatgtttgtaattttagtattttgggaggttgaggtgggaggattatttgaggttaggagttcgagattagttttgttaagatgatgaaagtttatgtttattaaaaatataaaaattagtttagtttgatggtgggcgtttataattttagttatttgagagattgaggtaggagaattatttgaatttgggcggtagaggttgtagtgagtcgagattatgttattgtattttagtttgggtggtatagcgagatttttgttttaagagaaaataaaataaaataaaaaaaaaataggaaaatgataaaaagtaatattataatttagtgaattttataataaatttttttggaatttattgattaatattatattaaatttaaaatattttttagtatattaaatttaattttattttatagtataaattggattttatttggatttgttttattaattttttatatagtgtgttttattttttattgaagtaaaaaaatttgttattttaattatttttaagtatatagtttagtaatattaagtatgtttatgttgttgcgtaatagattttcggaagtttttcgttttgtaatttgaaattttatttattagtaaatttttatttttttttatatttagtttttggtaattattatttttttttttttttttttgagatggagttttatttttgtttgtttaggttggagtgtaatggtgtaatttcgaatttattataatttcgttttttaggtttaagtaattttattttagtttttcgagtagttgggattatagttatgtattattacgttcggttaattttgtatttttagtagagaaggggtttttttatgttgaggttggtttcgaatttttgattttaggtgatttgtttatttcggttttttaaagtgttgggattataggcgtgagttattgcgtttggtttattttttttaattttataaatttgattatttagttattttatataaataaatttttatagttagtgttatttttgtttttatgttttttttgttgttgtttatgtttttatttggaatgcgttttattttgtttatttatgtatattttgttgggttttttttttttttgggggttttttttgtttttttttgttttttttttttagataaggttttaatttgttatttaggttggagtgtagcggcgttatttttatttattgtatttttaattttttgggtttaggtgattttttcgttttagtttttgtaggtagttgggattataggtatgtgttattatgtttagttaaatttggtttttttgtttgtttgtttttgagatagagttttattttgttatttaggttggagtgtagtggtataattttagtttattgtaatttttgtcgttcgggtttaagtgatttttttgttttagttttttaagtagttgggattataggtgattgttattacgttagttaagttttgtagttttagtagagatggggttttattttgttggttatgttggtttcgaatttttgatttcgtgatttgtttgtttttgttttttaaagtgttggaattataggtatgagttattacgttcggttagaatttttgtatttttagtagatataaggtttttattttgttgtttaggttggtttggaagttttggatttaagtaatttatttgttttggttttttaaaatgttgggattataagttattatgttcggtttaaattttgttgttttgttttgttttattttgttttgttttgttttgtttgttttttgagatagagtttcgttatgttttttaggttgtagtgtagtggcgcgattttggtttattgttatttttgttttttaggtttaagtgatttttttgttttagttttttaagtagttgggattataggtatgtgttattatgttcggttaatttttgtatttttagtagagatagggttttattatgttggttaggttggtttcgaatttttgatttcgtgatttatttatttcggttatttaaagtgttgggattataggcgtgagtggtttttattttttaggtcggttttttttatatgattttgtagtagatattaattttttttttttttaattaaaatattgtttgtattttatattttgatgtttgttaagatttgttttatattgttttttgttttgttttgtgtgatagttttaaatttttagttagataataattggagagtattatgtttttatatattttttagtgatttgtatagtgttagtagatagtgttaaaaaattatttattattattattattttgttattgttgttgttgttgttagatagggtttttttttgttatttaggttagagggtaatgggatgattatagtttattgtagtttttaataattgggtttatgtaatttttttgttttagttttttaagtagttgggattataggtatgagttattatgtttggataaaaatatttttaggtgtagtggtttatgtttgtaatttttatatttgggaggtcgagcgaggttggaggattatttgagtttaggagtttaagattagtttggttaagatggcgagatttcgtttttataaaaaattttaaaaattagttaggtatggtggtatgtatttatatttttaattatttagtgggttgaggtgggagggttatttgaatataggaatttgaggggagaaaaaaagaagagagaaagagaagtgaaggaaggaagaaaggaaggagggagggagagaagaaagaaacgaaagaaaggaaaagaaaaggaaggaaagaaaattggtattaggaaagtaggaaagggaaatggaagtaaaaaaataataataataataaaatgaaaattggttagttattattaataatttgtatttttataatttggaaatattataattttaaaagaaaaaatattttttggattataggttttgaggttagaatagtattttcgtagtttagatgaagttaagttttatttgattttaattgaaataaatatagttggttttgaataaatttatttatggtatgtggataggaattaaattgtaggggtatttatttgatggtatttatttttagaatatttatttatgtttagtttttggagtaaagttatataatttttaattaggtaagttttttgtggttttatttaggattttaaatatttatttttagtgtaattttgttatgtgtggattaagatgatttttggtattaatatatattttttgattaaatttatttgaatatgagttgtttttattttttattttttttaga

SEQ ID NO: 1702 - DNA, 17721 bp, Artificial Sequence
  chemically treated genomic DNA (Homo sapiens)
tttggaaagggtaagaaataaaaataatttatgtttagataggtttaattagaaaatgtatgttagtattaagagttattttaatttatatataataaaattatattgaaaatgagtatttaaaattttaaataaagttataggaaatttatttggttagaggttatgtgattttattttaaaagttagatataggtaaatgttttaagaatgaatgttattaagtgaatgtttttataatttaatttttatttatatattatgagtagatttgtttaaggttagttatatttattttaattaagattagataaaatttgattttatttagattacgggaatgttgttttgattttagaatttatgatttaaagaatatttttttttttgaaattataatgtttttagattataaggatataaattgttaatagtgattaattaatttttattttattattattattatttttttatttttattttttttttttgtttttttggtattaattttttttttttttttttttttttttttttttcgtttttttttttttttttttttttttttttttttttttttttttattttttttttttttttttttttttttttttttaaatttttgtgtttaaatgatttttttattttagtttattgagtagttgggaatataggtgtatgttattatgtttggttagtttttaaaattttttgtagggacggggtttcgttattttagttaagttggttttgaatttttaggtttaagtgattttttagtttcgttcggttttttaagtgtgggaattataggtatgagttattgtatttggaaatatttttgtttagatatggtggtttatgtttgtaattttagttatttgggaagttgaggtaggagaattatatgagtttagttgttggaggttgtagtaagttatgattattttattgttttttagtttgggtgatagaggaagattttgtttaataataataataataataataaaataataataataataaataattttttagtattatttgttagtattgtgtaagttattgagagatatatagaaatatggtattttttagttattatttaattagggatttaagattattatataagataaaataaaaaataatataaaataaattttaataaatattaaaatgtgaaatataaatagtattttaattaaaaaggaaagaaattaatgtttattgtaagattatatggaggaaatcggtttaagaaataaaaattatttacgtttgtaattttagtattttgggtggtcgaggtgggtggattacgaggttaggagttcgagattagtttggttaatatggtgaaattttgtttttattaaaaatataaaaattagtcggatatagtagtatatgtttgtaattttagttatttgggaggttgaggtaggagaattatttgaatttgggaggtagaggtggtagtgagttaagatcgcgttattgtattatagtttgagagatatagcgagattttgttttaaaaaataaataaaataaaataaaataaaataaaataaaataaaataataggatttaggtcgggtatggtggtttgtaattttagtattttgggaggttaaggtaggtgaattgtttgagtttaggatttttagattagtttaggtaatagggtaagaattttgtgtttattaaaaatataaaaattttggtcgggcgtggtggtttatgtttgtaattttagtattttgggaggtagaagtaggtagattacgaggttaggagttcgagattagtatggttaataaggtgaaattttatttttattaaaattataaaatttagttggcgtggtggtagttatttgtaattttagttgtttgggaggttgaggtaggagaattatttgaattcgggcggtagagattgtagtgagttgagattgtgttattgtattttagtttgggtgatagagtgagattttgttttaaaaataaataaataaaaaaattaaatttagttgggtatggtggtatatgtttatagttttagttatttgtaggggttgaggcgagaggattatttgggtttaggaagttgaggatgtagtgagtggagatggcgtcgttgtattttagtttgggtaataaattgagattttgtttgggaaaaaaaaataaaaaaaaataaaaaaaatttttaaaaaaaaaaaaaatttaataggatgtgtataggtagataaaatagaacgtattttaagtaagagtatgaataataataaaaaaggtatggaagtaaaaataatattaattataagaatttatttatgtaaggtaattaagtagttaaatttatagaattagaaagaatgggttaggcgtagtggtttacgtttgtaattttagtattttgggaggtcgaggtgggtagattatttgaggttaggagttcgagattagttttaatatggagaaattttttttttattaaaaatataaaattagtcgggcgtggtggtgtatgattgtaattttagttattcgggaggttgaggtagaattgtttgaatttgggaggcggagttgtggtgagttcgagattgtattattgtattttagtttgggtaaataggagtaaaattttattttaaaaaaaaaaaaaaaagaatgatgattattaagggttaagtgtaaggagaaatgggaatttgttaatgggtagagttttaggttgtaagacgaaaaattttcgaagatttattgcgtaataatatgaatatatttaatattattgaattatatatttaaaaatggttaaaatgataaatttttttattttaataaaaaataaaatatattgtatgagggattagtgagataagtttaaatagaatttaatttatattatagggtagagttggatttggtatattagagagtattttggatttggtatagtattagttaatgaattttaaaaaagtttgttataaaatttattgagttgtaatattattttttgttatttttttgttttttttttgttttgttttgtttttttttgagataagagtttcgttatgttatttaggttggagtgtagtggtatgatttcggtttattgtaatttttgtcgtttaggtttaagtgatttttttgttttagttttttaaatagttgggattataggcgtttattattaagttgggttaatttttgtatttttagtagatatgggtttttattattttggtaaaattggtttcgaatttttgattttaagtgatttttttattttagttttttaaagtgttgggattataggtatgagttatcgtatttaggtttgttatttttttgttaattttcgttatatagagataaatgtattttaatataaaatgttaattttgttgtatgataaaaagtatttaataattttagtttgggtaatatggtaaaattttatttttataaaaagtataaaaattagttgggcgtggtggtttatatttgtagttttagttatttagaaggttaaggtgggagggtcgtttgaattagggaagaggagattgtagtgagtggagattagagatcgtgttattgtattttagttagggtgatagtgagattttgttttaaaaaaaaaaagtatttaagattattaagttattttgtagataagaaaagtaattataaagaggttaattgatttaaggttatattcgtatttggaagggaagatattttttggagatttggtaaaaggaataaaaataggttgggtttagtggtttatatttataatttttgtttcgaaagaaaaaaaggggggtaggggggaggttgggtacggtagtttatttttgtaattttagtattttgggatgtagaggtgggtggggtgggtggattatttgatattaggagtttgagattagtttgttaatgtggtaaaatttcgtttttattaaaaatataaaatttagtcgggtatggtggtgtatatttgtagttttagatatttgggaggttgaggtaggagaattgttggaattcgggaggtagaggttgtaatgagttaagattattgtattttagtttgagtgatagagtgagattttattttaaaaaaaaaggaagtaaatagtagaaaatgaagggtggttttgaagaaataaagaaattataaaattaaggttagtgatattaatagaagagtgtagttttaaagtaagatatatagatagatggtagtttaaattttttatattttaattgttattgttagattaggaaataagtaattttaaaacgaatagaaaataaagcgatagaagaaaaggtaatattgattataaggtatttaaggataaatatatttgattgaaaatttaaggagtattaaagtaaagttatgaaaaagaattaaaggaataaaaataaataagaagtaaaatggttgatatattggtaaatagtatttatttaacgtatgtataaatggggtttttgaagaataaaaataaaataaaataaataatttttttggtggtttagtgattaggaatttaaaaaaaagaaaaatttttagggatgggaggaagaatttttttttatttttagagagtttttaagtaaaaagattaagttataaaataaagaaaattagttattattagatttttttatagaaatttatggggaaaaagtatgagttaagaattttatatgtagtttagttgtttttgaagtagtaagattaagaaaagtttaaaatgtagaagaatatcgtatttattagtttttttagggtaatttattgaaaatacgttttatttaattaagatatgattagggaaatttgggttttaaaaataatagaattggttaggtatggtggtttacgtttgtaattttaatattttgggaggtcgaggtgggtggattatttgaggttaggagtttaagattagtttgattaatatggtgaaatttcgtttttattaaaaatataaaattagtcgggcgtggtggcgtatgtttgtaattttagttattcgggaggttgaggtagaagaattgtttgaatttgggaggtggaggttgtggtgagttaagatcgcgttattgtattttagtttgggtaataagagcgaaatttttgttttaaaaaaaaaaaacgaaaaatataaaatagaattgttagtattaaatatatttaattgtggatttaagaggaaagtagtgtattaaattgaaaagttgattttaaaatttatatggaattattaaggataaaaataaattaaagttggataatttatattatttaattttaagattgtaaattagaagtagttaagataggttttaattaatttagaaagtttattttgttaaagttaaagacgtttttatgatatagttataggaggttttgatgatatgtttttaaggtggtggggtatagttttgttttatatattttagggagatatgaggtattaattaatatatgtaagatgtatatgagttttgttaggaaaggtaggataatttaaagtgggggtagggaggtttttaggttataggaagatttaaagattttttaattggtaattagttgaaagagttattattaatagaaaggaatgtttgggttattataaggggttgtggagattaaggttttattatgtagatgaagtttttaggtagtaggttttagagagggtaggttgtaaatgtttttttttagattttaagagtttgttttattagtaattttaaaaggtagtagggtgtgatgagatatgtttaattttttttttttattatggtttgaattagttttttaggttaattttggaatgtttttggttgagaggatgggtttatttagttggttgtgtaggggcggggggggtttataattttatttttggtttataagatatattttgaagtaatagtaattaaaagtgtagtattgatattaatatatattaatagataatgtaatagaattgagagttagaaatagttttgtgatatatgtgattgattttaattaaagttataaatgtggtttaatagagaaagtatagtagttttaagaaatggtggtaaaattattggaaatttttatgtaaaaataaattaaatttttatttatattgagttatatataagaattaatataaaatggattatagatttaagtgtaaaattaaaattttaaattgtgtaaaaaaaaaaaagagagaaaaatttgtgattatggattgtttataataaaagaataaattgaaatggttttgttgtttggggtggtattcgaggtttttggttttacgttgaggaaattaaggacgttgatatattaagggtgtgaggttagagtagaagtttaataggtaaaagaaagagattagtttttttttgtagagagaggttttgaaaagagtttttattttatagtgaaatgtaagtatttttataaatgagttaatgggaagggggtagtttatttatatatagggagtaaaaaattagttaggattaggtgttgttatttgtatagagcgtgaatttttggtattttttattttaattttttattatgtaggtaggtttttggtttgagttattttatattgtttattttttttttattgtgtatgtgttaaataaggggaggtggagttattatggtggatatgtttggttttaggtattttttttttttcgtgtagttgtaggtaattttaataatttataatatgtaagtttttagtttttttatttgagtatgtattaaggtttattgtgtttattttatatattgtgtttattttatatatttattttacgtatgtgaagtttgttgattatttaggaagttttttttttgtgttagagttgtttttttatatatgtttatagttcgattttttaggttgttttttgttagaagagaagtgattttttgggttgttttttgttagaagggaagttttatcgaggattttgtttaattatcggtttatttagtttttttttatttttttttttaaaattattaaagaaaaaattgaaaaattagattttagtaaaattaagattttttgtttttaaaaagacgttgttaataaaatgaaaaattaaagtgtaaatcgggagaaaatatatgtaagttatttatttgataaagatattgtatttagtaaatatgaagaatttttaaattttaataataaaaaaatttaattaaaagatgggtaagttggtcgggtgtagtggtttatatttgtaattttaatttttgggaggttgaggtaggaagattgtttgagtttaggagtttacgataagtttaggtaatataatgagattttgtttttataaaattttaaaaaattagttaggtattgtggcgtgtgttcgtaattttagttatttagaaggttgagataagaagattgagcgtaggaggtggaggttgtagtaggttgtgtgattgtattattgtataatagtttgggtgatagagtgagatattgtttttaaaaaaaaaaaataaaaaaaaaaaaaatttaaatgatttgaatagatattttattaaaaaagatatacggatggtaaatatatttatgaaatgattaatagtagtattggttattaggaaatgttaattaaaattataagaagttattatatttattataatgtttaaaattaaaaagattgattatattaggtgtttgtagggatattgagtaaatggaatttttatatattgttggttaaaatgtaaaatgggggagttgttttgaatttatttagttgtgggggttgtttaatttttgaatttttttttgtttaattaatttttgttatattaaaaagtaatatggtataattattattttgaggaagagtttgatagttttttaaagatttaaaatatatttattttgagatttaagtatttatttaagaaaaatgaaagcgtatgtttatataaagttttttttaaaattttttatagaaaatttttaatttttgattttaaaataaaaatagaggttttattatgttttttaggttggttttaaatttttgggtttaagcgatttgttagttttggttatatgaagttttatatattaatatttatagtggttttatttgttaatagttttaaattggaaaaagtttaaatgtttataagtaagcgaatgaatatagtatagtatatatatgtaatgggatattatttagtaataaaatggatgaaaattaaaatagttatgataaataaaagaaacgtgataaaaaaggtattttattattttacgtttataaaaatttttaaaaatgtaggttaatttatggtgatagaaagtagattagtggttgtttggggataggataaggagggatgaaaaggattataaaatagtaatttaattgaggttattatgttataaggaaatttaaattagtttatatattgaaattatataaagaaatttttatgagattatatgaaaaaaagagatagtttgttaatttttagttgtttagtttttagttattgtagttttagtaattatgtaggtgtaattacgagatagtcgtacgaaaattgtttagtacggtttttataaatttttaatttatagaaataatgagagataataaaatgttttttgttgttttaagttattaagttttggtagattcgttatatagtaacggtagttagaacggattattaggattgtttttatatttgatttttagttatttttagtagtttagattttttaaattatttttaatattttgttattttttatttttttttattattttttgaaatttttattgtgtttttttgagtaatttataaaatttatttttttaatttttgaattatttttttattttttgttttaagtaaaatttagttttttgaggatgtttttttttttcgtagttattttaaatgatagatgttttttttttttttttttatatattttatattattgtatttattggagatgtggggaagaaattttttttgttttggttggcgcggtggtttacgtttgtaattttaagcgttttgggaggtcggggtgggcggattataaagttaggagattgagattattttggttaatacggtgaaatttcgtttttattaaaaatataaaaaaataattagttgggcgtggtggcgggcgtttgtagttttagttattcgggaggttgaaggaggagaatggcgtgaatacgggaggcggagtttgtagtgagcggagatttcgttattgtattttagtttgggcgattgagttagatttcgatttaaaaaaaaaaaaaaaaaagaaaaaagaaattttttttgttttttatttgtatttttagattatttttttttattttttttttaaaatttttagttttgaaaattttgataaaaagtagttaggtatggtggttagtatttgtagttttagttatttgagaggttgaagtgggagaattttttgagtttgggaggaggttgtagtgagtcgtgatcgcgttattgtatttttatttgggtaataaaaagaggttttgtttcggggggggggaaaaaaagaaagaaggaaaattttgttattagatttatagtttattatcgttttttattgtagttatttatagtttatcgagttatttttttttattttttaatgtttatatcgtagttttttttttaatattatttttgttataatttttggtgatttaaatatttatgtagatgatttttttaattattttatatttgtaggtttttaaatttttttttattataattttgtatattttttgatgtggtgtagttttgtgtttttatttaaattttatgttgaattgtgatttttagtgttggaggtgggtatggtaggaggcgattggattatgggggtgatttttaatgatttagtattatttttaagtgttgttttttgataagcgtttttataagatttggttgttttaaagtatgtagtatttttttttttttttttttttttgttggttatgtgaagattgtgtttgttttttttttattttttattatgattgtaagtttttttaggtttttataagagaagtttgtataggtagtagaattgtgagttgattaaattttttatttttataaatatttggttttaggtatgtttttgtagtagtgtaagaatgaattgatatatttttaaattttagttatttatttattttaattgtatttatttattataattaataattataatttttttataaatgtagttttaagaattttatttttttaattattattttttaggttttgtaatttatttttattagtgatttgatggggataattattttattttattaggattggtagtatattgatttttttattttttttttttttttttttttttgaggtagagttttattttgtcgtttaggatggagtatagtggtacgatttcgggttattgtaaattttatatttcgggtttaagtgatttttttgttttagtttttttagtagttgagattataggtatttgttattatgtttagttaattttttttttttaagaggagttttgttttgtcgtttaggttggagtgtagtggcgtaatttcggtttattgtaaatttcgtttttcgtgtttaattgatttttttgttttagttttttaagtagttgggattataggtacgcgttattacgttcggttaatttttgtattttttttttttttttttttttaaagataaagttttgtttttgttgtttaggttggagtgtaatggagtgattttagttgtttgtaatttttgttttttaggtttaagtaatttttttgttttagtttttcgagtagttgggattatagatacgtgatattatgttcggttaatttttgtatttttagtagagataaggttttattatattggttaggttggtttcgaatttttgattttgtgatttgtttaattcggttttttaaagtgttgggattataggtgttagttatagcgttcggtcgatttttttattttttaaattgttttttagggttttaaaatttttatttttttttttttttttttttttttgaggtgaagttttattatatcgtttaggttggagtatagtggcgtgatttcggtttattgtaatttttattttttgggtttaagggatatttttgttatagttttttgagtagttgggattataggtatttgttattattttcggttaatttttttgtatttttattagagatggggtttcgttatatcggttaggttggttttaaatttttgattttaggtaatttatttattttagttttttaaagtgttgggattataggcgtgagttatcgcgttcggttttttatttttttttttagttagtttaaattttatggttaattattaagagaatttttttgtattttttttttttatttttttatatttacgtggtaaaattataattgtattaattttaattttttatttattttgtgggtgtttttatatataattttgttgtttggttttttttaatttatgattacgaattttaagtaggttttttatgttgtttagtaatatttttattaaatttttttagtttaatttttgtttatttttttaaagaattatttattttttattttttttttttttttttattttagtttttagttgataattttgttttttttattaagagaatagtaagaattaagagaatttttaaaattttttgttattttatttgtttatttacgtattatagatgtgttaattatatagttgttattaaaagaatcgttaatgtttttaataaaggttaaatttatttttttttatttattttaggatattgttttagttattgtttttttttcgatattaatttttttatttttattttttttattaatttataaatatgttgaaatatgttgtttttattttagtgtagtggtttatattagtaattttagtattttgggaggtagaggtgggaggatagtttgaggttaggagtttaaggttgtagtgatttatgattgcgttattggtattttagtagtttgggtaatagagtaagattttttttttttaaaattatatatatataattaaaattttttttaatttatttttttttttatttattgtttaatttttttattttttatttataataaaatttcgtggtggtttatttttttaggtttagcgattttaaaggagggtcgtttgaggttaagagattaacgttgttatgggttaggattatgttattgtattttagtttgggttatagagagcgaatttgtttttaaaaaaattttttttaaatagaattttttgaaatatgtttatcgatgtttttattatttatttatttatttatttatttatttatttgagacggagttttgttttatcgtttaggttggagtgtagtggcgcgatttcggtttattgtaagtttcgtttttcggttttatgatatttttttgttttagtttttcgagtagttgggattataggcgttcgttattacgttcggttaattttttgtatttgtagtagagacggggttttatcgtgttagttaggatggtttcgattttttgattttgtgattcggtcgtttcggttttttaaagtgttgggattataggtttgagttatcgcgttcggtcgtttattttgttttaagatagggtttggttttgtcgtttaggttggagtgtagaggcgtaattatagattattgtagtttttatttttttgagttttttaaggtttgaattttttaggtagttgagattatagacgcgtattataatattcgtttaatttttgtagattcggagttatattatgttgtttaggttggttaaatgttgttttggatttttttttttttattttttaatttattttagttaaatttatttttattatgttatgtttaagattgaatttttgagaaatttgttttattggtaatttttttttttttattttagtaaaaggtaattttatttttttaattatttaggataattttcgttatcgaatttatttgaaaaatttgttgttttcgattttaaaatatatttagaatttaaatatttttattttgttaataatattttgttttgaagtttagattattttaatagatttttaagtggtttttttgttttattttggtttaatgtttttattttttttatattagttagagaggagtgaataaaataagttattgttaagtcgcggtagggtttttatttaacgttattaaggagtttaaattgttcgaggaaggagtttgcggatgtggttcgtagggaacggagtgggaaaagacgtagaaaaacgcggattataattttagtgagcggatcgatttgatgttgtttcgaggttgcggaaggagagttgggtcggaagaagggtgttgagagcgttaatagggagattgtattggttgcgattttatttggtttgtgtcgcgtcggaatagtacggaatttttttgtttcgggacgtcgttattattgtcgtcgttgtttatcgttatagtaaattcgcgggtgcgtagcgtggggtttcgtttttttttaagagtgacgattttcgtcgttcggggtttttgggagcggaatagtacggtggtcgggaggatcgtttgtagtaattttttacgttttttacgagtggttatcgtttttttatatttgtggcgtgtatattttttattttttttaatttttttattttattgtgttatattttttttttttttttttttgtttgtttgttttgagatagagtttcgttttgtcgtttaggttggagtgtagcggcgcgatttcggtttattgtagtttcgattttttgggtttaagcgatttttttattttagtttttttagtagttaggattataggcgtgcgttattacgtttagttattttttgtatttagtagagacggggtttcggtatgttgtttaggtttcgtttcgaattttagtgtgtgtgtgtgtgtgtgtgtgtgtgtgtgtgtgtgtgtagatatttatttttttttttttttggaaaagtaaatgtaagtttttattaggaatttaaaatttgtttgatttatataaagataaataaggaaagataaatatgggggtaggaaggaaggcggtagatttttaaatattagaagatatttgattttttaattttatttgttgtttgttttgagacggagtttcgttttgtcgttagagtgtagtggtattatttcggtttattgtagtttcgatttttcgagtttaagcgattttttcgttttaattttttaagtagttaggattataggggtacgttattatattcggttagtttttgtatgttttgtagaggcggcgtttggagtatattgtgtaggttggtttcgaatttttgagtttaagatatttcgttcgtttttggtattttaaaatgttgggattataggtgtgagttatttcgtttagtttttagtatttttttttttttttgcgatagagtattgttttgttatttaggttggaatgtagtggcgtgattttagtttattgtaatttttgttttttaggtttaagtaatttttttgttttagtttttcgagtagttgggattataggcgtttattattatattcggttaatttttgtatttttagtaaagatggggttttattatgttggttaggttggttttgaatttttgattttgtaattcgatcgtttcggttttttaaagtgttgggattataggtgtgagttattatatcgggtttttagtattttttattaagtatttagggttgttaaatggtttatatgtatatagtatatatatatttttaattttacgaaaggaattttgagttttttttttaaaatatttttggtttttatatagtatataagaaatatttgtggaggaaggggagaatgggatgatgttgattaagtgtataaaaatggtaatttcgtagaggtaatatgtggaatgtaattattttataatgtatatttaaatattaaatggtatattttaaatatatataatttttaggggtttggtacggtggtttatgtttataattttagtattttgggaggttaaggtgggtggattatttgaggttaggagtttaagattagtttggttaatatggtgaaattttgttttttttaaaaatataaaaattagtcgggtgtggtggtgtaggtttgtaatgatagttgtttgggaggttgaggtaggagaattttttgaattcgggaggcggaggttgtagtgagttaagattacgttattgtattttagtttgagtgatagagtgcgattttattttaaataaataaatatgtataatttttatgtgttaaaaaagttaaattgttataagataaaaaaaaaaattttaaattttatgttaggaaagtaatgtgttaaaggtatattttatagataaatatgaaaatttgtattttagtttgggcgatagagtgaggttgtgttttagaaaaaaaaaaaaaagtaaaaaaaaaagtatgtttttataaagtttgtttagatttttttgaattataaaaatttttataattgtatttgatgttaaaatttaaataaattacgtggatatattatatgatggttaaaaaaataaatttaaataaaatatagaattaggtttttttttgttttttaatttttttttttttgagacggagtttcgttttgttatttagattggagtgtagtggtttattgtaatttttgtttttcgggtttaagtgatttttttgttttagtttttcgagtatttgggattataggcgtgtgttattacgtttagttaatttttgtatttttagtagagacggggttttgttatgttggttaggttggttttaaatttttgattttgtgattcgttcgttttagttttttaaagtgttgcgattataggtatgagttatcgtatttagttatttttttttgtttttattatttagagatataattgatatattatagaattaatcgttttagagagtataattgaatggtagatagagcggaaattttaatatatttataaggttgtgtaattattattattatttaattttagaatattttaattatttattaaagaaattttgttttttttagtagtgcgttgttatgtttagttattttttgggagagaaggggtttttttatgttgtttacgttggttttaaattcggttgtttaagtagtttttttatttgagtcgttgtgtttaggtttgagttattatatttataaaagttattttatatgatagataaattatttaaaatataatgaggtaaattgttaaaagaaattattttattatatttgaaggtatttaatgtaaatgttgaatttaattttatgtattggaattagtttttttgtatatgtaatttttatattaaaaatttgtttttagttgatttttggaatttttttatgataaaataaaagttttaaataatgtcggggtggtggttaatatttgtaattttagtattgtgggagttcgaggtaggtggattatatgaggttaggagtttgagattagtttagttaatatggtaatattaaagatatgaaagttagttaggtatggtggtgtatgtttgtaattttagttattagggaggttgaggtataaaaattatttgaaattgggaggtggaggttgtaatgagttgagatcgtgttattgtatattagtttgtgagatagagtaagattttgttttaaaaaaaaaaaaaaaaaaaaaaaaaaaagggttaagtatggtggtttatgtttgtaattttagtattttgggaggttgagtgggagaggattatttgagtttaagtaatatggttaggttttatttttataaaaataaattagttgggtatggtggtatgggtttgtggtattagttatttaggaggttgagataggaggagtatttgagttaaggaggttaaaggttgtagtaagttatgtttttgttatcgtgttttagtttgggtaatagagtaatatgttgttttaaaaataaattaaaaaaatggtagtatttatatgtgaagattgtatataataaagattgtaaagtagagagaaaaattggatagtttattaaaaagaaaatttaaatgttattagagatttgagaagatgtttaatttttagagttaaggaattgtaaattaataattaagataatattttagggtttggtacggtggtttatgttagtaattttagtattttgggaggttgaggtaggcggattatttgaggttaggatttgagattattttggttaatatggtgaaattttgtttttattaaaaatataaaaattagttgagtatggttgcggcgtttataattttagttattttgaagattgaggtaggagaatcgtttgaatttaggaagcggaggttgtagtgagttgagatcgtgttagtgt

SEQ ID NO: 1703 - DNA, 6109 bp, Artificial Sequence
  chemically treated genomic DNA (Homo sapiens)
tttggtttgttgtttaggttagagtatagtgatgttatttcggtttattgtattttttgttttttaggtttaagtgatttttgtgttttagttttttgagtagttgggattataggtatgcgttttatgtttagttaattttttgattatttgtagagaacgggttttattatgttgtttaggttggttttgaatttttggttttaagtagtttttttgttttggttttttaaagtattgggattatagacgtgtgttattatttttagttttagaaagattttttattagattatgaattatatttaatttgcgagtagatttcgatttgaataattaatttgttttttattgatatagtcgttttgggtaagttatttaaattgagttttagtttttttatttgtaaaatagtataatgaagataatgatgtagataaatatttagtagggtatttggtgtttaagaggtatttagtgaatttttttttttttgtttaggtttaaattagaaaagaaaaaggttaaattaggagttttttagtaagtttaagtgaattatagtatgagaaatagggtgtaaaagtattgagaaaaattttgtatttttttttgaaaggtatattattagtatagtataagtttttagtagtattggaaaaatgatataagtatttaatagattagattaaatttgagaaaagtacgtttaatggtatttttgtattaattgatgttttattttttattttattttattagtttttttttttgtaatattttgggtaatttttttttgatttcgtaaggaaaatgtttgtagagaataataaatatgagtaaggttatgtagttaattataggttatattttttttgattcgttttagtaaatttataaagattaataagaatttgaggagtattattttttgtttgtttttgtttttttttttataattttattttgattttgttatttttatatatagttgatttttgaataatatgggtttgaattgcgtgggtttatttataggtaaattttttttttagtaaatataattagtttttcgtattagtaggttttatatttataattaaatgtagatagaaaatatggtatttagttaggtacggtagtttatttttgtaattttagaattttgggaggttgaggtgggaggattgtttgattttaaaagttttagaagtttgagattagtttggataatatagtgagattttgtttttataaaatagtttaaaaattagtcgggtatgatgtatgtatttgtagttttagttatttagggggttaaatgggaggattgtttgagtttgggagggtaaggttgtagtgaatttgattgtattatcgttttttaatttggatgatagagtgaagttttgttttaaaaaaaaaaaaaaagaaagaaagaaagaaaagaaaatacggtatttatatatgtaaaattttcgtttatagagggcggatttttatatttgtaggttttttagggttaattggtatttataggtagtattgaatttaattttttgagcgatagttatattaaatttgtgtttaaaatttttaagaatatagagtaattttaggtagttgtattttggcgttagtatgttaaatttgggagtagatatttgttatttgttttgcgtgttgtttggttagggaagaaaaaaatattaagtagaatttcgagtttatatggaaaggatgtgttttttagaatgattttattgcgatgttaggggtgattttttacgttatttattttttagttatatttgttttttttttttttttaaagaaggtagtatagaggttaggagtgtatttatttttaattttggagttttgtttttttttttttaggaagttagtaaagattgatttgtaattggtaataattatttttaggaatagaattataaaattatataatttgtgatatttgggtttttttattttagaatgtttttcgatttataggatattatatttgaaaattttattaagggtgttttttttaggtattaatggattagtgtatattattttttatatttttttttttgtcgggtattgaggagttatatatgataggaatagataattttagagtattattgtttggggagggtaggttttggagaggtatttcggttggggttttaggaagtgatggaaaagtatgaggttatttgggtagatgtggggtattatagaaaggaaaggtgtgtaaaagtgtggaggtgagagggtataaaaaataatttttatttattttttgtagttgtaaataggaaagagtgataaaagaggaatagtagtatggatatgtgtatgtatgataaagtttaagatttaaataattagtaaattaataaaatatttggttttttttatgtttgtatttaatgaatgatatttttatattttgattatattttagtgtggaaattttttgtttgaagtatagtttatggtaagtaagatagaaatttaaatttggaatttaaaatgtttttttttatgagtattaatggttttaattaaggtttaaaatttttttttttttttttttgagatggagtttcgttttgttatttaggttggagtgtagtggtatagttttggtttattgtaatttttgttttttaggtttaagtaatttttttgttttagtttttcgagtagttgggattataggcgtttattattattttcggttaatttttgtatttttagtagaaacggggttttattatgtcgattaagttggtttcgattttttaatttcgtgatttattcgtttcggttttttaaagtattgggattataggcgtgagttattgcgtttggtttttaaaattttaaattataaaatagttatgatagtagaattataaataaggttaggtacggtggtttaggtttgtaatttgggtattttgggaggttgaggtggatagattatttgaggtttggagttcgagattagtttggttaatatggtgaaattttatttttattaaaaatatagaaattagtggggcgtggtggtgtatgtttgtaattttagttttttgggaggttgaggtaggagaattgtttgaatttaggaggtagaaggtgtagtgagttagggttatattattgtattttagtttgggtaatagagtgagattttattttaaaaaaataaaaaaaataatatgatagtagtggtttaattaaaaataattgaaaagatttaaatttttttgtttgtttgttttttgagatagggttttgttttgttatttaggttggagtgtagtgttatgattttgatttattttagttttaattttttggatttaagtaattcgtttattttaattttttcggtagttgggattataggtgtgcgttattatgtttggttaatttttgtatatttggtagagatggggttttgttatgttgtttaggttgaattttaatttttgagtttaagttatttatttattttagttttttaaagtgttaggattttagttatgagttattatatttagttaaaaatgattgaaaagatttatatgtgattatattatatatttgtaatagtagtttttggtttgtggttttagtgattttttgcgagttttgtgttattgttatatgtagttttgtttttaagagttatgtaaatattttgagagtatattttgtttttttatttatttgtttatttagttatttttggagtatttattattagattttattaggtgttagagatataaagataaaatttttgttttttaagaatttagtttagtatatttttggggaattaagttttttgtttattaaagagtatatttatggtaaggttttttattttaaattgatattttgggttagattattttttgttggagggtttttttgaagagtgttgtaggatgttaagtagtttttttgtttttatttattagatgttattaattagttttattatttggtttaagttgtgataattaagtaattttagatattgttagatttttggggttaaatttgtaataagaattagagtttatttgtgttattgatcgtgagttttgataaatgagttttgagaaaatttatataaagttagtaaatgtaataaagaatttagattcgttgtataatgtttgttattattttatatgattttttaaagaggaattagataatagtcgtgttgagtaatatttacgaaatgttttattttttagtttggatgtttatgagatttttttttgagttattgtgtataggagaataattgtttggttttttagggattttagtaaaataataaaataatataagttattggaggggaagagtttaatgtataataaaaattttagtttttttcgagttgtttgtattagtatttttttttttttgttaagagtgaaagtattttttttagtgagtgttttggataattggtatatttagaaatgttttttgtgttttttaggtatataattttaaattttgttattttattaaattggatttttttttatttattgtttttttatgtttagataatatatgaagaatattgaataattaaaaatttattttaatagttttttaatgtttgttttttagtaatgttttgtttttttaagtagaggatttatttttttgttggaaagagtatttttttagaagttttaaaatttgtattttaggtttatttttggtatttttattaaatatttatttagtttttttcggttttgatttttttatttgtggtagattaatagatatagaaagaggtttttttattttgtttttttgataagtttttaaattttataaatttatattttttgtttatataaatttttatatatttttatttttatataatatttatatttttatttttgtgtttaatagagttttgatttattatggataatttgttattagaagaaatttaatagagagtttattagattattgatgaggtaaatgttttatttaaaataagtaaataattttattttagtttttatattggaggagtgagagagtttttttagggatattttggtttttttttagtttattaatattaaagaatatatttgttttttagtgttattgttggtttttattttttttttaatttattagaaaattaaagtgaaaataatttgtatgatttttattttttaggtaattattaatattatttaagtgtaataaagatattttattatgtatttgagaaatgttagatttttatttaataattttttaatatttgtaatttatttagatttttatttatattaaatttttatttttatgaattttattatttaaatatttttttttttaaaaaaatttttttttttaatattatattggaagtttttatatatttttttttaaggagcgtttgaaaataattaaaaatgtagtgattaatttatttttttttttttttttttttttgagacggagttttattttattgtttaggttggagtatagtgatgcgatttcggtttattgtaatttttgttttttgtgtttaagcgatttttttgttttagttttttgagtagttgggattataggtgtgtgttattacgtttagttaatttttgtatttttagtagagatggggttttattttgttgggtaggttggttttaaatttttgatttcgtgattcgtttattttagttttttaaagtgttgggattataggtttgaattattatattcggttattgttttgttttaaagggaaggataggttggtaattttttttgtttttttttttaatggaaatagttttattatgttgtttgggttggttttgagtttcggtatttaagaaatttttttgtttcggttttttaaagtgttgggattataggtatgagttattgtgttcggtttgagttggtaatttttaaagatagaatagtattatgaatttggtttgtgattagatttttttttttatatattttggaatgttaaaattttgtgtttttttttagt

SEQ ID NO: 1704 - DNA, 6109 bp, Artificial Sequence
  chemically treated genomic DNA (Homo sapiens)
attaggaaagaatatagaattttagtattttaaaatatgtagaaaaaaaaatttgattataggttaaatttatgatgttattttatttttaaaaattgttagtttaggtcgggtatagtggtttatgtttataattttagtattttgggaggtcgaggtaggaggattttttgagtatcggagtttaagattagtttagataatatagtgagattgtttttattaaaggaaaaaataaaaagaattgttagtttatttttttttttaaaataaaataatggtcgggtgtggtggtttaagtttataattttagtattttgggaggttgaggtgggcggattacgaggttagaagtttgagattagtttgtttaataaggtgaaattttatttttattaaaaatataaaaattagttgggcgtggtggtatatatttataattttagttatttaggaggttgaggtaggagaatcgtttgaatataggaggtagaggttgtaataagtcgagatcgtattattatattttagtttgggtaatagagtgagatttcgttttaaaaaaaaaaaaaaaaaaaaaagtaagttgattattatatttttagttatttttaggcgttttttaagagaaaatgtgtaaggatttttagtgtgatgttgaaagaaaaagtttttttaaaaaagagaatatttggatggtgaagtttatgggaataaaaatttaatgtaggtagaaatttaagtaaattatagatattaggaaattgttaaatagaagtttagtattttttaaatatatagtagagtatttttgttatatttaagtaatattaataattatttaaaaaataaaaattatataaattgtttttattttagttttttggtgagttaaaaagaaaataaaaattagtaatggtattaaggagtaaatgtgttttttgatattaatggattaggaagaggttaaaatgtttttaagaaggtttttttatttttttaatatgaaaattgaaatagaattatttatttattttaggtaaaatatttattttattagtaatttggtgagttttttgttgaattttttttgatgatagattatttatgatgaattaaaattttattaggtatagaaatggaaatgtggatattgtataagaataaggatatataaaagtttgtgtgagtaaaaagtgtagatttatggaatttaggaatttattaggaaaataggataaaagaatttttttttatatttattagtttattataagtaaagaaattaagatcgagagaggttaaatgaatgtttaataagagtgttaagggtgaatttaaaatataggttttaggatttttagggaagtattttttttaataggaaagtggattttttatttagagaagtaaggtattattggaagataagtattaaaagattattaaagtgaatttttggttgtttaatgttttttatgtgttgtttgaatatggaaaagtagtaggtgaagaaaagtttaatttagtaaagtaataaaatttgaagttatgtgtttgaagaatataggaaatatttttaaatatgttagttgtttaggatatttattggagaaaatatttttatttttaataagaaaagggaaatgttggtataaatagttcggaaaagattaaggtttttattatgtattagattttttttttttagtggtttatattgttttgttgttttattggagtttttaagaaattaaataattatttttttatatatagtaatttagaaggagattttatagatatttaagttaaaaaataaaatatttcgtaggtgttatttagtacggttgttatttaatttttttttgagaagttatgtggagtaataataagtattgtgtaacggatttaggttttttgttatatttgttagttttgtatgaatttttttaaaatttatttattaaaatttacggttaatgatatagataaattttggtttttattatagatttgattttaggaatttggtaatgtttggagttgtttgattgttataatttgggttaggtgatggggttggttaatggtatttagtaggtagaggtagggaaattgtttaatattttataatattttttaggaaagttttttagtaaagaataatttgatttaaaatgttaatttgaggtgagaaattttgttatggatatattttttgataagtagaaaatttaattttttaagaatgtattggattgaatttttggaaggtagagattttatttttgtatttttaatatttaataggatttgatggtagatattttaaaaatagttgaatgaataaataagtagaaaaatagggtgtatttttaaagtatttatatggtttttagaaataaagttgtatgtaatagtagtataaagttcgtaaagaattattagagttataaattaaaaattgttattgtaagtgtatgatatgattatatataaatttttttagttatttttggttgggtgtggtagtttatgattggaattttagtattttgggaggttgaggtgagtggatggtttgagtttaggagttggagtttagtttgggtaatatggtaaaattttatttttattaaatatataaaaattagttaggtatggtggcgtatatttgtagttttagttatcggggaggttggggtgggcggattgtttgagtttaggaggttgaggttgaagtaagttaagattatggtattgtattttagtttgggtgatagagtaagattttattttaaaaaataaataaataaaaaaatttaaatttttttagttgtttttaattgaattattattattatgttattttttttatttttttgagatggagttttattttgttgtttaggttggagtgtagtggtgtaattttgatttattgtattttttgttttttgggtttaagtaatttttttgttttagttttttaaggagttgggattataggtatgtattattacgttttattaatttttgtatttttagtagagatggggttttattatgttggttaggttgatttcgaattttagattttaggtgatttatttattttagttttttaaagtgtttagattgtaggtttgagttatcgtgtttggttttgtttataattttattgttatagttgttttatggtttaagattttgagggttaggcgtagtggtttacgtttgtaattttaatattttgggaggtcgaggcggatggattacggggttaggagatcgaggttagtttgatcgatatggtgaaatttcgtttttattaaaaatataaaaattagtcgggagtggtggtgagcgtttgtaattttagttattcgggaggttgaggtaggagaattgtttgaatttgggaggtagaggttgtagtgagttaagattgtgttattgtattttagtttgggtgatagagcgagattttattttaaaaaaaaaaaaaaaaagattttgagttttgattaaagttattagtgtttatgaaaaaaagtattttaagttttaaatttaagtttttattttgtttgttatagattgtgttttaggtaaaaagtttttatattaagatataattaagatataaagatattatttattagatataagtataaaaggaattaggtattttattaatttgttaattgtttgagttttaagttttattatatatatatatgtttatgttattgttttttttttgttatttttttttatttgtaattataaaaagtaaatggagattattttttgtatttttttatttttatatttttgtatattttttttttttataatattttatatttgtttaggtagttttatgtttttttattattttttaaagttttaatcgagatatttttttaaagtttgttttttttaggtagtaatgttttgaagttatttatttttgttatgtgtaattttttaatgttcgatagagaagaaaatatgaaaaataatatatattaatttattagtgtttggaaaaggtatttttagtgaggtttttagatatagtattttgtgggtcgggagatattttggggtaaggaagtttaaatattataaattatgtaattttgtaattttatttttagaggtgattattgttaattataagttagtttttgttagttttttaggaaaaaaaaagtaaaattttagagttaggagtgaatgtatttttgatttttgtgttgttttttttaaaagaaaaaagaaagtagatataattgggagatggataacgtgaggaattatttttgatatcgtaatgaggttattttgaaggatatattttttttatgtgaattcgaagttttgtttaatattttttttttttttgattagataatacgtaagataagtaatagatatttatttttaagtttggtatgttaacgttaggatgtagttgtttaagattattttgtgtttttgagggttttgagtataagtttagtgtggttgtcgtttagagggttggatttagtattgtttgtggatattaattggttttgaggaatttgtagatataaaagttcgttttttgtagacgggagttttgtatgtatgaatatcgtatttttttttttttttttttttttttttttttttttttgaggtaaggttttattttgttatttaggttggagagcggtggtgtaattaggtttattatagttttgtttttttaggtttaagtaatttttttatttagttttttgaatagttgggattataggtgtatgtattatgttcggttaatttttaagttgttttatagagatagggttttattatgttatttaggttggttttaaatttttgaaatttttggggttaagtaatttttttattttagttttttaaagttttggaattatagggatgagttatcgtatttggttgaatattatattttttatttgtatttggttatagatgtggaatttgttgatacggagggttgattgtatttattgaaaaaaaaatttatttataagtggatttacgtagtttaagtttatgttgtttaagggttaattgtatatgaaagtaatagagttaaagtagaattgtaaggggaaggataaagatagataaggaataatattttttaagtttttattggtttttgtaagtttgttgagacgagttagagagaatgtaatttataattagttatatagttttatttatatttattattttttgtagatattttttttacggaattaggaaaaggttatttagaatattatagaaaagagaattggtggggtgggatgaaaaataaaatattagttgatataaagatgttattaaacgtattttttttagatttaatttaatttattaaatatttgtgttatttttttagtgttgttgggaatttatattatgttaatagtgtgttttttagaggaaaatgtaagattttttttagtgtttttatattttattttttatgttatggtttatttgggtttattaaaagatttttaatttgattttttttttttttaatttaaatttaggtagggaaagaaaagtttattgagtattttttaggtattagatattttattaagtatttatttatattattatttttattatattattttatagatggagaaattaaggtttagtttaggtaatttatttaaggcggttgtgttagtaaagagtagattgattatttaagtcgggatttattcgtaaattaagtataatttatggtttgataaagagtttttttggagttgggagtggtggtatacgtttgtaattttagtattttaggaggttaaggtaggaggattgtttgaggttaggaatttaagattagtttgggtaatatagtgagattcgttttttataaataattaaaaaattagttgggtatggggcgtatgtttgtagttttagttatttaggaggttgaggtataagaattatttgaatttgggaggtagagggtatagtgagtcgagatggtattattgtgttttagtttgggtaatagattaag

SEQ ID NO: 1705 - DNA, 5883 bp, Artificial Sequence
  chemically treated genomic DNA (Homo sapiens)
aatgatggtaggtttattttttgaatttttagaaatttaagtttaaagtattacgtttttttaatattgtgtggtgttttttgttattttatttttttaatatttatatggaatagtaattattagtttttttttttagatgtgtcgtttgggggtgttaaagttggtgttaagattaattttaagaattatattgtaagtatgaaagtgatatttgttttttattgttgttgttgtttttgtttttttgagatagagtttttttttgttgtttaggtcggagtataatggcgtaattttggtttattgtaattttcgtttttcgggtttaagtagttttttttgatttagtaattgggattataggtgtacgttattatgttcgattaatttttgtatttttagtagagaggggattttattatgttggttaggttgtttttgaatttttgattttaggtgatttatttgttttggttttttagagtgttaggattgtaggtatgagttatcgtattcggttttaaagtgatatttgtgtatatagtgtatttatgaaggatttgaaattattgggtttttttgtattttttattattagtgagattagtagtttttattgttttttaaatggaatagaaaaatgtaaagaattaatttatagcgtgttttgttatataaagattatttatttaatatttatattttttattattttttgttttatttggttttgtttttatgagttttttgttttatttttttgttttttgttttattatttttttatttagttaaaacgtaattaatatttttatttatatatttatatttatatttatataatgtttttatttagatatttatatttatatttaagaaatattgtgatttgattagttaggtatagtggtgtatatttgtaattttagttattcgggaggtttaggtatgagaattgtttgaatttaggaggtagaggttggttgagattttattattgtattttagtttgggtaatagagtaagattttgttttaaaaagaaaaaagtattattgtgatttgaagtttttatgttaggatttgattttagtgatatatattttaattaagattataaaaattttattttttatttagttagttttaagttaatttaaattgattgttataatgttttatataatattaaattatttatatataaatataaatgtatgatttttattttttttaaaatttattatttaaatggaatataattatatttaaattaattttaattaagatttagtgtattttttagtggggaattaatagaatgggaatttgagttttagttttattattttgtttttataatttatttttttgattttttattttgttatttttaaaatggtaatgtttattttatgagttgttttaaggattatatgagaagatatatgaaaatgtattataaatagaaaataagatgttagttataattttaagcgatttttatattaatttttttttttgtttttgtttttttattttataggataatgaattggaaaagattataaggaggtttattatggagttagtaaaaaagggttttattggtatgtgtagttatatagtttttggtataaagtgggaatatttaaaaatttttttttttttttgagacggagttttattttgttgtttagattagagtgtagtggtgcgatttcgttcgttttttgggtttaagtaatttttttgttttagttttttaagtagttgagattataggtatgtgttattatatttagttgatttttgtatttttattggagatggggttttgttatgttggttaggttgggtttgaatttttgatattaggtgatttatttatttcggatttttaaattgttggtattatagataggagttattgtgttcggttttttattatttgttataggagtttttgttaaatatataatatttttgaagatattaatttttgtttgtttgatgtttttgtattttattattatttgtgtttatattttttttgtgtataatttgaatattttttttatgatatgtaagtatttgttatgtattttttaatttttaagtagtttaaatttatattttttttaatttagaaggtttttaatttgtttgaatagaatatgtataattatttaatagaatgtttgttttattagtatagttaatagaatgttaatatttattgtcgagcgtggtggtttatatttgtaattttagtattttgagaggtcgaggtaggtggattacgaggttagatcgagattattttggttaacggggtttagtaggaattttatttttattaaaaatataaaaaatttgttaggcgtggtcgcgagtgtttgtagttttagttatttaggaggttgagataggagaatggtgtgaatttgggaagtagagtttttagtgagttaagattacgttattatattttagtttgggtaatagagcgagatttcgttttaaaaaaaaaaaaaaaaaaaaaaaaaagaatgttaattgttatttaataatagaatatttgttttattaatattagtatagttaaataaaataaggtttatttaaatagaaaataaagtgtatttttttttattttttttttttagtattttttttataagtttttatgaaattaaattataaaggttgggtatggtggttggtgtttgtaattttagtatttttggaggttgaggtgggaggattatttgagtttagaagttcgagattattttgggtaatattataagattttatttttataaaaaatgaaaatattatttaagcgtgatggtgtatgtttgtggttttaattattaagatgggaggattttttaagtttggggggttgaggttgtagtgagttatgattgtgttattgtattttggtttgttatattttggtttgagtaataaaacgagattatattttaagaagaaagagaaatgaaataaagttattcggatttatttttaggaaaaaaaagttatgaaataaatgttatgaaataatttaatatagaaatatagtaagtataggtaattttaaaatttgattagatttggtttgtttttgataataaaaggtatttgggtttttgatgtgtcgtatatttagtattattgtgaatttgtgtatttttatatggagtttgttaacgtaagttaatatgagttaattatttcgtttatatttttataggagtgtttattgattttgagatatggtgaattgaagttatttttagtttgttaatagtttttataatttttaaaaggttttttttttttttttaaattttaaatatattttatagttttgaatggttttagattttatttagttatatttgttatttatatttgtaatatttttagtttaatttattagatttgataagtatttaataattttaaaggttaaaaagtgatttattggaatattgaaagaaaatatagtttaaattttagtaatttgatttatttgtttaatgtgtaaaagttttattgatttaggatgtagttaaattgacgttttggtttagaaagttttgaagtttaggaggtaggtaaagggagtttttttttttatttttcggtaaatttttaaatttgatgttatttatttgttattttttgattgtttattttatagaaagtgttagattgaggtttagatttgagtttgaattttgattttgttatatgtgtgtttagtattagtttgtaaatttttgtaaaataaaagaaaaaaagaggttgggatttttataggaattttattgaatttgtatattaatttgtggagtattgttattttttttattttttttaaaaaggttttgtttttttatttaggttggagtattagatagtagttattgtaattttgattttttgggtttaagtaatttttttattttatttttttaagtagttagaattataggggtgtgtaattgtgtttagttaattttttaattttttgtggagatacggttttattacgtattttagattggttttaaatttttgagtttaagtagtttttttattttagttttttaaaattttgggattataggtatgagttattgtatttgattagtattgttattttaattatattaagttttttaatgttgaatatgagatgtttttttatttatttaggttttttgattttttttaatgatgttttgtagtttttattgtagaagttttatatagaagttttataattaaatattttattttttttaatgttattgtaagtgatattggtttatagtttttttatgatgtttttgtttagtttttgtattaggataattttagttttatggaatgagttgaggagtgttttttttttttttgtttttggaaaagtttttgaaaggttaatgtttatttttttgtgtgagtgtaaatattatttaagttttgtaggattttgatgtttttattttttttatttttttatatttttgtgtattaaaattatttttttattttttattttatagttatatgttgttagaaaagttgtttttttaaaaaagattaatttttgttttatatttgttttttatataagaatttatttgttaggtcgggtcgcgggcgtcggtgtgttggtgtttgtttttttgtgtggagggaaggtggggtggattttttgttttttttttttttttttttcgtttttattgtacgtagggttggttgggttttagttggttttcgtattaatattttatcggcgttaataggaggtatcggggatagtcgttgcggtagtattcgagttagtttaagttcgtagttcgtagggagatttagtttcgttttgtttgtagtagtataattttgtatatttattatggatgtttttaagaagggtttttttatcgttaaggagggcgtggtgggtgcggtggaaaagattaagtagggggtgacggaagtagttgagaagattaaggagggggttatgtatgtgggtaagtggggtatggtagggtgggatagtgtggtggttaaagggtgagtgtttagttattttcgttagattttattttttagttttagggaggtattttgggagggggcgaggttttggttattaaggtggggtttttagattttggagtatttataatgttttgtgtatatttatgtgtgtttgtttttggttttttcggggtttttgggtgttagagatcgtagatagggttggttatttgtttgtgtacgtatatatatatttttaagtatattagttttttttgagtttggagtttttgaagttatgagtagtttgtgtttaggtggtttttattttttttatacgggagcggttatagttaggttacggattttttttttttttagagagaaggggtaggttgggggatgaaatttaggtttagtgttttttttttcgtatttttttttggtattttttagaggaggaaggggaggttaagttaatgatttagttttggtttattttgttttgttgttgtttttgaggttcggttatattcgggtaggggttggattttgggtttagttagtgtttttattttaggtttgtttttttttgttttttatattttgttttgttttttttttatttatttattttttttagatatagtaggaagaggttttttgaaggggtcgtcggtttttagatattatttttatttttttatcgattttatagtttgtttagttgttttgttgtgtttgttttgatcgtttttaatatttcgagggaggtttgggttgatagttttattttttttttagg

SEQ ID NO: 1706 - DNA, 5883 bp, Artificial Sequence
  chemically treated genomic DNA (Homo sapiens)
tttggggaggaaatggagttgttagtttagatttttttcgaggtgttgggggcggttaggataaatataatagaatagttggataaattgtggggtcggtgggggggtaaggatggtgtttgggggtcggcggtttttttagagggtttttttttgttgtgtttggaagaagtggatggatgggaaggggataggatagaatgtgggggataagagagagtaggtttgaggtagggatattggttagatttagggtttagtttttgttcgggtgtggtcgggttttagaagtagtaataggataggatgggttagagttgagttattggtttgatttttttttttttttttggagagtgttaggagaggatgcgggggagggaatattgagtttaggttttattttttagtttgttttttttttttggggagggaggggattcgtgatttggttgtagtcgttttcgtgtggagagggtgggggttatttgagtataggttgtttatggttttaggggttttaggtttaggggaggttggtatgtttgggaatgtgtgtgtgcgtgtatagataggtagttagttttgtttgcggtttttgatatttagaggtttcgaggaggttaaagataaatatatataggtgtgtatagggtattgtgggtgttttagggtttggagattttattttgatagttagggtttcgtttttttttaaaatgtttttttggggttggggagtaaggtttggcgaaggtaattgggtatttattttttggttattatattgttttattttgttatgttttatttatttatatatatgattttttttttggtttttttagttgttttcgttattttttgtttggttttttttatcgtatttattacgttttttttggcgatggagaagttttttttgaagatatttatggtgggtgtgtagggttgtgttgttgtaggtaggacggagttggatttttttgcgagttgcgggtttgagttggttcgagtgttgtcgtagcggttgttttcgatgttttttattgacgtcgatgaaatattgatgcggaggttagttggagtttagttagttttgcgtgtagtgggggcggggagggagggagggagggataggaggtttattttattttttttttatataggaaggtagatattagtatatcggcgttcgcggttcggtttaatagataaatttttatatagagaataggtatgaggtagaagttaattttttttaaaaaagtaatttttttaatagtatgtgattatagagtaggagatgaaagggtaattttggtatatagagatataaggggatgagaagggtggagatattagggttttgtagaatttaggtgatatttatatttatataagagaatgaatattgattttttaaaagtttttttaaaagtagaagaggaaggaatattttttaatttattttatgaggttagaattgttttgatataaagattagataaagatattataagaaaattatagattaatgttatttataatagtattaaaaggagtaaaatatttagttgtaagatttttatgtaagatttttataatgagaattataaaatattattgaaagaaattaagagatttaaataaatggaaagatattttatatttagtattggaaggtttaatatggttaagatggtaatattggttaggtgtagtggtttatgtttataattttagaattttgggaagttgaggtgggaagattgtttgagtttaggagtttgagattagtttgggatacgtgatgagatcgtgtttttataaaaaattaaaaaattagttaggtatagttgtatatttttgtggttttagttatttgggagggtgaggtgagaggattgtttgagtttaggaggttaaggttgtagtgattgttgtttggtattttagtttgggtgaaaggataaaatttttttggggagggtggggaagatggtaatattttataaattagtgtatagatttaatgaaatttttataaaaattttagttttttttttttttttgttttgtagaaatttataagttgatgttaaatatatatgtgataggattagggtttaggtttaggtttgagttttaatttgatattttttgtggaatgggtagttaggaaataatagataaataatattaaatttgaaggtttgtcgaggagtgagagaaaaaattttttttgtttattttttaggttttaaagttttttgggttaagacgttaatttaattgtattttgggttaatgaggtttttgtatattaagtaaataaattaaattattagagtttaagttgtgtttttttttagtattttaatgaattattttttgatttttggaattattaggtatttgttaagtttgataaattaagttggagatattgtagatatgggtgataaatatgattgaataaagtttgaaattatttaagattataaaatgtgtttgagatttaggggaagaggaaagattttttaaaaattatgaaggttattaataggttgaagatgattttaatttattatattttagaattagtaggtatttttataaaagtgtgagcgagatagttaatttatattaatttacgttaatagattttatgtaaggatgtataagtttatagtagtgttgggtatgcggtatattaaaggtttaaatgttttttattattaaagataggttaaatttagttaagttttagagttatttatatttattgtatttttatattaggttattttatgatatttattttatgattttttttttttaaaaatgaattcgaatagttttattttatttttttttttttttgagatgtggtttcgttttgttgtttaggttagagtgtggtaggttagagtgtagtggtataattatagtttattgtagttttaattttttaggtttaagggatttttttattttagtagttgggattataggtatgtattattacgtttggataatgtttttattttttgtagagatggggttttgtaatattgtttagggtggtttcgaatttttgggtttaagtgatttttttattttagtttttaaaaatgttgggattataagtattagttattatgtttagtttttatagtttaattttatgggaatttgtgggggaaatgttaagaaaggaaagtagagaaaaatatattttattttttatttaagtagattttattttgtttaattatattgatattgataggataagtattttattattaagtaataattaatatttttttttttttttttttttttttttttgagacggagtttcgttttgttgtttaggttggggtgtagtggcgtgattttggtttattggaagttttgttttttaggtttatattatttttttgttttagttttttgagtagttgggattataggtattcgcgattacgtttggtaaattttttgtgtttttagtagagatgggatttttattaaatttcgttagttagaatggtttcgatttgatttcgtgatttatttgtttcggttttttaaagtgttgggattataggtgtgagttattacgttcggtagtaagtattaatattttattaattatattgatagggtaagtattttattaagtagttatgtatattttatttaaataaattagaagttttttagattaaaaaaaatataggtttaaattgtttgaaaattaaagggtatatgataaatatttatatattataaaaagaatatttagattgtgtataaagaaaatataaatatagataatagtaagatataaaaatattaagtaaataaagattaatatttttagaaatgttgtatgtttggtaaaagtttttataataaatagtaggaggtcgggtatagtggtttttatttgtaatattagtagtttgggagttcgagatgggtggattatttgatgttaggagtttaagtttagtttgattaatatggtaaagttttatttttagtaaaaatataaaaattagttgggtgtggtggtatatgtttgtaattttagttatttgggaggttgagataagagaattgtttgaatttaggaggcggacgagatcgtattattgtattttagtttgggtaatagagtgagatttcgttttaaaaaaaaaaaaaaatttttagatgtttttattttatattaaaaattatgtggttatatatattaataaagtttttttttgttagttttatggtgaatttttttgtgattttttttaatttattattttgtaaaataagaaaataaaaataaaagaaaaaattgatataaaaatcgtttgagattatagttagtattttattttttatttatagtatatttttatatgtttttttatgtaatttttagaataatttataaagtaggtattgttattttaaaggtgataaaataagggattaaaaaagtaggttataaaaataagatagtagaattagggtttaaatttttattttattaattttttattgaaaaatatattaaattttaattaagattaatttaaatataattatattttatttaaatggtgaattttaaagagaataaaaattatgtatttatgtttgtatatagataatttagtattatgtaaagtattgtgataattagtttgaattaatttggaattgattggataaaaagtaaggtttttatagttttagttaagatatgtgttattagaattagattttgatataaaaattttagattatagtaatatttttttttttttgagatagagttttgttttgttatttaggttggaatgtagtggtgaaattttagttaatttttgttttttgggtttaagtaatttttatgtttgagtttttcgagtagttgggattataggtgtgtattattatgtttggttaattagattatagtattttttaaatatgggtataagtgtttaagtgaagatattatataaatatgggtataagtatataagtgaagatattaattacgttttaattaagtaagaaaataataaaataaaaagtaaaaaagtaaaataaaagatttataaaaataaaattaaatgaaatagaaaatgataaaggatatagatattaagtaggtgatttttatatggtaaaatacgttatgagttaattttttatatttttttattttatttgaaaagtaatggggattattgattttattgatagtgggggatatagagaagtttagtaattttaagttttttataaatgtattgtgtgtataaatgttattttgaggtcgggtgcggtggtttatgtttgtaattttagtattttgggaggttaaggtaggtggattatttgaggttaggagtttaagaatagtttggttaatatggtgaaattttttttttattaaaaatataaaaattagtcgggtatggtggcgtgtatttgtaattttagttattggattaaggagaattgtttgaattcgggaggcggaggttgtagtgagttaagattgcgttattgtatttcggtttgaataatagaggaagattttgttttagaaaaataaaaataataataataataaaaaataaatattatttttatatttatagtatagtttttgggattgattttaatattagttttagtatttttaaacggtatatttgaaagagaaggttgatggttgttattttatataaatgttaaaaaagtaaaatgatagaaagtattatataatattagagaaacgtgatgttttaagtttgaatttttgaaaatttaagaaataaatttattattatt

SEQ ID NO: 1707 - DNA, 6942 bp, Artificial Sequence
  chemically treated genomic DNA (Homo sapiens)
tggtgtatggttttagtagatgttaaataaaaatgattttaaatgtatgtatgaatgaagtgttaggtagttgggtaaggtgggggtaaatgaatagttgaggagttagacggatttatatttttattttgatttcgttattttgggtaatataatttatttttatgaggtttcgtttttttatttataggtgataggaaacgggataatagaatatattttttagagatggtgtgaagatggtaaagtattaaggtggaagttttttttgttgggtttgaggaatagtaaggagattagtgtgattggagaaggatgaatgagggtaatgttgacggagatgaatgaggttggagaggagcgtagagttagattttattttatgtgtgttgggaagtttttggtaagtggagattaggatatgatattatttgatattttagtacgtttagaaggatttttttggttgtcgtgagaataagaaaggaagtaaagagataagttacgggttcgtttaatgatttaagatagagacgatggtggttatgattagagtggacgtaatggagtgggtgataataattatatttaagataatttgaaggtgggggttataggatttgttgatgaatttgattattcgatggtagagaaagagaagaatgaaatatgttttaaatttgttattttttttttttttttttttaatttaagaaatttcggggatggggaatattggtgaagtggttttagaaatagtgaatagaattaagaatttagtttttaatatgttaaatttggtatatttattagatatttatattacgttggtagttggatataaagggttaagagttaaatgaagagattaaggttagaggaataaatttgaaagttttgggtgtatatgttgtatttaaaagttataggaagggtttagtgtgatggtttacgtttgtaattttagtattttgggaggttaaagtgggtggattaggagttcgagattaggagttgaggttaggagttcgagattagtttggttaatatggtaaaatttcgtttttattaaaaatataaaaattagtcgagtgtggtggtataggtttgtatttttagttattcgggaggttgaggtaggagaatcgtttgaatcggggaggtagaggttgtagtgagtcgagattgtgttattgtattttagttttggtgatagattgagattttgttttaaaagaaaaaaaaaagttatagaaaaaaaataaatgttatacgattggatgcgattattagtaaatatgggtagagtttttattttgtgttaaagtgttttaggtattatagtaatgagtaatatataaagagaaaaatttatatttttatggattttatattttaatggggaggggataataaaataattaataaaaatatatagcgtgttagatagtaagagggaaatataggagagatgaggatgaggtgggtgggaaggttataggatggttagggaaatttttattgggaaaatgttatttaagtttaaattttgaaagaggtgagggtagtagttttttggtatattttggggattattattttaggtagaggcgaaagtaaatgtagaggggttgaaaaaggagtacgtttagttagtggagggaaaagtaagaatagtgattgtagaggagagagtcggggagggtgatgggaaatgaggatcgagaggttaatgggaaaggcggggtgaagagaaatgagtgtgatatagagtagtttttagtacggatttaagttaggaaggtgtttaaataggaatttaaggttttttttacgttaaagtcggatgttaacgtttagtttttaggtttcgtttttgttcggtagaagtttcgtttcggggtcggaattttagggttagtgagttggatcggaagtaggtttttattcgatcgtattttacgtggtgttgtattttcggtagcggcggcgggaaatcggttgtgggagagaggttaggtttttgaggaggcgaattcggcgggtattagagttattagaatcgttattatggtaaggagggtataggttggcggcgcgggagttttcgagtttgttgtggagtgggaatcgcgattgatcggggaggaagtcgtgggttggagttatttagggcggtgaaggtttgggtcgaggtcgttcggtttgggcgggaaagattaggattttggcggttcggttaggtatggggtcgaggaaaaggttggaatcggtgtcggaggtcgaggtcgttcggtaggggcgagggtagaatcgcggttttcgatatcgttgtagttataatttttgggatttagtaggtattaagttaatttttgtcgaataaatatatgtttcgggtttcggagtaggtattggagtcgtagggggattcggtaaaaggtttagatttgcggaagtttgtgagtttgagaaagagttggcggaagtgggtggaaggggttcgtggattacgttagagtttcgttaggtttgttggatggagaggagggcggaggagggtgatggcgaatggaggaagagttttatttagttgtttattacgttttcgtgtttgtttgtgtttgattttttaggcgttggggttattttttgaaatatgtttgttttttttatagaggtagttggggatatataatataatttagtgtggttattcggtaaaagtaacggtagcggggcggggtaagaatgtttttttaaatagatggtttttgagtagatttttaaaagattagtaagaatgttttcggcgaaaatggggggaatattatagattcggagaattgaaggaataaaggttgaagggtaataagatttaaaaagttattggatttttttgcgtttgttgattgagaaaaagttgttggaggagaaaggaagaaagaagggaagacgggaagaattggtaggaggttagttattaaaggttttgtatgttaattttattttagtggtggtgaggtatgttattgaaggatttaatttaatttatttttatttttttgagacggagttttgtttttgttgtttaggttggagtgcggtggatcgattagggtttattgtaaattttatttttcgggtttaagcgatttttttgttttagttttttaagtagttgggattgtaggtattcgttattatatttggttaattttttgtatttttagtagagacggggttttattatgttggttagattggtttcgaatttttgattttagttaatttatttattttggttttttaaagtgttgggattatagtcgtgagttattatattttgtttattgaaggattttaattagtaaaatgatataagtttagtggtgtttagaaagattgttttagttttggtatgtatattcgatgggattggaagtagggaaatttggtaggatattgtttggataattggttagaataggcgttggatttattttgtttaggttttaatatagttttttagttgtgaaattgggtaagttatttaattttttttagttttagtgattttatttgtaaaatagggataataatgggtttaattttggggattaaatgagatgtattgtgtttattatagtgttagatatatagtgagtatttagtaaatattagttgagttggattagtgaatgttgttttaaaggtttagattttttgtggttagaagttggttaaaatggttattgaatggaaattgaattatttaatttgagggaggttcgtagtatttttgtgtggagttaagttttgtttttgtttttttgagatggagtttttttttgttatttaggttggagtgtagtggtatgattttagtttattgtagtttttattttttaggtttaagcgatttttttattttagtttttcgagtagttgggattataggtatttgttattacgtgtggttaatttttgtaattttagtagagacggggtttcgttatgttagttaggttggttttgaatttttgatttaaggtgttttgtttatttcggttttttaaaatgtcgggattgtaggagtgagttattgagttcggttatggagttaaggttttgatttgtatatttgtaggtttagaattttgttgtttgagtttatagagatgaatagatgtttatagaaggtatttggtgggttaggatttgggtatagtagttagattgatgggaggatgatatatagattaaatgttaggtgatttgtttatagagagaaatataattgtttagggtatttgatagtttataaagtgatatttatatagttatttttttattttagtatattggaatttaggttatgaaagtagaaatgtttgttgggttaaagattattatatgtttaaattggttagtattttaattattagaagtttttttttgttaaatatagttttggaggtatattaataaatttttgatatgtggattttattttttattttgaagttgattttttttttgataataagttttttgttgattagatttttagttttagttttattttagttttttttttatttagtgtttttaatgagatttgaatgttttatagtatttgagttatatatttataatttgtatattggtagatggttttagtatgtatgtattggattattttggggatattttatatttttatttttgtaattgatacgataaggagaaaggtaattataatatgagaaagatcgattttaagggaagagagaatagtagattattgggtagaggttagggttaaaatagggtggtatgggagaatttttaggaaaaggttgtgggtgggagattgagttaagaatttgttgagaaagttggatatatggataagaacgttatgggaagttttggggagggttagaggtgtttgggtttaaaagagtagagttttatttttgtttatttttttttgtagacggtgggtaagagtagtaagatgttgtagtatattgattataggatgaggtgtattttgtaggacggtcggatttttattggtatttttaaggtttttgataagtatatgaatttgattttttgtgattgtgatgagtttagaaagattaagtgaggagtggattgtggggggcggagattggaggatgggaatggattgagtgggtgggttaagtaatagaggtggtgatgtagttagttggtttttttttgtttattttttagttttagagggtagatttaaatggggatattgaacgttaagaaatttttttgagtttagtaaattttgttttttagtttagtaaagtataagttgtgaagggttgttaggttttttgttttttttattttgcgtgtttttgggtattggggtaaagggtttttatgttttttttataggtgtgtgaggggggagagtttgagtttttggttttattgtttatttgtaaagttgtagtttaaagggtttttttaatgtagtttggtttgaaattgttttaagaagtttttgattttttttagggtaagtgtttagttttttatgtgggtttggggttagtgatttttgttggtatttatataaataattggagatattgtttattttgttataatttcgtaagttattggttaatttttttgttttgagttttatagattttaagtttttggtttattaaaagatatgatttagttttttattatgttttatatttaaggttatttgaggtataaaaagatgatgtgattttcgtggttagtagtttttttgttatatgtagtgtttatattattttgttatttattttgaattttttttgattttttttggggttgattttttttgtgatttaaggttaagaagtatagtttaaaaatgtggtagggatgttttggtgttaggtacgtattagagaggggttaatagatgagcgtggagttattttaaagtttttttttgattataaaaaatgtttattggaaaatatttttgaaaatataaagaagtttatgaatagaaattaaaatatttcgaagggtttttttttaattatgaaaggataatatatggttattattttaaaaaataagaaaatgtgagttaaaaaagggaaaaattgtttatttatagataattagttaatatattgtaaaatattaaaataaaattttttgagttttttttttaaattaggttatttttttttttttatttttaggatttagttttagtttttttttttatttttttattttgttgtagttattttttttattttatatttatattttgtttatttttttttggttgttgttttttgggggtttttgtttttatgtttttgaggaatagatatgaaattttaatttttgtgtatgtgaaattttttttaattttttttttttatggttttttttatttttgatgtaagatgaggggtagaattataggtttgtgaggttgaattgatattagaaggatattgtacgtaagtgaggtgggtgggagttatttgattggaattgtttaggtagttttttgatgttggtaagattttaagttgaagggagggaatagggttttaagaaagaagatttggttgagggaagggtttttacggttgttgtggaatagtatttgggttcgggttgggttttgttgattttgttttattttttggttagtgtgtttttttggtatggtaggaaataggtagatagttatttaagaggttatgtgtttagtttgtagagattatttaggagggttattttgggaaagtttgtgtattgtttgttaggagatgtagtataagtaaattttggaggttattaggtaggtgaattttatttatttttaatattttttttgttttttttaaatttttttttagg

SEQ ID NO: 1708 - DNA, 6942 bp, Artificial Sequence
  chemically treated genomic DNA (Homo sapiens)
tttaaagagaggtttagaaggaataaaaaaagtgttagaggtgggtaaagtttatttgtttagtggtttttaagatttgtttatattgtattttttaataaatagtatataaatttttttaagatagtttttttggatagtttttataggttgaatatataattttttaggtggttatttatttgttttttattatgttaagaggatatattgattaagagataggataaggttaataaagtttagttcgggtttaaatgttattttatagtaatcgtgaaggttttttttttagttaagtttttttttttaggattttattttttttttttagtttaaggttttgttaatattaggaggttgtttaaataattttaattaaatgatttttatttattttatttacgtgtagtgtttttttaatattaatttaattttataggtttataattttgttttttattttatattagaaataggagaagttatagaaggaaaaggttaagagaaattttatatatatagaaattgaaattttatatttgttttttaaaagtataaaaatagaaatttttaaaaagtaataattagaaaaagatgaataaaatataaatgtgaagtaggaaaaataattgtaataggataggaaagtggggaaaaaagttaaagttagattttaaaaataaaggggaaaaaatagtttgatttaaaaaaagaatttaaaagattttgttttgatattttatagtatattaattggttgtttgtggatggatagttttttttttttttggtttatatttttttattttttaaaataataattatgtattgtttttttataattagaaaaaaatttttcggggtattttagtttttatttatagatttttttgtatttttaaaaatattttttaataaatattttttataattaggagggaattttggagtagttttacgtttatttgttggtttttttttaatacgtatttggtattaaggtatttttattatatttttaaattatattttttgattttgggttatagaagaaattagttttaaggagaattaaagggaatttaaagtgagtgatagaataatatggatattgtatatgataaaagagttgttggttacggaagttatattatttttttgtgttttaagtagttttgaatgtaaaatatgatgggaagttaaattatattttttaatgggttaaaagtttaagatttgtgagatttaaggtaagggagttagttaataatttacggaattgtagtaaagtagataatatttttaattgtttgtataaatgttaataaaaattattggttttaaatttatatggggagttgagtatttattttgaagagggttagaggttttttaaagtagttttagattaggttgtattgggagagttttttaggttatagttttataaataggtaatgaggttagaaatttaagttttttttttttatatatttgtggggagaatatgagagttttttattttagtatttaggggtacgtaaagtgagagaaataaaaagtttagtagttttttataatttgtattttgttagattagagagtaaggtttgttggatttaaaaagattttttagcgtttaatgtttttatttaagtttgttttttaaaattggagaataaatagagaagaattaattagttatattattatttttattgtttggtttatttatttaatttatttttattttttagttttcgttttttatagtttattttttatttgatttttttgaatttattatagttatagaggattaaatttatgtgtttgttaaaagttttgaaggtgttaatgaagattcggtcgttttgtaggatgtattttattttgtaattaatatgttgtagtattttgttgtttttgtttatcgtttgtaaggagaaatggatagggatgagattttgtttttttggatttaagtatttttggttttttttaaaattttttatggcgtttttgtttatgtgtttaatttttttaatagatttttagtttagttttttatttatagtttttttttaggaatttttttatgttattttgttttagttttgatttttatttagtaatttgttattttttttttttttgaaatcggttttttttatattataattgtttttttttttgtcgtgttagttgtagggatgagagtatagggtgtttttaaaataatttaatgtatatatattagagttatttattagtgtgtagattatagatatgtgatttaagtgttatggaatatttaaattttattaaaaatattgagtaaaggaagagttagaatagggttgaaattaaaaatttaattaataagaagtttgttattaggaaggagattagttttaaggtgaaaaatgaaatttatatattaagaatttgttagtgtgtttttaagattatatttggtagagggaaatttttgatggttagggtgttaattagtttggatatataatggtttttaatttaataaatatttttgtttttataatttgggttttaatgtgttaaaataaagaagtgattatataggtattattttgtgaattgttaggtattttaagtagttgtatttttttttataaataaattatttggtatttgatttgtatattatttttttattagtttgattgttatatttaagttttaatttattaagtgttttttatggatatttgtttatttttgtgagtttagataataaagttttgaatttgtaaatatgtagattaaaattttgattttatggtcgggtttagtggtttatttttgtaatttcggtattttgggaggtcgaggtgggtagaatattttaggttaggagtttaagattagtttggttaatatggcgaagtttcgtttttattaaaattataaaaattagttatacgtggtggtaggtgtttgtaattttagttattcgggagattgagatgggagaatcgtttgaatttgggaggtggaggttgtagtgaattgagattatgttattgtattttagtttgggtgatagggaaagattttattttaaaaaaataaaaataaaatttgattttatataaagatattgcgagttttttttaggttaggtggtttagtttttatttaatgattattttaattagtttttaattataagggatttgaatttttagggtaatatttattggtttagtttaattaatgtttattgggtgtttattgtgtatttggtattgtgataagtatagtatattttatttaatttttaaaattgggtttattattatttttattttatagatgaggttattgaggttaggagaggttaagtaatttgtttagttttatagttgggaagttgtgttggaatttagataaaatgaatttagcgtttattttaattagttatttaaataatattttattaggtttttttgtttttagttttatcgaatatatatgttagagttagagtaatttttttaaatattattaagtttatgttattttgttggttaaaattttttagtgggtagggtgtggtggtttacggttgtaattttagtattttgggaggttaaggtgggtggattaattgaggttaggagttcgagattagtttggttaatatggtgaaatttcgtttttattaaaaatataaaaaattagttaagtgtggtggcgggtatttataattttagttatttgggaggttgaggtaggagaatcgtttgaattcgggaggtggagtttgtagtgaattttgatcgatttatcgtattttagtttgggtaataaaagtaaaatttcgttttaaaaaaataaaaataaattaaattaaattttttaatgatatgttttattattattgaggtaaaattaatatgtaaggtttttagtaattagttttttgttaatttttttcgttttttttttttttttttttttttttttagtaatttttttttagttaataaacgtagaaaaatttagtaattttttaaattttgttattttttagtttttgtttttttagtttttcgggtttgtaatattttttttattttcgtcgggaatatttttgttaattttttaggaatttgtttaggaattatttatttgagaaaatatttttatttcgtttcgttgtcgttatttttatcgaatgattatattgaattatattatgtgtttttagttatttttgtgaaggaagtaaatatattttagagagtagttttagcgtttgagaagttaggtataggtaaatacggaaacgtgatgagtaattgagtggagttttttttttattcgttattattttttttcgtttttttttttatttagtagatttagcgagattttagcgtggtttacgagttttttttatttattttcgttaatttttttttagatttataaattttcgtaagtttgagttttttatcgggtttttttgcggttttagtgtttgtttcgaagttcgggatatatatttattcggtaaaagttaatttagtgtttattgggttttaggaattatggttatagcggtgtcgagagtcgcggttttattttcgtttttgtcgagcgatttcggttttcgatatcggttttaatttttttttcgattttatgtttagtcgaatcgttaaggttttggtttttttcgtttagatcgagcggtttcggtttaggtttttatcgttttaagtggttttaatttacggtttttttttcgattagtcgcggtttttattttataatagattcggaagttttcgcgtcgttagtttgtgttttttttattatggtggcggttttgatggttttgatattcgtcggattcgtttttttagaggtttagttttttttttatagtcgatttttcgtcgtcgttatcggaaatgtagtattacgtaaaatgcggtcgggtagaaatttattttcggtttagtttattagttttggagtttcggtttcggagcggagtttttgtcgagtagaggcggggtttggggattgggcgttaatattcggttttgacgtaaggagagttttaagtttttgtttggatatttttttagtttaaattcgtattgagagttgttttgtgttatatttatttttttttatttcgttttttttattaatttttcggtttttattttttattatttttttcggtttttttttttatagttattatttttgtttttttttttattggttggacgtgttttttttttagtttttttgtatttgttttcgtttttgtttggaatggtagtttttaaggtatattagaaggttgttgtttttattttttttaaggtttaagtttaaataatatttttttagtgaggatttttttagttattttgtaatttttttatttattttatttttattttttttgtattttttttttgttatttaatacgttgtatatttttgttagttattttattattttttttttattagaatgtaagatttataagggtgtgaatttttttttttgtgtattatttattgttgtagtgtttagaatattttagtataaaataagggttttatttatatttgttgataatcgtatttagtcgtatgatatttattttttttttatgattttttttttttttttgagatagagttttagtttgttattaaggttggagtgtagtggtataatttcggtttattgtaatttttgttttttcggtttaagcgatttttttgttttagtttttcgagtagttgggaatataggtttgtgttattatattcggttaatttttgtatttttagtagagacggggttttgttatgttggttaggttggtttcgaatttttgattttaatttttggtttcgaatttttgatttatttattttggttttttaaagtgttggaattataggcgtgaattattatattgggttttttttatgatttttaaatatagtatatatatttaaggtttttaagtttgtttttttaattttggtttttttatttaatttttggttttttatatttagttgttagcgtgatgtgaatgtttaataggtatattaaatttaatatgttgaaaattgaatttttgattttatttattgtttttaaaattattttattagtgttttttattttcgaagttttttggattaaaaaagaaaaaaaagaaaatgataaatttgaagtatattttatttttttttttttttgttatcgaataattaaatttattagtaaattttgtggtttttatttttaaattattttgaatatgattgttgttatttattttattgcgtttattttagttatagttattatcgtttttgttttggattattgaacgagttcgtaatttgtttttttgtttttttttttgtttttacggtagttagagggatttttttaaacgtattgggatattagatgatgttatgttttggtttttatttattaaaaattttttagtatatatggaataaaatttagttttgcgtttttttttaattttatttattttcgttaatattgtttttatttatttttttttagttatattaatttttttgttgttttttaaatttagtaaggagagtttttattttggtgttttgttatttttatattatttttaaagggtgtgttttgttgtttcgttttttgttatttgtagatgaagaggcgaagttttatagaaatgaattatgttgtttaaagtggcggagttagagtgggaatataggttcgtttggttttttagttgtttatttgtttttattttatttagttgtttaatattttatttatgtatgtatttaaaattatttttatttagtatttattaaggttatgtatta

SEQ ID NO: 1709 - DNA, 5309 bp, Artificial Sequence
  chemically treated genomic DNA (Homo sapiens)
ttttttaagtagttgggattataggtgcgtgttattacgtttagttaatttttgtatttttagtaaagatagagttttattatattggttaggttggtttttaatttttgattttatgatttatttgttttagttttttaaagttttgggattataggcgtgagttattgggttttgttaatttttgtatttttagtagagatggggttttattatgttggttaggttgatttcgatttttcgattttagatgattcgtttatttcggttttttaaagtgttgggattataggcgtgagttatggtgttgggtatatacgtagatttttgattgtgaagggattagtatttttgatattgtattatttaggggttaattgtatatttatattttttttattatttattagttttatgtgtgattttggttaagttattgtttttgtttatagtaggaataaagtatttgatttagtagttagtaatatggaggatttgtttaatgatgtcgattttttttgttttttatggacgtaattaatttatgattatttgcgatatatgtttattttatttttttgtttaatagaatatttttgttttgaattaagtttttttttttttttttagtagttaatgtgttttttgaggatgtaatttaatcgtaattttgttcgaagtggggaaaaaaattaagtttatattgaaattttaatatagttttataattatttttttttttagtttagattattttattttggtaatttaagtattatttttggttttattaataatattatttttgtaaaggataggttataattaatttttagatttttgtttggataagatttgtgattttaaattttaaaaaagtagaaaaaaattttataaattataggtaggaagaaagaaaaataagagaatgtagttaaggtaattttattaatgattagtttatgttaaagtatgtggaaataatgttttataggaggatatttagtaataacgatttttttaaatttatttttttttgtaggtatagaattgtaagttttttttgattttaaatgtgtatagttgattgcgtgtgtgtgtgtgtgtgtgtgtgtgtgtgtgtgtgtgtgtgtgtgttagggttttttttttttgtttagattggagtaaggtgatataattatagtttattgtagttatgaatttttgggtttaagtgatttttttgtttttagttttttggcgtagttaggattgtaggtatatgttattatatttagttattgttttttggtagagatagagttttgttatgttgtttaagttggttttaaatttttggttttaagtaatttttttattttagttttttaaagagttgggattataagtatgaattattgtatttggttttatatttgattatattttttagttttttttgtggttaggttgtgttaggtagttttgtatttaaattttgattagtgagtagtaagtggaatttgttggatgaatttattataaaggatttttataatggagatagtggggttaggtatggtggtttatgtttgtaattttagtattttgggaggttgaggtaggtagattattttagtttaggagttcgagattagtttggttaatatggtgaaattttatttttattaaaaatataaaaattagttaggtatggtggtacgtatttgtaattttagttatttaggaggttaaggtaggagaattatttgaatttaggaggtggaggttgtagtgagtcgagatcgtattattgtattttagtttagtaataaagtaagatttttgattcggaaagaaaaaataaaaaaaggttgggggagatagtgggagtttagatttttgtttttttttttgtttagaagggagatgaggttgttggtgttgtggaagttattatggattatgaggtagttttgaagatagaaagtttgtatttttgatgatttaatggaattttattttaatttaggattgattgttttagatttttgttatatgagggaatatatttttttgtgtttaagaaattgtggttggatttgttattggaatatgaatgtagttaataattggtttaaaatgattttattttaatttatattggttgttttttttaaataatatataggtttgtattgtggtgggttttaggatggttgtgatgtagttttaggaagtttatttatgggaaatttatatttatggtgttttgatgttgtagaggatattttgagttggttggagtaatttgggatataggttaatcgattgtaatttaatttttgaggttatttagtattttttatagtggttatttaaaaaaaaggtagttaggtgtggtggtttaagtttatatagattttagaattttggaaggttgaggtgggaggattatttgagttaaggagtttgaggttagtttgggtaatatgaagaaattttgtttttataaaaaataaaaaaaattagttaggtatggtggtatgtatttgtagttttagttttttgggaggttgaggtggaagaatgatatgagtttagtaagtcgttgtaattagtcgtgattacgtcgttgtattttagtttgggcgataaaaagaaaaagaaaacggagtttgtttattgggtgtggtagataaggtaaatttttttttattttttatattttataattttggatgtgtttatagttatggtagtgttttgtaatgatgtagttgatgataggtgtgatgttggagatttttttatttgattgttgttattagttttattagtttttaacgtttggtgtttgttttaaagggtatgttttaggagtcgttttaaatttttaaagtattattttttatataaataagaagtgtaagtaagtagtttgagtttagttttttaataggaatattttattattattagattaagtttttttattataatgattgatttgtttttgaattttgtggatttattttttaaaatgttttttttttttagtttttatagttagtgttttaaaagtgatttgtagtattttttgttgagacgaatgtattagttttttaattagtttgtattttttttatttttttaagttagtgttagattattttgtttgaaaaattatttttagtgtgttttattttagtagaaatgttttttagtttttaattaataattatattaaatttttgtttttgtttgcgttttaagggtatttataggtcgggcgtcgtggtttttatttgtaattttagtattttggaaggtcgaggcgggtagattatttgaggttaggcgttcgagattattttgattaatatagtgaaatttcgtttttattaaaaatataaaaaaaaaaaaaatagtggggcgtggaggtgtacgtttgtaattttagttattcgggaggttgaggtaggagaatcgtttgaattcgggaggtagaggttttagtgagtcgatatcgcgatatagtattttagtttgagcgatagagcgaggttgtgttttaaaaataaataaataataaattaaaaaaataagagtatttataatttggttttagtttgaatttttttttttattttaatacgtagttttagttatatttttttgacgtttgtaaataagtttagttttttttgttgtgaagttaagtttaggtggttttttttcgtttgattgtttttttattttatttatcggaagtttagttatttttcggagggttgtacgggggttgtaagaagtaacggaaacggtttagtatttgttattttttattatattttttttaataaaggggtaattttcgttaatggtagtgtagattttttaatttttatatatggaagatttatattatttaggattgttgtttaattgttgagagagtatttgatatttaatagtttattaggttataagatagcgtaggaaagaattttttgttgtttttttatgttattttgaatagttggtttatagagttattgtaaatatataaaatatgattgttagggtttagtagtgaggaaggtgggaattagttttgatttagttaattgtgtttaggagaagttgtttaattttaaaggattttattattattagaattaataatattaattttaggggtaaaaataaagataaatgtgtgtaaattttgtttgtagtttcgggtacgtcgtgggtgtttaagaattgtttttaggtagtcggtggggataaagtttgtgtgttttttgttttggaataggttttaaggtcggtttatttgtaaagtaagggtacggcgtaagagtattgaatacgggttggaagggcgttggttttatttttagtttataggtcggttgggcggcgttgattagtagttaggtttcgttttttttaggaacggttacgggggttttgggagggtatgaatgtttttttgtagtgaggtttttggatttcgcggtttttcggtagcgtaattaaaatttaggggtaggcgtcgtagtcgtttagtgtagttagattttcgtcggtatttttaggggcggagtcggaggtagggttttcgggtcgtattaattttacgggggtaggggtcgttttttttcggtcgcgcgttatttaagtacggtagataggtagcgaggttgtcgaggtcgaggttagtttgtagttttttttttttcgtgttttgggcgcggggtgtacggtaagcgcgggcgggcgggataggtacgtagggtattttcggggttgggcgcggcgggcgcggggcggggttcgcggggggggggggcggggcggcggtgtttttgcggcgtagttggggtcgcggttttgtttttcgcgtttttttaaggttcgcgggcggcgtaggagcggtattcgtggttgtggtggtttcggtagcggttttagtagatcggcggtattagcggtagtattagtattagtagtatgttgagtcgggtagtgtgcgggtgagaagaaaggggattcggttacggttttaagggcgaaggggttcgcggcgggtagggttttcgcggtaatggcgatagtggtcgtatcgggtttggcgggatcggggtatttgtaggcggttttttcgggagtgttcggcgcggcggttggagcggggattcgtagggaggggacgcggggattcgggggacgtcgcgcgttgtcgtttttcggtagtttagtttgcgtagacggtttcgcggcgttgattgatcgggttgtgttttttcgtttttagt

SEQ ID NO: 1710 - DNA, 5309 bp, Artificial Sequence
  chemically treated genomic DNA (Homo sapiens)
gttgaagacgagaaagtatagttcggttagttagcgtcgcgggatcgtttacgtaggttgggttgtcgaggaacggtagcgcgcggcgtttttcgagttttcgcgttttttttttgcggattttcgttttagtcgtcgcgtcgggtattttcgggagaatcgtttgtaggtgtttcggtttcgttaggttcggtgcggttattgtcgttattgtcgcggaggttttgttcgtcgcgagttttttcgtttttggggtcgtgatcgggttttttttttttttattcgtatattgttcggtttaatatgttgttagtgttggtgttatcgttgatgtcgtcgatttgttgaagtcgttgtcgaagttattatagttacgagtgtcgtttttgcgtcgttcgcgggttttaagaaagcgcggggagtagggtcgcgattttagttgcgtcgtaagggtatcgtcgtttcgtttttttttttcgcgggtttcgtttcgcgttcgtcgcgtttaatttcgggggtgttttgcgtgtttgtttcgttcgttcgcgtttgtcgtatatttcgcgtttagggtacgggagaaaggaggttgtaggttagtttcggtttcggtaatttcgttgtttgtttgtcgtatttgagtggcgcgcggtcgaagggaggcggtttttgttttcgtggagttggtacggttcgaaggttttgttttcggtttcgtttttgagggtgtcggcggggatttggttgtattaggcggttgcggcgtttgtttttgagttttggttgcgttgtcggggggtcgcggggtttagaggttttattgtaaaaagatatttatatttttttagggttttcgtggtcgtttttagggaagacggggtttagttgttggttagcgtcgtttagtcggtttatgagttgagggtagagttagcgtttttttaattcgtatttagtatttttgcgtcgtatttttgttttgtaagtaagtcgattttgggatttattttaggataggaggtatatagattttgtttttatcggttgtttaagaatagtttttggatatttacgacgtgttcgagattgtaggtaggatttgtatatatttatttttatttttatttttagggttggtattattgattttagtaatagtgaaattttttgaggttaagtagttttttttgggtatagttaattgagttaggattagtttttattttttttattattaagttttggtagttatgttttgtgtgtttatagtaattttgtgaattaattgtttaggataatataaaaggataatagaggatttttttttgcgttgttttgtagtttagtaagttgttaagtattaagtgtttttttaatagttaaataataattttgaatggtgtgaattttttatgtgtagaggttaggaaatttatattgttattggcgggagttgtttttttattgaaaagaatatgatggaaggtagtaggtgttgaatcgttttcgttgttttttgtaattttcgtatagtttttcgaaggatgattaggttttcggtaagtggaatgggaaaatagttaggcgaagaggaattatttgaatttggttttataataggaagggttgggtttgtttatagacgttagaagaatgtaattagggttacgtgttggggtgaaaaaggaaatttaggttgggattaggttatagatatttttatttttttaatttattatttatttatttttgagatatagtttcgttttgtcgtttaggttggagtattgtgtcgcgatgtcggtttattggaatttttgtttttcgggtttaagcgatttttttgttttagtttttcgagtagttggaattataggcgtgtatttttacgttttattattttttttttttttgtatttttggtagagacggggttttattatgttggttaggatggtttcgaacgtttgattttaagtgatttgttcgtttcggttttttaaagtgttgggattataggtaggagttacggcgttcggtttatagatatttttaaaacgtagataagagtaggggtttgatgtgattgttaattggaagttgagaaatatttttgttgaggtgagatatattgaaagtggttttttaggtaaggtggtttggtattgatttggggggatgaagggagtgtaggttagttaggaagttggtatattcgttttagtaggaggtattgtaggttatttttagggtattagttatgagaattggaagaaaagggtattttgaaggatgaatttataggatttagagatagattagttattgtaatggaaagatttgatttagtgataatgaaatatttttattgggaggttgagtttaggttatttatttgtattttttgtttgtatagagagtgatattttgagagtttaaagcgatttttaggatatgttttttagaataagtattaaacgttgggggttggtaggattgatagtagtagttaggtagaagaatttttaatattatatttgttattagttatattattataaaatattattatgattgtgagtatatttaaggttgtgggatatgggaggtaaagaaaagtttattttgtttattatatttagtgaataggtttcgttttttttttttttttgtcgtttaggttggagtgtagcggcgtgattacggttgattgtagcgatttgttgggtttatgttatttttttattttagttttttaagaagttggaattataggtgtatattattatgtttggttaattttttttattttttgtagaaatagagtttttttatgttgtttaggttggttttaaattttttggtttaagtgatttttttattttagttttttaaagttttgggatttatataggtttgagttattatatttggttgttttttttttaggtggttattgtagagggtattgaatggttttagaagttagattatagtcgattgatttgtgttttaagttattttagttagtttaggatgttttttgtaatattaggatattatgaatatggattttttatagataaattttttaaggttatattatagttattttgagatttattatagtatagatttatatattgtttggaagaagtaattaatgtgggttgagatgaagttattttgagttagttattaattgtatttatattttagtaatagatttaattatagttttttaaatatagaagagtgtatttttttatgtaataaagatttggggtagttagttttgggttgggatgaaattttattgagttattaaggatgtaggttttttgtttttaaagttgttttatggtttataatagtttttatagtattagtaattttattttttttttaggtaaggggaaggataaaagtttgggtttttattgttttttttaatttttttttatttttttttttcgaattaagagttttgttttgttgttgggttggagtgtagtggtgcgatttcggtttattgtaatttttattttttgagtttaagtgatttttttgttttagttttttgagtagttgggattataggtgcgtgttattatgtttggttaatttttgtatttttagtggagatggggttttattatgttggttaggttggtttcgaatttttagattgaagtgatttgtttgttttagttttttaaagtgttgggattataggtatgagttattatgtttggttttattatttttattgtaaggattttttgtggtagatttatttaataaattttatttgttgtttattggttaaaatttaggtataaggttatttagtatagtttagttataaaggaagttgagaaatgtagttaggtatggggttaggtgtagtggtttatgtttgtaattttagttttttgagaggttgaggtgggaagattgtttgaggttaggagtttgagattagtttaggtaatatagtaagattttgtttttattaaaaaatagtagttgggtgtggtagtatgtgtttgtagttttagttacgttaggaggttgaaggtaggaggattatttgagtttaagagtttatggttgtaatgagttatgattatgttattttattttagtttgggtaagagaaggagattttgatatatatatatatatatatatatatatatatatatatatatatacgtagttagttatatatatttgaagttagaaaaaatttgtaattttgtatttataggagaaaatgagtttaaaaaaatcgttgttgttaaatatttttttataaggtattatttttatatgttttgatataaattgattattaatggaattattttagttatatttttttgtttttttttttttttgtttgtggtttgtggggtttttttttgtttttttaaaatttggggttataaattttatttaggtaggaatttgagaattggttgtaatttgttttttgtaagagtggtattgttaataggattaaaagtagtatttaaattgttaaaatgaagtgatttaggttaaaagagaaaatgattatagagttatattaaggttttaatgtgagtttaatttttttttttatttcgggtaaaattacgattagattgtatttttaaagaatatattaattattggaaaggaaaggaggagtttggtttagaataaaagtgttttgttaaataaagggataaagtgggtatgtgtcgtaggtaattatgagttgattacgtttataaagggtaaagggagtcggtattattgagtagattttttatgttgttagttattaagttaaatgttttatttttgttgtaagtaaagatagtgatttgattaaggttatatatagagttagtaggtagtaagggggatatgaatgtatagttgatttttgaatgatgtagtgttaggggtgttggtttttttatagttagaaatttgcgtatatgtttagtattatggtttacgtttgtaattttaatattttgggaggtcgaggtgggcggattatttgaggtcgggaaatcgagattagtttggttaatatggtgaaattttatttttattaaaaatataaaaattggtagggtttagtggtttacgtttataattttaggattttgggaggttgaggtaggtggattatgaggttaggaattggagattagtttggttaatatggtgaaattttgtttttattaaaaatataaaaattagttaggcgtggtggtacgtatttgtagttttagttatttgggagg

SEQ ID NO: 1711 - DNA, 5506 bp, Artificial Sequence
  chemically treated genomic DNA (Homo sapiens)
tttttatattttttagtgttggtttaatagttaaatgattttttttgatttatatttattgagtagttattatgttaggtaggggagatgtgtgtgtgtatttttatttaatttttttattatttggggatattaagggtgtataagattattaatatcgtatatatgtaaaagtcgagttttgagaggttaatagcgtgatttgtttaaggttttttgggtattagtggtaggattttttgattttaagttattttttattatattcgagattgaggatgatatagttttatttaaaggtggaggtggtttagaaaatgtttaggggagtttttatagttattttagcgtatttagattcggttgaagatttatagggtagtttttgtttgttattatgttgttttcgattattaatttgtgttcgtcggttttttatttttttagtgtataggtttttttttgttatattttaaagtttttcggatattttagtataatttgtttggttggtgggtttagtatttaagattttttttttatttttggtgattttggttttggaagggggttatttatagttttagggatttagagattttgtgaagattttttagggaattttatgtttgtattttagttttagaaatttagaattaattagtttggggtgggatttaggttttagtatgtttttttgttgttgttgttgtttgtttttatgagatagagttttattttgttatttaggttgtagtgtagtggtgcgatttcggtttattgtaatttttgttttttgagtttaagtgatttttttgttttaggtttttacgtagttgggattataggtgcgtgttattatgtttagttaatttttgtatttttagtagatatggggttttattatgttggttaggttggtttcgaatttttgtttttaggtgatttgttcgtttcggttttttaaagtgttgggtttataggaatgagttattacgtttggtttagtatgtttttttttttttttttttttttttttttttgagatagagtttcgttttttttgtttaggttggagtgtaatggtgtaattttagtttattgtaatttttatttttcgggtttaagtgatttttttgttttagttttttaagtagttgggattataggcgtttgttattatgtttagttaatttttttttttttttttttttagtagagataaggttttattatgttggttaggatggttttaatttttcgattttatgatttgtttattttggttttttaaagtgttgggattataggtgtgagttattatatttaattaaggtttagtatgttttttttaattttataagtgattgtaaatttaataagaattagagttagttttaggtaattgattagaaatgtagaattttaggttttattttaatttgaagaattttagtgcgtttttttatttgagaagtattgttttacgttaaatttcgtattcgtaagttaggttttgtgaaaggttttcgtagggaaattggaggtaggagggtatatagtttagatagaattaaagagtggaggttaggattttttaggtcgtatttatatagtatttagaggtgttaaacgttttttttgtgtttttttattttattttagttttgttttttgaaagttaggaagatagttttatgtttgtgtggggaaattgaggttggggtagagttttaatttgattagattattttttatttttgtatggtttttggttttgtagttagtagattttttgatttttattttagtgtattttttagggtaggtagggagggagggtgattatcgttttacgtgataggtgagggattagggatttagtgggggaatataggcggagttttttataaagtcggattagtttttttaggaagaggatttgggagttggggggtgaagggttattgttgatcggaggtagttttgttaggtagtgttattagtgggttttacgtttgattgataggtattttttttttttttttttttttggggtttattttttgagtaaattcgggatttgttttaataaaagttaggttgagttttaggaaaattttgttgtttcggaaaggtttttttgggttatggaaggaagtttggatttttattattatatttagatcgtagatttttttttgttgtagaataaatattttgagagaaggtaggttatagagtttattagatattatattttgttatggacggtgataaatttttattttaggatagagaggtgatggggggtggggtaaggaggttataagtatttttggagaagggttaagaatgagggggtaaagggatttttgttatttttagtagggaaaggaggagaaggtgatattggtttttttgttgttttgttggggtagaggtttaggtgtttttagttaggattttttttttttttaagttttttgttttttaggaatgattatgggttttttatttttgtttgttggagagtattgggtttttagggtttgggatgggatggaggggattttagttgttagtatggtgggtagggatgtgttcgtagtaggggttttaattatatatatatagtattggttatttgatagttttttttattcgttttgtaggtttatttgttttatttaatattgtttagtaaaaagtttagtatagttttgagaggaaggtagtgtttgtgcggggataagggagagagagagggagtggttttttttgtttagcgtggttttttgtagatagagcgtgtttattgttatttttatttttattttggtatagttggattaaggagggtaaaggaggaagtagggagttagagagggggtagttgtgggattttatattttattttttaattttgggttttttttttttataattattttttttgttttaggcgggttttaggttagttatagatatagtagagagcggggaggttttttttttaaagaggaggaattgaggggtggaaggatgagtggggatttatcgggagagagagatgttaggtaggtaggtagcgggcgggtagtagcgggtgttggaggcgattgtagggtagtcgggatacgacggtagatgttcgtttttcgtttttttgtttatttagggcggttttttttcgggcggttttgaggtcgagcgggcgttgttaaaaagttttttatgtgtgtgtgtgttaattatatgattgtcgtttatttgtatttcgaataaagatagtttattgttttaaggtttcgaataagagtttgggtatagggaagagaagggaggcggggggaggagggttggtagcgtcgggggtggcgtcgaggaaaattggggggagattgtttaaggttagtaagcgagagaaagagaaaatttttattaaatttttaatttattgggtttcgaggttttagatatattggttcgattgtttggttggttgtgtgtgtgagtatgtgtgtgtgtgtgtgtgtgtgtgtgtgtgtgtgttttagtgtttgttttttttatttttaatatgtttttgtttcgtgtgattattttattgtgttttattttttattttttatatttttttggatttttttaagtatgaggttttgtttttttagattttttgtagtttattttagataggattttttggggtggttttggggttttgttttgttgttgaggagtttagaacgttatatggttgttaatgcgattttagttttattatataatttatatatattttatttcggttttaatatttcggcggggttgtttttagttaagagaatagtattgcgatttttggaggagaggttaaggaaagagagagaaaaaggtgttaacggaggatgggtaggaaagaaaaggggagggagggagaggtgggtagaggagggaagaggtagggtaagtttttattttttgttggggtgggggagtagaggatttcgtgataattaggattaggatttttttatttttttttaagatagggtgagtttagtgtggaaggagttgggttttagtaggtagtaatttaaaatgtttttaagatttattgagagagggtttttaatttgttttattttggttttttggtagttttagttttgtgtttttattttgaattagattagaacgcgcgtgtgttgggtgtttgtagagaagggattaggggttaagttggggttttgtattttttagagggatttttgagaagttttttttattgtgtaggatggggtagaaagggttgtttgggaaaaggtaggaggtagggtgaggagttgggtattagtgtttggtatatattaggtatttaataggatttcgtagacgaagtagttagggttagttatttttacgggtttttaggatttttatcgtttttacgtttttttttagttttttgttaagtgtttattttgttatttgaggtagacgttaggagttttggttgggtttaatttttttttatttaataggttttgattttttagtttatatttttttttttttcggtttaattttttttttattttttagattaagtttaagataagttttagtaagatgggtttgggtagtagggtagggagttgggtgggggggtttgggtttcgggtggaggagttttgagtgttggggatgaaggaaagtttggaggttttattttttgttttttttttttttttttttttttttttttttttttttttttttttttttagtttttcgtagcggtttaggtttagtcgtttagttagtttcgggttgttcggttagggtggttggtggtaaggatttaggtttcgttttaacgaggtcgtggtttgaggtttagggtttttcgttttttttttttagtttattagcgttattttttagtttcgagttggatcgtatattttgggatacggttttttattttttaaggacgagttttagattggaggagaggttcgaggaggtgagtgcgtagtttgtttttttttggttcgtttaggtttgggattttgttgtgaggtggagagaggcgatatttcgtttttgttttttatttggtttttttttaaatttcgttggggtaggttgagggaagaaggaaaggtgagagaaaaggtgggaaattttaggggtcgggattagagtaaaataaaggtttcgttttttttttttttattattaataaatttttatttaaaaaaggaggttaaaaaaaaagttatttatattaagagacggttgggattaggtggtgggaagatatagaggcgggacgtatttatttagagtttggtatgtgcgtgggttttaggggttagatgggtttagttggagtaggaagggtcgttatttcggggttgtgtttacgttttgtttcgggtcgttttcggggttgcgcgcgcggtcgttttatcgcgttttttttttatttagg

SEQ ID NO: 1712 - DNA, 5506 bp, Artificial Sequence
  chemically treated genomic DNA (Homo sapiens)
tttggatggaaggagggcgcgatggagcggtcgcgcgcgtagtttcgagggcggttcgagataggacgtgggtatagtttcgaggtggcggttttttttgttttagttaaatttatttggtttttggggtttacgtatatgttagattttaggtgggtgcgtttcgtttttgtgtttttttattatttggttttaatcgttttttggtgtgggtggttttttttttagtttttttttttgggtggaggtttgttgatgataaggaagaaaaaaacggagtttttattttgttttaatttcggtttttggaattttttatttttttttttatttttttttttttttttagtttgttttaacggggtttagaggagagttaggtggggggtaagggcggggtgtcgtttttttttattttatagtagggttttaggtttgggcgggttagggaggagtaggttgcgtatttattttttcggattttttttttagtttggggttcgtttttaggaagtggaaaatcgtgttttaaggtgtgcggtttagttcggggttgggaggtgacgttggtgggttgggagggaggggcggggggttttgagttttaggttacggtttcgttaggacggagtttgaatttttattattaattattttggtcggatagttcgagattgattgagcgattgagtttgagtcgttgcggagggttggggaaggaaggagggggagaggggggaggggagaggagggagggaagggtagaaggtggagtttttaggtttttttttatttttaatatttagggtttttttattcggagtttaggtttttttatttagttttttgttttattgtttaggtttattttgttgaggtttattttgggtttagtttgggaggtggaggggaggttaggtcgaggaaggaagagatgtaggttggagggttagaatttgttggatggaagaaaattgggtttaattaggatttttaacgtttgttttaggtggtaggatgggtatttggtaggggattagggagagacgtgaaggcggtgagggttttgggggttcgtgagggtggttggttttagttgtttcgtttgcgaaattttgttgagtgtttagtgtgtgttaggtattgatgtttagttttttattttgttttttatttttttttaggtagttttttttgttttattttgtatagtaagagagattttttagggatttttttgagaagtgtagagttttagtttgatttttggttttttttttgtagatatttagtatacgcgcgttttggtttggtttaaggtggaaatataagattaaagttgttaggaggttaaggtgggataggttgggggtttttttttagtaggttttagaggtattttgggttgttatttattgggatttagttttttttatattgggtttattttgttttgggagagggtaggggagttttagttttgattgttacgaagttttttatttttttattttaataaggggtggggatttgttttgtttttttttttttttgtttattttttttttttttttttttttttttttgtttatttttcgttgatatttttttttttttttttttttggttttttttttaaaggtcgtagtgttgtttttttaattgagggtagtttcgtcggggtgttgaggtcgaggtggggtgtatgtgggttatgtaatggagttggggtcgtattggtaattatgtgacgttttgagttttttaatagtagggtaaagttttaagattattttaaggggttttgtttggagtgggttgtaaagggtttggggaggtaaggttttatgtttgggaaagtttaaaggggtgtagggggtgggaaatgggatataatgaggtagttatacgaggtagaggtatgttgggggtggggggagtagatattggaatatatatatatatatatatatatatatatatatatgtttatatatataattagttagataatcgggttagtgtgtttggggtttcggagtttagtgaattaggagtttgataagggttttttttttttttcgtttgttggttttggataatttttttttagtttttttcgacgttattttcggcgttgttaattttttttttttcgtttttttttttttttttgtgtttagatttttgttcggggttttgaaatagtgagttgtttttgttcgaaatataggtgaacggtaattatgtgattaatatatatatatataaaaagttttttaatagcgttcgttcggttttagaatcgttcggagaggagtcgttttggatggatagagggacgagggacgagtatttgtcgtcgtgtttcggttgttttgtagtcgtttttaatattcgttgttgttcgttcgttgtttgtttgtttggtatttttttttttcggtgggtttttatttatttttttattttttagttttttttttttgaggaaaggattttttcgttttttgttgtgtttgtgattggtttgagattcgtttggggtaggaggggtggttgtggaaggaaagagtttagagttaggaggtggaatgtggggttttatagttgttttttttttaattttttgtttttttttttgttttttttggtttagttgtgttaggatgggggtgggggtagtagtgggtacgttttgtttgtaggaagttacgttagatagaaggggttatttttttttttttttttttgttttcgtatagatattgttttttttttagggttgtgttgggttttttgttgagtagtgttgggtgaggtaggtgggtttgtagggcgggtgggaagggttgttagatgattagtgttgtgtgtgtgtggttggggtttttgttgcgaatatatttttgtttattatgttggtaattgggattttttttattttattttaggttttgggaatttagtgttttttagtaggtaagggtgaaggatttatagttatttttgaagagtagggagtttggagaggggagggattttggttgaagatatttgggtttttgttttagtaggataataggagggttagtgttattttttttttttttttttgttgggggtggtaggggtttttttatttttttatttttgatttttttttagggatgtttgtgatttttttattttattttttattatttttttgttttgaagtgagggtttgttatcgtttatggtaaggtgtggtgtttggtaggttttatgatttgtttttttttagggtgtttattttgtagtagagaggggtttgcggtttgagtgtaatggtggaaatttaggtttttttttatggtttaaggaggttttttcggagtaatagggtttttttgggatttagtttggtttttgttaaggtaggtttcggatttatttagaagatgggttttagagaggaggagaggaaaggaatatttgttagttaaacgtgaagtttattgatgatattgtttggtagagttgttttcggttagtagtgattttttattttttagtttttaagttttttttttgagggagttggttcggttttatggaaggtttcgtttgtgtttttttattgggtttttggttttttatttgttacgtggggcgatggttattttttttttttgtttgttttgaaggatatattgagatgaaggttaggaaatttgttggttgtagaattaggggttatgtaggagtgagggatggtttggttaagttgaggttttgttttagttttagtttttttatataggtatgagattgtttttttgatttttagaggatagggttgagatgggatgagggaatatagggaaagcgtttagtatttttgagtgttgtgtggatgcgatttggggggttttggtttttattttttaattttatttggattgtgtgtttttttatttttagtttttttgcgggggttttttatagggtttggtttgcggatacggggtttggcgtagggtagtgttttttaaatgggaaggcgtattgggattttttaggttggggtggggtttgaggttttgtatttttaattagttgtttaggattggttttaatttttgttgaatttataattatttgtggagttaagaaaaatatattgggttttggttgggtgtggtggtttatatttgtaattttagtattttgggaggttaaggtgggtagattatgaggtcgagagattgagattattttggttaatatggtgaaattttgtttttattaaaaaaaaaaaaaaaaaaaaattagttgggtatggtggtaggcgtttgtaattttagttatttgggaggttgaggtaggagaattatttgaattcgggaggtggaggttgtagtgagttgagattgtattattgtattttagtttgggtaaaaagagcgaaattttgttttaaaaaaaaaaaaaaaaagaaaaaaagaaaaatatattgagttaggcgtggtgatttatttttgtaagtttagtattttgggaggtcgaggcgggtagattatttgagggtaggagttcgagattagtttggttaatatggtgaaattttatgtttattaaaaatataaaaattaattgggtatggtggtacgtatttgtaattttagttacgtgggagtttgaggtaggagaattatttgaatttaagaggtagaggttgtagtgagtcgagatcgtattattgtattgtagtttgggtgatagagtaagattttgttttataaaaataaataataataataataaaaaaatatattggagtttagattttattttagattggttgattttgaatttttggggttgaggtataagtataaagttttttgggaggtttttatagagtttttggatttttgaggttgtgaatgatttttttttagagttaaaattattagggatggaggaggggttttgggtattggatttattagttaggtaggttatattggggtattcggagagttttggggtgtggtaggggagggtttatgtattgggaaggtggagggtcgacgggtataggttagtggtcgagggtagtatagtgatagatagaagttattttgtgggtttttagtcgagtttgagtgcgttggggtggttgtgggagtttttttgagtattttttaggttatttttatttttggataaggttgtgttatttttagtttcggatgtagtggaaagtgatttgaagttaagaaattttgttattagtatttaaggggttttaggtagattacgttattaattttttaggattcggtttttgtatatgtacgatgttgataattttatgtatttttgatatttttaagtgatgagagaattaaataagaatatatatatatattttttttatttagtatagtgattgtttaataaatgtgagttagaggaaattatttagttattaggttagtattgggaggtgtggagg

SEQ ID NO: 1713 - DNA, 8801 bp, Artificial Sequence
  chemically treated genomic DNA (Homo sapiens)
gagtttttgataagtgagtaggaggcggcgggtggttgttttaaattttgatttatgaaaaaaaattagaatttatcgatatattttgttattcgttgagcgtttaagtttttaattaaagaaggtatagtggtagggagtggtaggggggtcgggagaggaggaagggggagaagaaagaagattgattatttttacgattttttatttcgtttcgcgggcgtagggaggtttagcgatgttatttggcggttgtttttttttagattgggagtcggttggttgtagataaatttaggtttttttcgggtgtcgtgtttttgtttttagaatagaagtagaagtttgtatttatgtttgtaatttaagtggttttgtaaatattcgttttttgtttgtttttttgagaaaatcgaaggaaaggaataatgagttggtattggtatgaatagtttaagtttattgtgtgttagttattggttatgagaggaaaatggtataattgttagaaatgtaggttttttaatttttagtttattttagtgataaaaataaatgttaggttttatttattttagaattttattttgatattttgtaaatatgagttatttttatatattattttttaatgtacgtatttttatttttattacgcgttgagtttagttataatgtaatgttattagtttaaaaggatgaagtgtaagttatgtttgtttatttgattgagaagtaaattagttttatatggaggttttttttttataaagtgtggaattaaaaaaattggcgttttttagttgataaaggttaatgatattagattttttagggttttttttttgttaggtaaagtaataattatatagtttttttttttttttattttatttgaattgaatatttgttaggtttgattagcgtttataattatagtttttataattaaggtaaggtaaaattttgtaaattagtgtaaatttagatttgttaaattaatttttatttaggtttttttttttatgttaaaggaatatattaagtagtggaatagaattttattttatttatgttttatattattgtatggatgtgagattttatgttgtgtagatgtgtgagagtagaagaaatgtattagtagatattatatttatattttaaatggaattttattatttaagggaataaaataaaatatttaatttaaaattggaaatgtttaatattattgttaataaagatagtttattattttaaattaggattttttttttttgtaaaattattttggtttttttttaatatagttaaaagattagtattaagaattattttatgtattgtaaagttagtagagggaatattgcgtattgatttagtaggggttattaaatatttggtatttggggaaaaaaatgttagtaatggagaattgattatagagtatatgaagttagggaatgagaagggagaaatttttttttattatttggtattgagaggtttaatatattttagtgtgtatatatttagttggttataaagatgattttaataaaagggtattcgttatatgtttttttatattttaagagaattaatttattagaatagatttattttagaagtttaggtatttgtgtaatatataaatatatatgtagtaattataaagttaatggaagttattgatattatattttattaagtttaagaggaaatttttttttttattttaattttttttgaaataaggaggtattttatatttagggggatattatagttttattggtagtttttttttttggtggaatgtaatataatggtgtgttttaaaatttgttggatttgttgaaatatagaaaatatatgtaataaaagaatgaggttagtggttgtgttttagtatattttttaaaaaatttatgtgttttaagtagaaatatatatgattgttttaatttttatttttttttattatattcgatgatggaagtataaatgattgagaaatataattaataatgttgatatttaatttgattgaattattaaattagttatatttttaaattattagttagtataaatttaaaaataaatatttttttttattttagtgaaaatattgattttatagataatagtttttttaaaataatttttttttgttagattggtaatatttaaggatgtgtttttatgtatattagagaaaatgtagtatataatatagtaatattgttatgtaaaaaaggtgtttgtgtgtttttggtttgggtttttttttttttaaggatttgtttttttttttttaaaaaaattatgtaatataagtagttaatcgttaaaaattatttgtttttatttataaaaatagttttgtttgtggttgatttttatagatttagttagatggttatatagggtgttttttttagtaaaattttaagtttgataatttgggtttattgttagtttatatattttaaaagtttgataagatatatagaaatttattatttagtattagtttaatttgaattaaaagtcgatttaattattttggattgattttatttaattatttatggttagtttgaagaatattagttttttattatagtgttaaggaaagttgatttttattataattttaatttttagatattggaaaataagtaatttttgtagttaacgtttattttgaatattttggtattttttttttgttatattttttttagtattttttatggagttttttttttttaaaattaatggaatggtagggttgttattattgtttttttatggtttatattaatgatttgtgattattttttttttttttttgagatagttatacgttattatttatattggagtgtagtggtttaattttagtttattgtaattttttgggtttaagtaattttttcgttttagtttttcgagtagttggaattataggcgtatgtatttttgtttagttaattttttaattttttaatttttagtagagatagggttttattatgttgattaggttggtttcgaatttttgatttgaagtgatttatttattttagttttttaaagtgttgggattataggcgtgagttatcgcgttttgtttgttattatttttttatataagtggttattttgttttagttttttgaataatatgtagtttttattaggagtgtgtttggtatttgaattagaaaggaagatattagtatttattgagggtttataatatattaggtgttttatagttataaatttattgaatttttataataattttttataaagtagtttttagtgtttttatataatagatgaggaaaattgagatttggttatatttttatagttataaattattaagaaggattagtagttaggtttattatgaattcggaggttttatttttttttgttattagttattatttttttttatagtttttttttgttttggttttttagtttttttcgatttaagtaataagaggaaatatataagaaggaaaggaggaagatggttttgggaggaggagagggaagagagtgaagtaatttttaattttgaaaatagggaaaataaatatttagaaagtaaaatcgatttttattttttatatgttattatatattttatataaaattttggaaatttgtttattgaggtaattacggagtattatttaatgtgttttaagggaaagtttttttgtttgggttatgtaggatttatagggagtttaaattattaaataattatagttgatttttgtttggttaagagagtaagtaattattgtaaagtttttttttttgttttttataaatagtataaaaacggttttgaagggatttatataatatattaatatttgtgttgtatttagagttgttaaaataattgtgatgataggtgtttaggtattatttttttaatggtttttaatatttattgatttattgttttgtggttttttttttttttttatagttttggttttaagaaagagttggggaatagattttgtattagaggttgattttttattttaatgttgaaaagaattaataaaaataattatttggtttttaagtagaaagtttttatttatagtattttatttttatttcgtttcgttttaagttttttgttatttaatataatggttagaatatattttcgtttttttttttaataattttatgtattaatattttttttatatattatatatatacgtacgcgcgtatatatacgcgcgcgtatatatatagtaaaaggaaaaaagaggtagtagaaattttagttgtatttttagtttttttaaaaagtttgttttgtaaattggaatgaggttagatttggagttttttattgtacgcggagattattattgtatcgggttttaagttaatgggaagttcgggggaggggtttggtatgaggaagcgttggttatagtagttgattggttgtagttaagattgtgaaaggataaagaggcgcgaggcggaattggggtttgttttaagttgtagtaagagaaattgtgtgtgaggggaagaggtttgtttcgttgtcgggtttttagtttttgtacgttttttaagagtttgtattggaggaatttttgttattattagttttttttttgtagaagggagggggaaatatatatttatttatgttagtttgttgtatgtaggttttttggttttttattttgtaataaaataattgtattaattttttagtgtcgatttcgtttatagagagttttggagttatagttttttttgttttgtattgtaggagagggattaagtgttagagattatgtcgtttttttgagttatcgagagcgttcgtgaattggaattaattgttttagggaaaaagaaaaaaaaaaaaaaaagatttgtttgggaggtcgcgagaaatttgtattggaagttttagtaattagtattcgagaaatttttttttattttagtacggtttttagatttagtcgagagatagtaaattgtagcgcggtgagagagcgagagagagggagagagagattttttagtttgggaattataatttttttgcgagaggcggagaattttttttttaaattttttggggatttttttttttttatttattttcgtttttgcgaggagttgaggggttagttcggtcgtcgcgcgcgttttttcgttcggcgtgtgtttggttcggggaatcgggagggttcggcgatcgcgcggcggtcgtcgcgagggtgtgagcgcgcgtgggcgttcgtcgagtcgaggttatggtgtagtaaattaataatgtcgagaatacggaagcgttgttggtcggcgagagttcggattcgggcgtcggtttcgagttgggaatcgtttttttttttacgttcggttttatcgtttttacgggcggtaaggtcgacgattcgagttggtgtaagatttcgagtgggtatattaagcgatttatgaacgtttttatggtgtggtcgtagatcgagcggcgtaagattatggagtagtcgttcgatatgtataacgtcgagatttttaagcggttgggtaaacgttggaagttgtttaaagatagcgataagattttttttattcgagaggcggagcggttgcgttttaagtatatggttgattatttcgattataagtatcggtttaggaagaaggtgaagttcggtaacgttaattttagtttttcggtcgtcgttttttttaagtcgggggagaagggagataaggtcggtggtagtggcgggggcggttatgggggcggcggcggcggcgggagtagtaacgcggggggaggaggcggcggtgcgagtggcggcggcgttaattttaaatcggcgtagaaaaagagttgcggttttaaagtggcgggcggcgcgggcggtggggttagtaaatcgtacgttaagtttattttggtaggcggcggcggcggcgggaaagtagcggttgtcgtcgtcgtttttttcgtcgtcgaataggcgggggtcgtcgttttgttgtttttgggcgtcgtcgtcgattattattcgttgtataaggcgcggatttttagcgtttcggttttcgttttttcggtagtttcggttttcgtagcgttcgcggtttcgggtaagtatttggcggagaagaaggtgaagcgcgtttatttgttcggcggtttgggtacgtcgtcgtcgttcgtgggcggcgtgggcgcgggagtcgattttagcgattttttgggtttgtacgaggaggagggcgcgggttgttcgttcgacgcgtttagtttgagcggtcgtagtagcgtcgtttcgtttttcgtcgtcggtcgttcgttcgtcgattatcgcggttacgttagtttgcgcgtcgtttcgttcgtttcgtttagcgcgttttcgtacgcgtttttttcggtttcgttttattttttttttttttttttttcgggtttttcgtttttcgacgacgagttcgaagacgatttgttcgatttgaattttagtttaaattttgagagtatgtttttgggtagttttagttcgtcgtcggcgttcgatcgggatttggattttaatttcgagttcggtttcggttcgtatttcgagttttcggattattgtacgttcgaggtgagcgagatgatttcgggagattggttcgagtttagtatttttaatttggtttttatttattgaagggcgcgtaggtagggagaagggtcggggggggtaggagaggagaaaaaaaaagtgaaaaaaagaaacgaaaaggatagacgaagagtttaaagagaaaagggaaaaaagaaagaaaaagtaagtagggttggtttcgttcgcgttttcgtcgtcggattaaggagcgcggcggcgttttggattcgcgtttttattttttattttttcgggtcggggatttattttgtttagtcggagggacgcggaggaggaagagggtagataggggcgatttgtgattgttgttattgatgttgttgttgatggtaaaaaaaaaaaagcgatttcgagtttgtttttttttgtttgaagagatttttttttttttttaacgagttttcggatttgtttgtatttttagtaagaaggcgagttagttttttagagatttgaaggagtttttttttttttgtattattattttggttttgttttattttgttttttggttaagaaaggaggggagaatttagcgtatttttttttttttttttttaaacgcgtgatgaagatagaaggtttcggggtgacgaatttggtcgatggtagatgttttgggggaacgtcgggattgagagattttacgtaggcgaattttcgtttggggtttttttttttttttttttttttttttgttttttttgtagtcggaggaggagatgttgaggggaggaggttagttagtgtgatcggcgttaggaaatgattcgagaatttcgttggaagcgtagtagcgggagttaggggcgggggcggaggaggatacgaattggaagggggtttacggttaaattgaaatggatttgtacgttggggagttggcggcggcggttgttgggttttcgtttttttttttacgtgaaattagtgaggtgagattttttagatttcggaggcgtggaggagaggagattgtttgatgtggtataggggtagttagtggagggcgagtggtttcggaaaaaaaaaaagaaaaaaagaaaaaaaaagaaaaaaaaaagatttttttttttttttaatcggaatcgtgatggtgttggattattttaatggtggggttaatatagtatgttattttgtttattttttaaagatttttgtataagattgttgagtagtttttaaaatagtgtaggataatataaaaagtagatagatggcgttatgtttgatttttataacgaaattattattagtttttttttatttttaattttttaaaggatttaaacgtaatttaaatttgtgttggattttaaaaaaataatttaggattaaatttttttttagtgtgtgtgtttattttttataggtgtaaatgagaagacgtgttttttttttttatcgatgttttattttcgtatttttttttttttgtaaatgtaattagatgttattttatatgtggacgtatttatattggttaaatatatttttttttttgttttttttttttttttttttttttttattttttttatttttttattttttttttttttttttttttttttttttttttttttttttttttttttttggtagttgttgttatttacgttattttacgttttttttattgaagggttagagttttaatttttaattttttatatttaaatgtagatttttgatatttttaaaaaataaaaaaagataagagagatgaaaacgtttgattatttttttagtgtatttttgtaaaaaatatataaagggggtgttaatcggtgtaaatcgttgtttggattttttgattttataatagggcggttggttaatattttatatagtttaaaaaattagtttttaatttttttatgtttatattttaatttgtaggttttttaaagtgatagtattttttaatttgttattagtgtttatttttcggttttcgttttgtaaaaaggggaggagaattagttaaatattgtaagtttttaagaaaaataaagttttaaacgaaatattgttttg

SEQ ID NO: 1714 - DNA, 8801 bp, Artificial Sequence
  chemically treated genomic DNA (Homo sapiens)
tagagtagtatttcgtttaaaattttgttttttttaaaagtttatagtgtttggttaattttttttttttttttataagacgggggtcggagggtggatattggtggtaggttaagggatattgttattttaagaagtttgtagattgaagtgtaaatatggagaaattaggggttgattttttaaattgtgtgagatattaattagtcgttttgttataaaattaggaaatttaaatagcgatttatatcgattaatattttttttatatattttttataaaaatatattgagaaaataattaaacgtttttattttttttgtttttttttgttttttaaaagtgttaaaagtttatatttaaatataaaaaattaaaagttaaaattttagttttttagtgaaggagacgtaaaatggcgtgggtaataataattattaaaaaaaaaaaaaaaaaaagaaaaaaaaaagaaaaaaaggaaaaggaaggaataaagaaataaaggaagtaaaaagaaaggaaagaaaaaaagggataaaagaaaaaatatgtttggttagtataaatacgtttatatataaaatggtatttgattatatttataaggaaaaagaaatacgaggatggagtatcggtgaaggaaaaaaatacgtttttttatttatatttataaggaataaatatatatattgagaaaaaatttggttttgaattgtttttttaaagtttagtatagatttgagttgcgtttgaattttttaaagagttaagaatgaaaaaaagttggtgataatttcgttgtaggaattaaatatagcgttatttatttgttttttatattattttatattattttaaaaattgtttaatagttttatatagaaatttttaaaagatagataggataatatgttatattaattttattattgaaataatttaatattattacgatttcgattaagagaagaaaaaaatttttttttttttttttttttttttttttttttttttttttttcgaaattattcgttttttattgattgtttttgtattatattaaatagtttttttttttttacgttttcggggtttgggaagttttattttattgattttacgtagaaaagaaggcggaggtttagtagtcgtcgtcgttagttttttaacgtgtaaatttattttagtttgatcgtgaatttttttttagttcgtgttttttttcgttttcgtttttagttttcgttgttgcgtttttaacggggttttcgggttattttttagcgtcggttatattggttggttttttttttttaatattttttttttcggttgtagagggggtaaggggaaaagagggaggaaaaaaaagttttaaacgggaattcgtttgcgtggagttttttagtttcggcgtttttttaaaatatttgttatcggttaaattcgttatttcggagttttttgtttttattacgcgtttaaaaaaagggggggaggggtgcgttgggtttttttttttttttttgattaagaagtaaaataaaataaaattaaggtggtgatgtaggaagggggagatttttttaagtttttagaaaattaattcgtttttttgttgggggtgtagataagttcggaagttcgttggaagggggagggggtttttttaagtaaaggggagtaaattcgaagtcgtttttttttttttgttattaataataatattaataataataattataggtcgtttttgtttattttttttttttttcgcgttttttcggttgggtagagtgggttttcggttcgggaaggtgggggatgggagcgcgggtttaaaacgtcgtcgcgttttttgattcgacgacgagaacgcgggcgaagttagttttgtttattttttttttttttttttttttttttttttaaatttttcgtttgtttttttcgttttttttttttattttttttttttttttttttatttttttcggtttttttttttgtttgcgcgttttttagtaggtgaaaattaggttggagatgttggattcgagttagtttttcgagattatttcgtttatttcgggcgtgtagtagttcgggaattcgaagtgcgagtcggagtcgggttcgaagttaaaatttaggtttcggtcgagcgtcgacgacgaattgaagttgtttagggatatgtttttaaagtttgagttggggtttaggtcgagtaggtcgttttcgaattcgtcgtcggaggacgaggagttcgaggaggaggaagaggaggagtgggacgaggtcgaggaggacgcgtgcgagggcgcgttggacggggcgggcgaggcggcgcgtaggttggcgtagtcgcggtggtcggcgggcgagcggtcggcggcgggggacgaggcggcgttgttgcggtcgtttaggttgggcgcgtcgggcgagtagttcgcgttttttttttcgtataggtttagggggtcgttggggtcggttttcgcgtttacgtcgtttacgggcgacgacgacgtgtttaggtcgtcgaataggtagacgcgttttattttttttttcgttaggtgtttgttcggggtcgcgagcgttgcggaggtcgaggttgtcgaggaggcggaggtcgaggcgttgggagttcgcgttttgtatagcgagtggtggtcggcggcggcgtttaggggtagtagggcggcggttttcgtttgttcggcggcgaaggaggcggcggcggtagtcgttgttttttcgtcgtcgtcgtcgtttgttaggatgagtttggcgtgcggtttgttaattttatcgttcgcgtcgttcgttattttggagtcgtagttttttttttgcgtcggtttggagttggcgtcgtcgttattcgtatcgtcgtttttttttttcgcgttgttgttttcgtcgtcgtcgtcgtttttatggtcgttttcgttattgttatcgattttgttttttttttttttcggtttggaggaggcggcggtcgaggagttggagttggcgttgtcggattttattttttttttgggtcggtatttgtagtcggggtagttagttatgtgtttgaggcgtagtcgtttcgtttttcgaatgaaagggattttgtcgttgtttttgagtagtttttagcgtttgtttagtcgtttggagatttcggcgttgtgtatgtcgggcgattgttttatgattttgcgtcgttcgatttgcgattatattatgaaggcgtttatgggtcgtttgatgtgtttattcggggttttgtattagttcgggtcgtcggttttgtcgttcgtggaggcggtggagtcgggcgtgggggaggaggcgatttttagttcgaggtcggcgttcgagttcgagttttcgtcggttagtagcgttttcgtgttttcggtattgttggtttgttgtattatggtttcggttcggcgggcgtttacgcgcgtttatattttcgcggcggtcgtcgcgcgatcgtcgggttttttcggtttttcgggttaagtatacgtcgaacgggaagacgcgcgcggcggtcgaattggttttttaatttttcgtaggggcggaggtgggtaaagagagaaaagtttttaaaagatttggggaaggagtttttcgtttttcgtagaggagttatagtttttaggttggagagtttttttttttttttttttcgtttttttatcgcgttgtagtttgttgtttttcggttgagtttggagatcgtgttaaagtagagaggagtttttcgaatgttggttgttgaagtttttaatgtaagtttttcgcggttttttaggtaagttttttttttttttttttttttttttttgaagtagttgattttagtttacgagcgttttcggtagtttaggaaagcgatatagtttttagtatttagttttttttttataatgtaaagtaaaaaagattgtggttttaggattttttgtgggcggaatcggtattaaggagttggtgtaattattttgttgtaaggtaggaagttaaaaagtttgtatgtaatagattggtatgaataaatgtatgttttttttttttttttgtaagaagggagttggtaatggtaggagtttttttagtgtagatttttaaagagcgtgtaagaattagagattcgatagcgaaataggttttttttttttatatatagttttttttgttgtagtttagagtagattttaatttcgtttcgcgtttttttatttttttatagttttggttgtagttaattagttgttgtaattaacgtttttttatgttaaatttttttttcgggttttttattggtttggaattcgatgtaataataattttcgcgtgtaatgagaagttttaaatttgattttattttaatttatagagtaaattttttaaaagggttagaagtatagttgagatttttgttgttttttttttttttttgttgtgtgtgtgcgcgcgcgtgtgtgtgcgcgcgtgcgtgtgtgtatagtgtgtgaagaggatgttaatgtatgaaattattaaggggagagacggaaatgtattttaattattatgttagataataaggggtttggaacggggcggggtaagggtgaaatattgtaaatggaagttttttgtttaaaagttaagtgattatttttattagttttttttagtattggaataaagaattagtttttggtgtaaaatttgttttttagtttttttttaaagttaaagttgtaaaggggaagagaaagttataaaataataaattaatggatattgaaaattattaagaaagtggtatttagatatttgttattataattattttaataattttaggtatagtatagatgttgatgtattgtgtaaatttttttagaatcgtttttgtgttgtttgtggaaggtagggaagaggattttgtaataattgtttatttttttaattaagtaagggttaattatggttatttaatgatttaaattttttgtaaattttgtatagtttaaataggggagtttttttttgaaatatattaggtagtgtttcgtaattattttaataggtagatttttagagttttgtataggatgtataatggtatgtaaaggatggaaatcggttttattttttaaatatttgttttttttgtttttaaaattaaagattgttttattttttttttttttttttttttaaagttatttttttttttttttttttatatatttttttttgttatttgaatcgaagggaattgaaaaattaaggtaaagagaaattgtagaaggaggtgataattggtagtagaagagaatggggttttcggatttatagtagatttggttgttaattttttttaatggtttgtaattatggggatgtggttaagttttagttttttttatttattatatgggaatattaggagttattttatagagggttgttgtgagggtttaatgaatttgtgattatgaagtatttgatgtattgtaagtttttaatgaatattaatatttttttttttaatttaaatgttagatatatttttagtaaaagttgtatgttgtttaagaggttaaaatagaatagttatttatgtaaaaaagtaataataggtaggacgcggtggtttacgtttgtaattttagtattttgggaggttaaggtgggtggattattttaggttaggagttcgagattagtttggttaatatggtgaaattttgtttttattaaaaattaaaaaattaaaaaattagttgggtagggatgtatgcgtttgtaattttagttattcgagaagttaaggcgggagaattgtttgaatttaggaggttgtagtgagttaagattgagttattgtattttagtgtgggtgatagcgtgtgattattttaaaaaaaaaaaaaaagtaattatagattattgatgtgaattatagaaggataatagtggtaattttgttattttattgattttaaaagaaaggaattttatgaagaatattaagaagaatgtggtaaagaaaggatgttaaggtatttaaaataaacgttggttatagaaattatttgttttttagtgtttgaaaattagaattgtagtaaaaattagttttttttaatattataataggaaattaatattttttaggttaattataagtggttaggtaaagttaatttaaaataattaagtcggtttttgatttagattaaattagtgttgggtagtaaatttttatgtattttgttaaatttttaaagtatgtaggttggtaataggtttaggttgttagatttagaattttattggaaagaatattttatgtagttatttgattggatttgtaaggattaattataagtaaaattgtttttgtgggtaaaagtaaataatttttgacgattagttatttgtattatataatttttttaaaaaaggagaaataaatttttaaaaaaagaaaaatttaaattaaaaatatataggtattttttttgtataatagtgttgttgtgttatatattatattttttttggtgtgtatagaaatatatttttaaatgttattaatttgataaaaaaaaattattttaagagggttattatttataagattaatatttttattagaataaaaaagaatatttatttttgaatttgtattaattaatgatttgagggtgtagttagtttgataatttagttaagttgagtattaatattattgattatattttttagttatttatgtttttattatcgaatatgatagggaagagtggaagttaaagtagttatatatgtttttgtttaaaatatatggattttttaaagggtgtattaaaatatagttattggttttatttttttgttatatgtattttttgtattttaataaatttaataaattttaagatatattattatattatattttattaaggaagaaagttgttaatgaaattgtgatatttttttagatgtaggatgtttttttattttaggaagagttgaaatgaaaagaaaaatttttttttagatttgatgaaatatggtattagtaatttttattgattttataattattgtatatatatttatatattatataagtgtttagatttttgaaatagatttgttttaatgggttagtttttttagaatgtaagaaaatatatgacgaatgtttttttattaaagttatttttgtgattaattaagtgtgtgtatattggaatgtgttggattttttaatattaaataatgagaaaagatttttttttttttattttttaattttatatgttttgtaattagttttttattattgatatttttttttttaaatattagatatttggtggtttttattaaattagtacgtagtgttttttttgttggttttgtagtatatgaagtaatttttaatgttagttttttagttgtattaagagaaagttaagataattttgtagaaaaaaaaaattttggtttagaataataaattgtttttgttagtaatgatgttagatatttttaattttgaattaggtattttattttatttttttaaatgatggaattttatttgagatgtaagtgtaatatttgttaatgtattttttttgtttttatatatttatataatataaaattttatatttatataatggtatggggtatagatgaaataagattttattttattgtttaatatatttttttggtatggagggagggatttgaatggaaattagtttaataaatttggatttgtattgatttgtaagattttgttttgttttggttatagaaattatgattgtaggcgttagttagatttgataagtatttagtttaaataaaataaagaggaggaaaaattgtgtagttgttattttatttgataaggaagaagttttgggaaatttgatgttattggtttttgttaattgaaaggcgttagtttttttggttttatattttatggaaaagaagtttttatgtgaggttgatttattttttagttaagtagataaatataatttgtattttatttttttgggttgatgatattgtattgtaattgggtttagcgcgtaatgggggtgggggtgcgtgtattgaaaaataatatatggaaataatttatatttgtaaaatattaaaataggattttggggtaaatgaaatttagtatttatttttattattagaataagttaagagttaagaaatttgtatttttaataattgtattattttttttttataattagtgattagtatatagtaggtttaagttgtttatgttaatgttaatttattatttttttttttcgatttttttaagaaaataagtagaagacgaatgtttgtagggttatttggattgtaagtatgaatataggtttttgtttttattttagaggtagaggtacggtattcggggagagtttgggtttgtttgtagttagtcggtttttaatttggggagaagtagtcgttaggtggtatcgttgagtttttttgcgttcgcgaggcgaggtaggaaatcgtggggatagttagttttttttttttttttttttttttttttttcgatttttttattattttttattattgtattttttttagttagaggtttaaacgtttaacgagtaatagggtatgtcgatgaattttgatttttttttataaattaaagtttagggtaattattcgtcgttttttgtttatttgttaggagttt

SEQ ID NO: 1715 - DNA, 5437 bp, Artificial Sequence
  chemically treated genomic DNA (Homo sapiens)
tatttatgaaaattgagatattaggtaaggatagttattattttaagttatttttttgttaattatttttatagtttgtgataattaggtatttatttaagtaagaagtttaaatatatgagtaattttttgataatttaggagatatagttttttttttttttttttttgaggtggaatttcgttttgttttttaggttggagtgtagtagtgtagtttcggtttattgtaatttttgtttttaggtttaagcgatttttttgttttagtttttcgagtagttgggattatcggcgtttattattatatttggttaattttttggtaatttttagtagaaacggagttttattatgttggttaggttggtttcgaatttttgattttaggtgattttttcgtttcggttttttaaagtgttgggattataggtatgagttattgcgtttagttttttttttttttttaattaaaataattaaatagagatggggttttttgtttgttgtttaggttggtttttaatttttgggtttaagtaatttttttgtttcgggttttcgaagtgttgggattataggagtgagttattacgtttagtttaagtattgtttttttgtgatgatttgtaggtaataattattttttgtttatatttttattatttttttttttatttcgagtttatagtttgttttggttagattttattttttgagtgtattaggttggagtttggatttatttatattttcgtagtttttttgagttggggtttaatatttggtttggggaatagatagttttgtcgatagtagtaataatttggttgaaatgataattttgttaaaaatgaattttgttttagtgtttttttaaaggttgagaattttgtatatttttataatatttttattttttatagttaaaaaattgtaggttgggtgtagtgatttatttttgtaattttagtattttgggaggttaaggtgggtggattgtttgagtttaagggttcgagattagttaggtaatatagtaaaatattagttaggtgtggtagttattcgggaggttgaggtaggagaattgtttgaatttaggaggtagaggttgtagtgagttaagattatgttattgtattttagtttgggtaagagagttagattgttttaaaaaaaaaaaaaagtaagttttaattattttgtagttaattatttttgtttttttatttgtaatagtagaagattgaaatagttttttagatgtttgatagtggaatgggttttttttttttttttttttggtagagatgagggttttattatgtggttaggtaagttttgaatttttggttttaagtgattttttcgtttttggaggtaggaggtagggtatagttttagatttaaagtattgggattataggagtgaattattgcgtgagtttggttttttttttttttttttttttttttttttttttttttttttttattcgtttttttttttttttttttttttttttttttttattttattttttttttttttttttttttttggtttgttaaaatagaaatatataataattatagtgaaataaattagggtatttattgtagtagttagtaataatgaaatgttggaaaataatttaatgtttattcgtagggaatatttaaaatatagtgtatttttgtcgggcgcggtggtttacgtttgtaattttagtattttgggaggtcgaggtaggtggattatgaggttaggagatcgagattacggtgaaattttgtttttattaaaaatataaaaaagttagtcgggtttcgtggcgggcgtttgtagttttagttattcgggaggttgaggtaggagaatggtttgaattcgggaggcggagtttgtagtgagtagaaatcgcgttattgtattttagtttgggcgatattgtgagattttattttaaaaaaataaattaattaaaaataaataaataaataaaatatagtgtatttttggtcgggcgcggtggtttatttatgtaatttcggtattttgggatgttgaggttggtagattataagattaggagattaagattattttggttaacgcggtgaaattttgtttttattaaaaatatagaaattagttgggtatagtggtatgtgtttgtagttttagttatttgtgaggttgagataggagaatcgtttgaatttgggaggtggaggttgtagtgagttgagatcgagatattacgttttagtttgggtgatagagtaagatttcgttttaaaaaaaaaaaaattatagtgtatgttatggaatattatgtaattgttatatatgtgtgtgtgtttttaaagtattgtttagtaataaaggaaaagtgtaaaatattaaaatggatgaatatatgtttgtgtaaatatagatattgttaggaatgtttgtttggaggtgatgggtatggagtttttttgtttgatatattgggtgtattaagaatgttaggttttgagtagttttttttttttttttttgagttggagttttattttgttgtttaggttggagtgtagtggtataatttttgtttattgtaatttttattttttgggttgaagcgattttcgtgttttagtttttcgagtagttgggattgtaggcgttcgttattatgtttagttaattttttgtgtttttagtagagacggggttttattatgttggttaagttggtttcgaatttttgattttaggtgatttgtttgtttcggttttttaaagtgttgggtttataggtatgggttatcgtgtttagtcgtttatatgtattaatttttaattattaaaataaattatgtggtattattataattatcgttatttatataaagtaatagagggataaggagattaaggtatttgtttaagtgtaagaggtaggataggaatttagagtttcgtgttggtagttgtttttttgtgtatttaatattattttatttaatttttgtagttattttatgaagaaggtggcggttttagggtattggagaagttatgtgtttgtttaaggttatgtagttggaagatggtggtggtaggataggaagtttgtagggtttgattttgtagttttttagtttatatttttttgtttttgtgttttttattttttttgtagaatgggtatttcgttatttttttgagttattgtgcgtagaaaagagagtatgttggttaggttggtttcgaatttttgattttaagtgattagtttgttttagttttttaaagttttgggattataggcgtgaattattacgtttagtttttgaatattttgtatttaagttattttttagtgttgtgtttgtagtgagtattttcgagggatgaagatacgtttttttgtgggaatttgggtttattagggtttttagaggaggggaattttttaagtttagagttttatggttgcggtgtaggtttattgtgtgtatggtgttagtttgggtttttttatgttgttttcgtgggatttggggtaaggggaattgatgtaaatattacgttgttgttgtttggtgtgagtaattaatttttgtggtttttatttaggagttttatgtttttgggttagataaatttattagtttgtagaaatggtatagttttacgggtttgttagaattttttattgtgtatatgttgtttttaaaatatataaattagttttgattttaaaaaattatttatttttttagtgataggagttttgttacgttgtttaggttggttttaaatttttgggtttaggaggtttttttattttggtttggattgttagtataatgtattattatattcgggattgattttcgttttttaagaataaaaattaaaaatatatataaatcgagagttaaagtttgttaattagaggaaagttaggaaatgggaattatttaaagaagaaaatatttttattttttatttttatttatttaaagataattaggtgaattttttagtagatatttttttagacggttttttatatagatttttatatttggttaggcgcggtggtttatatttgtaattttagcgtttggggaggttgaggcggatggattatttgaggttaggagttcgagattagtttgattaatatggagaaatttcgtttttacgaaaaatataaaattagtcgggtatagtggtgtaagtttgtaattttagttatttaggaggtcgaggtaggagaattgtttgaatttaggaggtagatattgtgttgagtcgagttaagattatgttattgtattaaatttcgttttaaaaaaaaaaaaaaagatttttatatttttattagtttgtagaaataagattttagtatatgtagtgtgtaggaattattttggtttagttacgtttttgtgattgggggttattgtggtgatttttagtttttcggatagagttaagagtttattagtttgtaaaggtttttacggtttttagttagattcgggggtttttttttgttttgttattttttgggagttttgagggtaggaaatggcgttatttagtttttggtttaatagtttggggattataaatgtaaaggaaattattttttttttttatttttttttttgtatttttgagtttttaggtttatatttttattatttatttttgagtttagttttttttagtattattatttttattttattttttagttaagagttaggaattttgattttagattttacgtttttttgttttttttaggtgagttttagatttttaggtatttcgttggtttttgaaggagtaggtgatggtgttgttttcgtttagtagttgtgggagtaggcgggtggggtaggatggaggggtgggtggggtgggtggagttagggtttattttttttttttttggggttttgttttttttagttttgttttagtttcgggaggtggtggagtgatttggttttagtgttgcgtttttattagtcgagtcggtaagagggtgagatttggtggggtaggggttttagtgggtttgggaatgtgtttgtggtttgaaaagattttgataggttatgatgggaagagattgggagttattgggttgtatagggttagggaaggttaggaggggttggttattgttggaatttaagttgttgaggttggagggagttttaggatggggttgatgggggagttgttagtatttgtttttttgttatttttgataatagtaaaagttagtatggaaaaaatcgttaaatcgtaggttgggtttggtcgttggtagggaagtgggtagaggggaggttcggttaggtttttcggtaattttcgcgtgttttgttttttcggttgtttatttgtagg

SEQ ID NO: 1716 - DNA, 5437 bp, Artificial Sequence
  chemically treated genomic DNA (Homo sapiens)
tttgtaggtgggtagtcggagaagtagaatacgcgggagttgtcggaggatttggtcgggttttttttttgtttatttttttgttaacggttaggtttaatttgcggtttaacggttttttttatgttggtttttattgttattagaaatgatagaggaatagatgttggtagtttttttattagttttattttgaggttttttttagttttagtagtttagattttagtagtgattagttttttttggttttttttgattttgtgtagtttaatggtttttaatttttttttattataatttgttagagtttttttaagttataggtatatttttaggtttattgaggtttttattttattaagttttatttttttatcggttcggttgataaggacgtagtattggggttaggttattttattatttttcgaggttggggtaagattgggaaggatagggttttaaggggaaaggaagtgggttttggttttatttattttatttatttttttattttgttttattcgtttgtttttatagttgttgggcgaagatagtattattatttgtttttttaggggttagcggggtgtttgggggtttggggtttatttgagggaggtagggaagcgtgggatttggaattaggatttttggtttttggttgaggaatgggatggaagtggtgatgttagggagggttgggtttagaggtgggtggtgggaatgtgagtttgagaatttaagggtgtagaggaggaggtgggaggggagggtggttttttttgtatttgtggtttttaagttgttaggttaggagttgagtggcgttattttttgtttttagagtttttaggaagtagtagggtaagaggaagttttcgagtttggttgggggtcgtgaaaatttttgtaggttggtgagtttttgattttgttcggggagttgggggttattatagtggtttttagttatagagacgtggttaaattaaggtggtttttatatattgtatatgttaggattttatttttgtaaattagtaaagatgtgggaatttttttttttttttttaaggcggagtttagtgtaatggtatgattttggttcggtttagtataatgtttgttttttaggtttaagtaatttttttgtttcggttttttgagtagttgggattataggtttgtattattgtgttcggttaattttgtatttttcgtagagacgaggtttttttatgttggttaggttggtttcgaatttttgattttaggtggtttattcgttttagtttttttaagcgttaggattataggtgtgagttatcgcgtttggttagatatgggaatttatatggaaaatcgtttggaaagatatttattaagggatttatttaattgtttttggataggtgagagtaggaggtgggggtatttttttttttgaatggtttttattttttgatttttttttaattagtaagttttgattttcggtttgtgtatgtttttggtttttgtttttgaaaaacgaaaattagtttcgggtgtggtgatatattatgttggtagtttaggttaaagtgggaggattttttgagtttaagagtttgaaattagtttgggtaacgtagtaaaatttttattattaaaaaaataaataattttttaaaattaaaattgatttgtatattttaagagtaatatgtgtataatagaagattttaataggttcgtgggattgtgttatttttataagttgatgagtttgtttgatttaaagatatgagatttttgggtgagagttataggaattaattgtttatattaagtaatagtagcgtgatgtttgtattagttttttttattttaagttttacgggggtaatatggaagggtttagattgatattatgtatatagtgggtttgtatcgtagttatagagttttgagtttgagagattttttttttttaggggttttggtaagtttaggtttttatagggagacgtgtttttatttttcgggggtgtttattgtaaatatagtattgaaaaatggtttgagtataaagtatttagaggttgagcgtggtggtttacgtttgtaattttaggattttgggaggttaaggtaggttgattatttgaggttaggagttcgagattagtttggttaatatgtttttttttttgcgtatagtggtttagaaaggtaacggggtgtttattttgtaggggggatgagggatataggagtaaaggagtatagattagagggttgtagaattaggttttatagattttttgttttattattattattttttagttgtatgattttgaataagtatataatttttttaatgttttaggatcgttattttttttatgaagtgattgtaagaattaaatgagataatgttaagtgtatagaaaagtagttattagtacgggattttgggtttttgttttattttttgtatttgggtaagtgttttaatttttttatttttttgttgttttgtataaatggcgataattatggtaatattatatagtttgttttgatgattaagagttaatatatataaacggttgggtacggtggtttatgtttgtaagtttagtattttggaaggtcgaggtaggtagattatttgaggttaggagttcgagattagtttggttaatatggtgaaatttcgtttttattaaaaatataaaaaattagttgggtatggtggcgggcgtttataattttagttattcgggaggttgaggtacgagaatcgttttaatttaggaggtggaggttgtagtgagtagagattgtgttattgtattttagtttgggtaatagagtgagattttaatttaaaaaaaaaaaaaaaaaattgtttaggatttggtatttttgatatatttaatatattagataaaaaggttttatatttattatttttagataaatatttttgatagtgtttgtgtttatataagtatgtatttatttattttagtgttttgtattttttttttgttattgaataatgttttgggaatatatatatatatataatagttgtataatattttatggtatatattataatttttttttttttgagacggagttttgttttgttatttaggttggagcgtagtgtttcgattttagtttattgtaatttttattttttaggtttaagcgatttttttgttttagttttataagtagttgggattataggtatatgttattatgtttagttaatttttgtatttttaatagagatagggttttatcgcgttagttaggatggttttgattttttgattttgtgatttgttagttttagtattttaaagtgtcgggattatatgagtgagttatcgcgttcggttagaaatatattatattttatttatttatttatttttaattaatttatttttttgagatggagttttatagtgtcgtttaggttggagtgtagtggcgcgatttttgtttattgtaagtttcgtttttcgggtttaagttatttttttgttttagtttttcgagtagttgggattataggcgttcgttacgaagttcggttaatttttttgtatttttagtagagatagggttttatcgtggtttcgattttttgattttatgatttatttgtttcggttttttaaagtgttgggattataggcgtgagttatcgcgttcggtagaaatatattatattttaaatattttttacggatgaatattagattgttttttaatattttattattattaattgttgtagtaaatattttagtttattttattataattattatgtatttttgttttaataagttagaaaaaagaagaaaagaaagaggtagagtgaaagaggagagaaggagggaaggaaggaaggacggatggaaggaaggaaggaaggaagggagggaggggaaagaaaagaaattaggtttacgtagtggtttatttttgtaattttagtgttttgagtttgggattgtattttattttttgtttttagaggcgggaggattatttgaggttaggagtttaaggtttgtttggttatatagtgagatttttatttttattaaaaaagaaaaagaaaagaatttattttattgttagatatttaggaggttattttaattttttgttattgtaaatagaagagtaagaataattggttgtaaagtaattggaatttatttttttttttttttgagataatttagtttttttgtttaggttggagtgtagtggtatgattttggtttattgtaatttttgttttttgggtttaagtaatttttttgttttaatttttcgagtagttattatatttagttaatattttgttatgttgtttagttggtttcgaatttttggatttaagtaatttatttattttggttttttaaagtgttgggattataggagtgagttattgtatttagtttatagttttttaattgtagaaaatagaaatgttgtaagaatgtataagatttttaatttttaaaaaaatattaaggtaaaatttatttttgataaagttattattttaattaaattgttattgttgtcggtaaagttgtttgttttttaagttagatgttgggttttaatttaggagagttgcgaggatgtggatgggtttaaattttagtttgatgtatttaagaaatggggtttgattaagatagattataggttcggggtggagggaaagataatgaaaatatgaataagaggtgattgttgtttgtaaattattatagaagagtaatatttaggttgggcgtggtgatttatttttgtaattttagtatttcgggagttcgagataggaggattgtttgagtttaggagttgaagattaatttgggtaatagatagagaattttatttttatttaattgttttaattaaaagaaaaaaagaggttgggcgtagtggtttatgtttgtaattttagtattttgggaggtcgagacgggaggattatttgaggttaggagttcgagattagtttgattaatatggtgaaatttcgtttttattaaaaattattaaaaaattagttaggtgtggtgatgggcgtcggtagttttagttattcgggaggttgaggtaggagaatcgtttgaatttggaggtagaggttgtagtgagtcgagattatattattgtattttagtttaggagatagagcgagattttattttaaaaaaaaaaaaaaaaaaaattgtattttttgagttattaagaaattatttatatgtttaagttttttatttaggtgaatatttgattgttataggttataaaaatgattaatagggaagtaatttgaaataatgattatttttgtttaatattttagtttttataaata

SEQ ID NO: 1717 - DNA, 6351 bp, Artificial Sequence
  chemically treated genomic DNA (Homo sapiens)
atagtatagtatgtagtttttatttattttattttatttattttattttaagttatgggatatatgagtaaaatatgtaggtttgttatataggaatatatgtgttacggtggtttgttgtatttattaatttattatttaggttttaagtttcgcgtgtattaggtatttgttttaatgtattttttttttttgttttttattttatgataggttttagtgtgtgatgtttttttttttgtgtttatgtattttttttgtttaatttttatttgtgagtgagaatatgtagtgtttggttttttgttttttttagtttgttaaggatgatgatttttagttttatttatatttttgtaaaggatatgaatttatttttttttatggttgtatagtattttatggtatatatgtgttacgttttttttatttagtttattattgatgggtatttggggtatgtagttttatagattgtatttttttttatatttttatggtatttgttatttatttttttttttgagtttttttaaataagggtttttatgtgattagagttaatgaatatttttgggagattgtagaagtagaagaagaaagttagaggtttaagtgttaaattattaaggtataagatttttttattatgtttttttttttattttagcgatatgttttgttatgtgtattaataattataaataatgtttagagattggagaattaatgttagttttaagggattttgagtgtaggatgggattgaattttaagttattaaatgttagagtagtagttagagtattgttagagtaaattttatatgaatttttgttgtttataatgacggaaaatttaaggaatttattagtttttatgtgttaaaatttttttttgaatgttttttgtgtatttttatattgtagttttgttttaaagattatgattttggttaggtgcggtggtttatttttgtaattttagtattttgggaggtagaggtaggtggattatttgaggttaggagttcgaaattagtttggttaatatgatttaattttgtttttattaaaaatataaaattagtcgggtatggtggtgtatgtttgtaattttagttattaggggggttgagttaggaggattatttgtatttgagaggtagagattgcggtgaagtgggattatgttattgtattttagtttgggtaatagagcgagattttaatttaaaaaataaaataaaataaaataaaaattaattaattaaataaataaaatattatgatttttatatattttttttttttaatgtggtgagaaataatatgagatttatttttttaatatattttgaagtgtataatattgtattgttaatatttatacgatgtgttgtatagtatagttttagaatttaattattttttttgggtaaaattttatatttatttaatatttattttttttttttttagtttttgataagtattatttattttgtttttacgagttggattattttatatattttttataagtggtattatgtagtatttgtttttttgtgattggtttattttatttagtataattttattaaggtttatttatgttgttatatgtgataggattttatttgttattatgattgaattattttaattgtatgtatatgttatttttattagttatagatattttaattgtttttattttttgatttttgttaatagtgttgcgataaatataaaagtgtaaaagtgtaaatatttttttataattttgattttaatttttttggttgtatatttagaagtgggattgttagattgtatgataggtttattttttatttttaggtaatgttatattgttttttatagtggttgtattattttatatttttattaatagtgtataattgttttaatttttttatatttttagtaatatttatttttttatttttttgagagtagttattttaatagatgtgagataatattttagtatcgttttgatttgtatttttttgatagtgatgttgagtacgtttttttatatttgttagttaattgtatgttttttttggaaaattatttgtttaagttttttgtttattttttaattttcgtttttgttatagatttgaagaagttttttgtatattttggattttaattttttgttagatgtatgtaaatatttttttttattttataagagaattttttttattttttattgttttttttgttgtgtagaagatgtttagtttgatgtagtttaatttgtttatttttgtttttgttgtatttgtttttggtatcgtatttaagaagtatttggtaagattaaatagattattttgttttgatgtttgagtagcggttgaggtaagttgtttagtgttgattaaattattatgtaaagtataaattttttttgaggtgataattatggttagatataatagttttttaaattatttttatttttttaaaattgtataaaatattaaatatataatttttattatatatgataaaagttataaagttttttttttgtgtttttttttttaggagttttatagttttaggttgtaatttaagtttttaattttatttgagttgatttttgtatataatataagggtttaattttatttttttatgtgaatatgtaatttttttaatatatatgttgaaaagatatttttatttttttatgattagttttgttgattgggttatgttattttttttttttaaaaataaatattatagaattagtaagtatttttattttttttttattgtgatgattttattttagttttaggatatatatgaagaatatgtaggtttgttatataggtatatatatgttatggtggtttgttgtatttattaattcgttatttatattaggtattttttttaatgttattttttttttagtttattattttcgtaataggttttagggtgtgatgtttttttttttgtgtttatgtgtttttattgtttaatttttatttatgagtgaaaatatgtggtgtttggttttttgtttttgtgatagtttgtggagaatgatggtttttagttttatttatatttttgtaaaggatatgaatttatttttttttatggttgtatagtattttatagtgtataggtattatattttttttatttagttttttattgataggtatttaggttggttttaaagggttaatatttagaatttataaggaatttaaataaatttataggaaaaaaataaatgattttattaaaaagtgagtaatggatatgaatagatattttttaaaagaagatatttatgtagttagtaaacgtatgaaaaaaagtttattataattggttattagagaaatgtaaattaaaattataatgagatattattttatgttagttagaatggcgattattaaaaagttaggaaatagtagatgttggagataatgtggagaaataggaatgtttttatatagttggtgggagtgtaagttagtttaattattgtagaagatagtgtggtaattttttaaggatttagaattataaatattatttgatttagtaattttattattggttatatatttaaaggattataaattattttattataaaaatatatgtatatatatgtatattgtggtattatttataatgggttatattatttttttggttataaggttattatatgtttggtatttttgttaagatgattttggaatagggaaatagaataaataatgttgatggattaagagaagattgattaaaaaaataaggagtagagtgttatgataattatattgatatggatttgattatttaaatatttttaaattaaattattatagaatgaaattttgttttttagggattgtttttttatataaagacgggtatgataatatttgttttatagaatttttaaagattagaaattaatgtaaattgattatgttaatatataaatattttatagatgttgattttttttttttaaagataaaataattttttttttttattttaattttagataaatattttttagtgtatgtgttatagtgtagtttttaaaattatgtttttgtttttattattaaatttgatttgaatataatgaaattatatggaaaagtaaagtaatttagatttttaagaagagaatgtaaaggatttttagtttttttatgtgagatttaagaataggggaaattataaatgtagaattaaaatttttttttgtagattatggaagttagattatttaagttgtatttatattggaatgaagtttggtatggatagttttattggtttgtagaaaggtttaagagtattttattattttttttttgtttgtttgttttatttttgtaagttagtttaaaataattatgtttatggaaaaagtttatttttttttgttttttattaaaattaatatttataataggatgatttatattatatatattagaagttagttatatttttaatttttttgtgatattattggtttgttaaataaggtattttaatttttgttttataaaatattaatgaatatattatataattttttttgttttttttatttaaatgattaagagtataattaaattagatttttaaagattaaattgttgaggttaggaataaaattttattttgtgaaagattttttagaaaaagttaggataattcgttgatttaaagattgtgaaaaatttgtagttgagttggatgaagttgttgagttgtattttttaaaaatatatgggttttttttttttaattttttatttaaaaattttatttttattttttaagttttattgagtaattttgaaagttagagttttttaaaattgttgagttatttagtatttgtaaaatttagtagttgttttagttgagtatgttttttaaagataatgtcgattgtgtatggttgatgggattttaggattaagtaagaggtttttttttttttttttatatatttaacgtttttatatttttatttgaattcgattggatagttttatttgaattatttttttttttttttttttttttttgatatattttattttgttaggttttaaatttttaggaaaaatggagtaatttttaaaggaaatcgtgagtatatattttttttttatgtaatttgttattaatattattaggaaagatgttttttttaaattttttatattattttttttaggaatattaataattatttggtttttaataaatagataattttaattattttttgtgaataataattttgagtttatgtttgtgtagtattaagatttagtaatgatttaagtcggtttttagagagaataagtagggagattgaagttaaataatatttagtaataacgtgagtttttatggaatgatttaattttatagttatgttagtaatggtaatttatagagtagtaattatatttaggaggaataatgggagattaaaatttaaattttatattaaatattttggttgaggtaagttagggaaaatggtatttatatttagaagaatgaaggtgaattttatggtgattttgttggatattgttataaataggttggtttttattttgggaaaaggatatttatatattgttttagagtaaaaggttttatattttaaaaataaattgtagatatgttaataatttgaaatttgtgataattgggtagaagatagttgaatttttgatttatagtgtttgtgagtaaagtaagtaaagagtaaatatatgagatttatttttaagtatgaaggaaataaaatttttaaattgttgtatatattattaattaaattaattgtaagttatttttaattatttattaaattaagttaaaaataataagtattttttaatatttttttagtttttgaaagtaataatattatatttttttttatttatcggaaattatgtgattttgttaatttaaatttgttttatgaatagtttaatataattatatttatagaatttaaatgttagtataaatttatgtaaaaagtgaggagagttttttggataattaagaatttttaatttaaatagtagttatgtttggttaaaaattacgtaaatatattatagtttttttgataatagtttttagaaattttaggatatttgaatataggtttaatatgagtaaatattttgatatatataagcggggtaatatgttaaatatttgagaattagtaattaatagaatttttttaatttgtagg

SEQ ID NO: 1718 - DNA, 6351 bp, Artificial Sequence
  chemically treated genomic DNA (Homo sapiens)
tttgtaagttaaaaagattttgttaattgttagtttttaaatatttaatatgttgtttcgtttatatgtgttaaggtgtttatttatgttggatttatatttagatattttgaagtttttagggattattgttagaagagttgtagtatatttacgtaatttttaattagatatagttattgtttaggttaaaaatttttgattatttagaagattttttttattttttatataaatttgtgttagtatttaagttttatagatataattatattggattgtttatggagtaagtttaaattagtaaaattatataattttcgatagataaaaagaaatataatgttattgtttttaagggttaaaaaggtgttgagaagtgtttattatttttaatttaatttaataaataattaagaatggtttgtaattagtttagttaatgatatatgtaatagtttgaaaattttgttttttttatatttaaaaataaattttatatatttattttttatttgttttatttataaatattataaattaaaagtttagttattttttgtttaattgttataaattttaaattattagtatgtttgtaatttatttttgaaatataaaattttttattttaaaataatatataagtattttttttttagagtgggagttaatttgtttgtgataatatttagtaaaattattatagggtttatttttatttttttggatatggatattattttttttagtttattttagttaaaatgtttaatatagagtttaaattttaattttttattattttttttaagtataattgttattttgtgaattgttattattggtatggttatagaattagattattttatggagatttacgttgttattaggtgttatttagttttaatttttttatttattttttttgggaatcgatttaagttattattgggttttggtgttgtatagatataagtttaaggttattgtttataaaaaatagttaaaattatttatttgttaaaagttaaataattattaatgtttttgggaaagatagtatagaaagtttaaaggaaatattttttttaataatattaatgataaattgtatggaagagaaatatgtatttacggttttttttggaaattgttttattttttttaaaggtttagaatttggtaagataaaatgtgttagagagagagagagagagagagaaataatttaaatggaattgtttagtcgaatttaaatagaaatatagaaacgttaagtatgtgggggaaaaaaaaaaaattttttgtttggttttagaattttattagttatatataatcgatattatttttagaagatatatttagttgaggtaattgttaagttttatagatattgggtgatttagtagttttgggaggttttggtttttaaagttatttaataagatttaaaaaatgaaagtaaggtttttggatgaaaaattagaaaaaaaaaatttatatatttttaggaaatatagtttaataattttatttaatttaattgtagattttttatagtttttaagttaacgaattattttggttttttttagagagttttttataaaataagattttatttttaattttaataatttggtttttaaaaatttgatttagttgtatttttaattatttaaatggaaggaataaaaaaagttatatgatgtgtttattaatattttgtaaaataaaaattaggatattttatttgataaattaatgatgttataagaaagttgaaaatatggttgatttttgatatatatggtataaattattttattgtaagtattaattttaatggagaataaaaggaggtagattttttttataggtatagttattttagattaatttataaaaatgaaataaataagtaaaaagaaaatagtgggatgtttttagatttttttataagttagtggggttatttatgttaaattttattttagtgtaaatgtagtttgaataatttaatttttatgatttataagagaagattttgattttatatttgtggttttttttgtttttggattttatatagaaaaattgagagttttttatattttttttttgaaagtttggattattttatttttttatatagttttattatatttaagttaaatttagtagtaaaggtaggaatataattttagagattgtattataatatatgtattgaggaatatttgtttgaagttgggataaggagaggaaattattttatttttaagagaaaagaattaatatttatgaaatatttatatattaatatgattaatttatattaatttttaatttttaaaaattttgtgaggtaggtattattatattcgtttttatatgagaaaatagtttttaaaaaataaagttttattttatggtgatttggtttgaaagtatttaaatagttaaatttatattaatatgattattatggtattttgttttttatttttttagttaatttttttttagtttattaatattatttgttttgtttttttgttttagaattattttagtaagaatgttaaatatgtgataattttgtgattaaagaaatagtatggtttattgtgaatagtgttataatatatatatgtgtgtatgtgtttttatagtagaatgatttataattttttgggtatatagttagtaatgggattgttgggttaaatggtatttatggttttagatttttgaggaattgttatattgttttttataatggttgaattaatttatatttttattaattgtgtaaaagtatttttatttttttatattgtttttagtatttgttgttttttgattttttaatgatcgttattttaattggtatgagatggtattttattgtggttttgatttgtatttttttaatgattagttatgatgagtttttttttatacgtttgttgattgtataaatatttttttttgagaagtgtttatttatatttattgtttattttttgatggggttatttgttttttttttgtaaatttgtttaagttttttgtagattttggatattagttttttggaattaatttgaatgtttattaatgaaagattggataaagaaaatgtggtatttatatattatggaatattatgtagttataaaaaaggatgagtttatgttttttgtagggatatggatgaagttgaaaattattattttttataaattattataaggatagaaaattaaatattatatgtttttatttataagtgggagttgaataatgagaatatatggatatagggagggaaatattatattttgaagtttgttgcgggggtggtgggttaggggagggatagtattaggagaaatatttaatgtagatgacgggttgatgggtgtagtaaattattatggtatgtgtatatttatgtaataaatttgtatgttttttatatgtgttttagaattaaagtaaaattattataataaaaagaaagtaaaaatgtttattaattttataatgtttatttttaaaaaaaagaaatagtatggtttaattagtagaattgattataaggaaataaaagtgtttttttaatatatgtgttggaaaaattgtatatttatataaaaaaatgaaattggatttttatgttatgtataaaaattaatttaaatgggattaaagatttaaattataatttgaaattgtaaaatttttggaaaaaaaaatataaggaaaaagttttatgatttttattatatataataagaattatatatttagtattttatatagttttaaaaggatggggataatttggagggttgttgtatttggttatggttattattttagggagggtttgtattttatatagtagtttaattagtattgaatagtttgttttagtcgttgtttaggtattagagtaaagtgatttgtttggttttgttaagtattttttggatacggtattagaaataaatgtaataaaagtaaaaataaataaattggattatattaaattaaatattttttgtatagtaaagaaaataataaagaataaaaaaagtttttttatggaatggaagaaaatatttgtatatatttaataagaggttaaaatttaaaatatataaggagtttttttaaatttataataaaaacgaaaattagaaaatgagtaaaggatttgaatagatgattttttaaagaagatatataattggttaataggtataagaaaacgtgtttaatattattattaggaaaatgtaaattaaagcgatattgagatattattttatatttgttaggatggttatttttaaaggaatagaaaaataagtattgttgaaaatatgaagaagttggaataattgtatattgttgatagaaatgtaaaatggtgtagttattgtggaaaatagtgtagtattgtttaaaaatgaaaaatagatttattatataatttagtagttttatttttgggtatatagttaaaagaattaaaattaggattgtaaggaggtatttgtatttttgtatttttatgtttatcgtagtattattaataaaagttaagaaatggaaataattgaaatgtttatgattgatgaaagtggtatgtatatataattgaaataatttagttataataataaatggaattttgttatatatgataatatgagtgaattttgatgaaattatgttaagtgaaataagttagttatagaaggataaatattgtatgatattatttataggaagtatataaaatagtttaattcgtagaaatagagtaaatagtgtttgttagaggttgagggaaggaaaaataggtattaagtaggtatgaagttttatttaagaaagatgattgaattttagagttgtgttgtataatatatcgtataagtgttaataatatagtattgtatattttaaaatgtgttaagaggatagattttatgttgttttttattatattagaaaaaaaaagtgtataagaattatagtgttttgtttgtttggttggttggtttttgttttgttttgttttgttttttgagttggagtttcgttttgttgtttaggttggagtgtagtggtatgattttattttatcgtaatttttgttttttaggtgtaagtgatttttttgatttagtttttttagtagttgggattataggtatgtattattatattcggttaattttgtatttttagtagagatagggttgaattatgttggttaggttggtttcgaatttttgattttaggtgatttatttgtttttgttttttaaagtgttgggattataggagtgagttatcgtatttggttagaattatagtttttagagtaaaattgtaatatggaggtatataggagatatttaggggaaagttttgatatataaaaattggtgagttttttgagtttttcgttattgtagatagtagagatttatgtaaagtttgttttgatagtattttggttgttgttttggtatttagtgatttaaaatttagttttattttgtatttaaagttttttgaaattaatattgattttttagtttttaagtattgtttatgattattagtgtatataataaggtatgtcgttgagatagaagaaagggtatgatggaaaagttttatattttggtggtttaatatttggatttttgattttttttttttatttttataattttttaagaatatttattggttttgattatatagagatttttatttaaaaggatttaggaaaaaaaatggatggtaaatattatggaagtataaaaggaagtataatttataaaattgtatgttttaaatgtttattaatgatagattggataaagaaaacgtggtatatatatattatggaatattatatagttataaaaaagaatgagtttatgttttttgtagggatgtggatgaagttgggaattattatttttagtaaattaaaagaaatagaaaattaaatattgtatgtttttatttataagtaggagttgaataaagagaatatatggatataggaagggaaatattatatattggggtttgttatggggtgaggggtaaggggagggagtgtattaggataaatatttaatgtacgcggggtttaaaatttagatgatgggttgataggtgtagtaaattatcgtggtatatgtatttttatgtaataaatttgtatgttttgtttatgtattttataatttaaagtaaaataaataaaataaaatgaataaaaattgtatgttatgttat

SEQ ID NO: 1719 - DNA, 6351 bp, Artificial Sequence
  chemically treated genomic DNA (Homo sapiens)
ttttttttgtttaaaggtagaggagttttattttatagtttataagaagtattgttggattattataggtatttatttaaggtagaaaggttattaagttagttggtggtgattgttgtttggtttgggatttattttttggggtagtgggtttttttgtggtttaggaaaggtttagaaatgttgttgaagagttaatttttggaattaagggtttttaagagtttgtttggtgttttatttttttgtggttgagttagtatttgaaattagttagttttagaggtttatttaaggtttttgatgtagtatttgggtattattgttggttatttagagttaaagggttttttagttagtaggtgatgaacgttgttatgattgggtttttttttttaaagtagtgggtttttttttggtttagggtgtttttaggaatgttatttggaagttagggtttggaatagggattttattattttgattggtgttatatttgttgtggttgagttggtatttaagatgtaaggtagagttttttttaattttttttttttttttttttaagtagtaggaaggggttttttttagagttgtgagttgtgtagtttgggattggggaggggtgatgttagtatttttttggttgttttagttggtgttttagtatattttgtattttttagtttattgtttttggttttagtttagtattaggatttgtttaagaattgtagtttttttggtttaaattgttttttaggtttagttagagatttagagtattttagtttttagtggtgaggtttgtgggaattgaaattttgattgttggaattagtgatttttttttggttgggattggtttgaatgttttttttatgtgtgggtattagttgaattttgtttggtttttttttttgttgtaataggataatattgagtttaatgttttattattgatgtgtttttttttatttagtgtacgaaaatgttttttgtattatattatagttgttagggtgtgatggaggggtggttttagtgttttaagattttttttgtaatttttttagtgttttttttagtaatataaagttaaaagtaggtattgtaagtgtttatttgagttttggtttttgtgaaggagttttgtttgtatagatagttgttaaattggtgtttttgttggggaaataattagtggagttttttattttattattttgttttattttttatagtattatatatttttttttttggttagttttgtttggatatttttgttataataaaattgtagttgtaagtatagtgttttttagagttttttaattttttttagtgaattattaagtttgaagggttagtggggatttttaaatatggtagttagttgtttagaagtataggtagtttacgtaattttgaatttgtagttgatgtttgaagtaaggatagtgttatggaggattatgtttttaatttttgaagtttggtttaattttagtagttgttgttaaaagttgatgtaatatgtttagtaattttaggaatgttggatattgtaaaggttatatttttatttgtttggatttaattgattttttttaaatagtgttggattgtgttaggttatttgtgagttattttgattttttgggggattgattttatgttttgttaagaagatagtttttattttatttaattttaatattttgtagattatttttattattaaattatggttttttgggattttttagttagttgttttttggagattataaatgattttaatatattttttatatgtaaattaattaatttagggtttatacgttttttaattattttttttattaggattttatattttgggttattatttttttgttttaattagttaggtttaggtaatagaaaagtaaagatagtcgttgtattttagagtttgttaaaagtatttaaacgagttaattttaagtttgattattttgttatgtttatttttttttgtagaaattatagtaaaggtttttgtttattttgattttttattttagttgttttttaatattggtgtttttttatgtggttttgggtggtgtgttgtgttttttgtttgtagggatttgtcgatataaatttttttttttacgatagttatttttgtgtttgtatatgttattatattgattaaaaagagtaagttttgtatgattttatttattcgaaatttaaaagtagataaaattaatttatggtgttagaagttagggtagtggtgttttttttttttgttttttttttggttttttttttgttttttttttgtttttttttttttttttggaaggaggatgtaaggaggtaggagtatagattttgatatgttgataatttgtattttgatttaggtgtagtttgtaagagggtgtttagtttgtgtaaattaattaagttgtatatttataattgggtattttttttttgtatgtaatatagattagttgtattattggttttaattttttattttttattatatttttgttttttattatgtaattttataaatagttttttattttggttttagaatttattatatgatttgatttggttaatataataaataggaagtaagggtgtgtttgtttttggtttgagtttgaagaggttttgtgtgttttttttattttcgtatttttgttattaatattatatagatatggtggagttagtttatttattttaggatgagagttttagttaagtttttttatttaaatatagtttggagttgggttttaatttgttatatagatgaatgagtgaatattgttaagataagttaagtttagtttagatttttgatttatagttaatttatagatgtataagttgaagatgattggttttattaagttaattgttataatagtggagaaaagattatgaggataaaaagtgggtagagtcggaagaaaagagaggaagaaattgagatagaagatattttatttaaaaaaatattttattgagttgggtttgaaatagtgtattgtttgtttttttaatgttgtatggtattatgaaatttattgtttattgagtttatgagttagttttttagggaggttatggtaattgaggatagggaagaggtaatatttaggaatatagaaggagaatttgggtttaagtgggtggagggaaaaataattgggtttagttttgggtagggttggttttgaggtttttgaaggatatgtaagtggagttttttagtagggagaaaacgtagagttaaagtttatatttttgttggtaatttagatttgggtatttttaataagtaggttgtagttgaggaagttgggattggatttgtattttaaagttagtgtaaaaaaagtttgaaacggttatgatggttaagatttggtttttttatgaaaaatgtttcggttagtatgagtgattttaaagtggtgattaattaaaaattgaagtatgattagtattaattataatttaatgggaatatgataaacgatttttggttagtaagtagagggtgttttgtagtgttaaagtattattatatattatgtgtgttaagaattaggagatattttaaacgggagtagatgaggggttgtgtttgttattggattagttggtttgatttagtagaagtggatggagatatattgaatggggtttttgggaggcgtgagttgaaggggaaggaagagaagagatttttaaagtaagggaagagtgaaaaatgagaaggattggggtggagttttaagtagggattagaggagaaaatagggataaagtaattaagggagatgggataggaagatgaaagaatgaggtaaatagtaggtgggaagaggaggttaatttaaaggagaaagtcgggtcgaagaaagaaggaagagaagaaaagaagggttgggaaatagaggaggaggtagttaagaaagtttggaagttgaattatagaacggaagaggtagaagacggaggggttggaggataatataaaggtgggaaacggaagagagaaagaatcgcgtttgcgtgtatgacggttagataggagtttagagaatagcggggtcgttaggttattatttgatgggttacggtttattggttttaggagttgggaaagggtattttaggaaagaagttttagattttagtttgagtttgggttattttaggggatcgggagtggggtggcgggagaggacgcgtagaatttcgatttttggttttaatttgtgtatgattattcgagtttagcggacgtttttttttgatttaggtaggcggtttagggacgcgtgcggggatgtagagagaaatcgttgaggaattagggtcgggagagattggtatttgtcgggggcgtgtggtggggtagagttggtattgatgttgagagtggttaaggagcgcggcgttttagagtagaagggttggtagacgtttagagagttaggatggtttagggtttaaggaaggttttatgttgggtgggagttgtgagggagtgaaagtgtatgaggaatcggaggagatggaaagattttggtttgggtgttcgagggtgggattgcgtggtgatcgacggtatagagggtgtgtgttggggcggaagaattattttagttgaatcgttttcgtggggtttttttttcgtgttttagttttagaagtatgcgtattagacgttaatagttgaggaataagttatggaaggatagtttaagcgggaggtgaatgtaaagtcgtggagagggcgggcgaattaagaaggttttcgttttttttcggttatcgcggttgtatttttgagaaaggggtattgttgcgaatcgcgttagggttggacgcggcgaggtgggaggtaggatggaggggcgggagttaaggtcgagggggcggatacgggtggcgtttggcgttttataaaggggttgcgggggtcgcgtttttttttgggagggtagcggttatcggcgaggaatacggcgcgatgtaggtttagtgttagtagagtttagtgttggtaggtagcgttattttggtcgtttttggggtattggttttgtacgtcgcgaagttttcggttacgggaagtatacggagagtttgaagtcggcggttattcgtttgttagttcgcgtcgtttggtttttgtaggagttgttttttttcgcggtgttcgcggggattttcgttcggtagttttttttttttttcgggttatttgggacggtatttttgggttttttttgtttatattatttttataggtagcgttttttttttgcgggcgtttagtgtagcgtattgttttgttttcggcgtttaggagcgtagcgtagagcgcgtatcgaggaacgttaaggaggtagcgtggggcgttgtgaggaacgcggaggttagtttgtttggcgtatttggcgggggtcggggtcggggtttggacgttagagagttgataagcggttgcggtatagacgtcgtttttatttttttaggattttattcgtttttagtagttttaaattttttggttgttcgagagaaagaggttttgcgggcgggaggcgatttggaaagtttaggttggggagatttattggataggattgttttttaattgcgcgtaggcggcggttatttgtggtatatcgcgtttcgtttcgtttttttttttttttttattttttttttgtagggtggggatagattagttttgggattttgggagagttttacgcgtttggtatttttcgagggaaatttagtttagaggtttttattgatttagtttttgtaggtttaaggaggaaggtgggtagagtttaaatttagattttatagatggggaagagaatatagtgagattttattgatttaagcgagggttttcgttttttaggttttttttaaaagggattaagtatattattaatttatttatttttttaatttttttgggatttgaaatgtgagtgggtaatttatagtttaaatgtttttttagatttaaaaaattcgggtttaggagaattttgttttttgttttgggaaggaaagataggaaagagattaagggatgttagggtttagagaaagattgtttagttttagtaaagttttatagggaaagggaagaacgaatatattgttaaattgtttattatgtttaatcgtttagtatttatggttttatttaattttgttgtaattttttgagagatatttattatgtttattttataaagaaattgaggttgagtaaggtta

SEQ ID NO: 1720 - DNA, 6351 bp, Artificial Sequence
  chemically treated genomic DNA (Homo sapiens)
taattttatttagttttagtttttttgtaaagtggatataataaatattttttaaaaggttataatagagttaagtgagattatagatattaaacgattgggtatggtaggtaatttaataatgtgttcgtttttttttttttttgtgagattttattgaggttggatagtttttttttgaattttaatattttttggttttttttttgttttttttttttagagtagaaagtaaagtttttttgaattcggattttttaaatttagaagaatatttgagttgtaagttatttatttatattttaagttttagggaaattggaaaggtagatgaattggtggtgtgtttggttttttttgggaggggtttaagaagcggggattttcgtttgagttagtgggattttattatatttttttttttatttgtgaagtttggatttgggttttatttatttttttttttagatttgtaaagattaaattaatgagaatttttgagttgagtttttttcgggagatgttaaacgcgtaagatttttttaagattttagaattaatttgtttttattttgtaaggaaaaggtgaaggaagaaagggaagcggggcggggcgcgatatgttataggtaatcgtcgtttgcgcgtagttaaggaatagttttgtttaataggtttttttaatttgagttttttaggtcgtttttcgttcgtaggatttttttttttcgagtagttagaggatttggagttgttgagagcggatgaggttttgggggagtgaaggcggcgtttgtgtcgtagtcgtttgttaattttttagcgtttaagtttcggtttcggttttcgttaggtgcgttaggtaggttggttttcgcgttttttatagcgttttacgttgtttttttggcgtttttcggtgcgcgttttacgttgcgtttttggacgtcgggagtagggtagtgcgttgtattgggcgttcgtaagggaaaaacgttatttgtggaagtaatgtaggtagaagaggtttagaagtatcgttttaggtggttcgaagagggagaggggttgtcgggcgaggattttcgcgggtatcgcgaaggaaggtagtttttgtaggaattaggcggcgcgggttggtaggcgggtagtcgtcggttttaggtttttcgtgtgtttttcgtagtcggaggtttcgcgacgtataaggttagtgttttaagggcgattaaagtggcgttgtttgttagtattgggttttgttggtattgaatttgtatcgcgtcgtgtttttcgtcggtggtcgttgtttttttagaagagagcgcggttttcgtaatttttttatggagcgttagacgttattcgtgttcgttttttcggttttggttttcgtttttttattttgttttttatttcgtcgcgtttagttttggcgcggttcgtagtaatattttttttttaaggatgtagtcgcggtggtcggaggagaacgaaggtttttttagttcgttcgttttttttacggttttatatttatttttcgtttaggttgtttttttatgatttgttttttaattattagcgtttgatgcgtatatttttggaattaagatacgggaagaaaattttacggggacgatttagttggggtggttttttcgttttaatatatattttttgtgtcgtcggttattacgtagttttattttcgaatatttaagttaaggtttttttatttttttcggttttttatgtatttttatttttttatagtttttatttaatataggattttttttggattttgaattattttggttttttgagcgtttgttagtttttttgttttggggcgtcgcgttttttagttatttttagtattagtgttagttttgttttattatacgttttcggtaggtattagtttttttcggttttaattttttagcggtttttttttgtattttcgtacgcgtttttgagtcgtttgtttgggttagagaggagcgttcgttgagttcgggtgattatgtatagattggggttagaagtcgagattttgcgcgttttttttcgttattttattttcggttttttagagtggtttagatttaggttaaagtttagggttttttttttgggatgtttttttttagtttttagagttaatgagtcgtggtttattaggtggtggtttggcgatttcgttgttttttgaatttttgtttagtcgttatatacgtagacgcggttttttttttttttcgttttttatttttatgttattttttagttttttcgttttttatttttttcgttttatgatttagtttttaggtttttttggttgtttttttttttgttttttaatttttttttttttttttttttttttttttcgattcggtttttttttttaggttgattttttttttttatttgttgtttattttatttttttatttttttgttttattttttttgattattttatttttgtttttttttttggtttttatttggggttttattttagttttttttattttttattttttttttattttggaggttttttttttttttttttttttaatttacgttttttaggagttttatttagtgtatttttatttatttttgttggattaggttagttggtttaatgatagatataattttttatttgttttcgtttggggtgttttttgatttttggtatatatggtatatggtgatgttttagtattatagggtattttttgtttgttgattaagagtcgtttattatatttttattgggttataattaatgttaattatattttagtttttaattgattattattttggaattatttatattgatcgaagtattttttatggaaaagttaggttttagttattatagtcgttttaagttttttttgtattggttttagagtataagtttagttttagtttttttagttataatttgtttgttgaagatgtttaaatttagattgttagtaaagatatgagttttagttttgcgttttttttttgttggaaaattttatttatatgttttttagagattttaaaattagttttatttaaaattaaatttagttatttttttttttatttatttggatttaaattttttttttatgtttttgagtgttattttttttttgtttttaattgttatagtttttttaggaagttggtttatagatttagtaaataatagattttatgatattatatagtattaggagaataggtagtgtattattttaaatttagtttaatggaatatttttttaaatgaaatgttttttgttttaattttttttttttttttttttcgattttgtttattttttgtttttatgattttttttttattattataataattagtttgataaaattagttatttttagtttatgtatttgtgggttggttgtgggttagaaatttgggttgggtttgatttattttaataatatttatttatttatttgtgtaataagttagagtttagttttaggttgtgtttggatggagaaatttagttgaggtttttattttgggatgagtgagttagttttattatgtttatataatgttaataataaaagtacgagagtagaagaaatatataaggtttttttaggtttaggttaagaataagtatatttttattttttatttattgtattggttaaattaagttatatggtggattttagagttaaagtgagagattatttgtaaagttatatggtaaagggtagggatatagtgggaggtagaaaattggaattaataatgtaattggtttgtattatatgtaagaagaaagtgtttaattataaatatatagtttggttgatttgtataaattgaatatttttttgtaagttgtatttaggttaagatatagattattagtatattaggatttgtgtttttgtttttttatattttttttttaggaaaaaaaaaaaaaataaaaaaaaagtaaaaaaaaaattaaaaaaaaagtaaaaaaaaaaaatattattattttgatttttaatattataagttaattttgtttgtttttgaatttcgggtaagtggaattatatagaatttattttttttaattaatgtggtaatatatgtagatataaaaatgattatcgtgaaggaaaaggtttatatcgatagatttttataaatagaagatatagtatattatttaagattatatggagaagtattagtgttaggaggtagttggagtgaggggttaaggtgggtaagagtttttattgtagtttttgtaggaaagagtgggtatgataaggtaattaggtttaggattagttcgtttgaatatttttagtaggttttggggtatagcggttgtttttatttttttgttatttggatttggttgattagggtaggagaatagtggtttagggtgtagagttttgataaaggaagtggttggggaacgtatgagttttgaattagttggtttgtatatgaaagatgtgttagagttatttataatttttaggaaatagttagttgggagattttagaaggttatggtttagtagtagaaatgatttatagagtattggaattaggtagaataaaagttatttttttaataaaatataaaattaattttttaaaggattaagatgatttataagtaatttaatatagtttaatattgtttaaaggaagttaattaaatttagataagtaagaatatagtttttataatatttagtatttttaaaattattaggtatgttatattaatttttgataataattattagagttgagttaaattttaaaagttaaggatatggttttttataatattgtttttattttagatattagttgtaagtttaaggttacgtaagttatttatatttttaaatagttggttattatatttaggaatttttattaattttttaagtttgataatttattaaaaaaaattaaagaattttggaaagtattatatttataattatagttttattatagtaaaaatatttaaatagaattagttaaaagaagagatgtatagtattatgggaggtggagtaagatggtggaatagaaggttttattgattgtttttttaataaggatattaatttaataattatttgtgtaagtaaagtttttttataagaattaaaatttaagtgagtatttgtagtatttgtttttaattttgtgttgttgaaaaaggtattgaaaaggttgtagaaggagttttgaagtattgaagttatttttttattatattttggtagttgtggtgtggtgtaaagagtattttcgtgtattgggtgagggagaatatattaatggtgaggtattaaatttagtgttgttttgttatagtaaaaaggaaagttagataaagtttagttgatgtttatatataaagggagtatttaaattagttttagttaaaggggaattattaattttagtagttagaattttagtttttataaattttattattgagggttgaagtgttttggatttttgattaaatttgaaaggtagtttaggttaaaagaattgtaatttttagataagttttagtattgaattagggttagagatagtggattgaggggtgtaaaatatattgagatattagttggggtagttaagggagtgttggtattatttttttttaattttaggttgtataatttataattttaaaagagatttttttttgttgtttgagaagaggagaggaaagagttgaggaggattttgttttgtattttggatattagtttagttataatagatatggtattagttagaataatgaggtttttgttttaggttttagtttttaggtgatatttttagaaatattttgggttagaagggaatttattgttttgaagggaaagatttagttatggtagcgtttattatttgttagttgaaaagttttttggttttgaataattagtagtgatatttagatattatattaagggttttgggtgagtttttgagattagttggttttaggtattggtttagttatagggaggtaaagtattaagtaagtttttgggggtttttgattttaagagttgattttttaatagtatttttagattttttttgggttatagggaagtttattgttttaaagagtgagttttaggttaggtagtagttattattagttgatttaatagtttttttgttttaaatgaatatttgtgataatttagtagtattttttgtgggttgtggagtgaggtttttttgtttttggataggggagg

SEQ ID NO: 1721 - DNA, 11805 bp, Artificial Sequence
  chemically treated genomic DNA (Homo sapiens)
ggaatagttaaataggaagtagatatatatggtaaggtttggggtaagggaaggatgtagaatttttatgtttatttttgtgaaatgtgggtatattatttttttagtatattagtttttgtttattaaggatgttttattgagtatcgatgaagaaagtttttatgaggttttattatatgggtatgattgattaaattattagttatatggttgaatttgattttaagtttttttttttttatggaaggttggtttgattagtttatttttttaaatatatagttggtttttttagtgattagtttttattttgaagttatttaggggtttatgttgttttattaatgtaataaagatatttttattttttaggaaatattacgggtttttgaaattttttgttgggtattatgtttaaagattaggtatttttttttataagatgttatagtattatattattttgtcgaattttgagtttatgtgtgtattatatttagtgataagaaggagagtaatttgggatatgttattttgttttttgttttttaaaatatgaatatgattttggtaaatttatataattaagtaggaaggtgttttggttgttaataatgttatttgttttattgttttatgttgtattttggaaagtatagttatagaagtataggaaaatttgagtagtttttgttgtagaaatattgaaagggtatgtttttagggttgttatttatattataatatgtaaaaggaagagtttatgaataagtaattttattttttttaatagggattataaggattatatttagagattattttttagatattttttatagatttaaaagtttattttgttgtttgttttagagaagtatttgaatatttaatattaaatatgttagaaaaatagaaattttgtttttagatgatatttttatttagtatttattatttttttttagaattttatttttttttgattatattttttattatttgtatatagtatatttattattttgattatagaatttattttaaagatttgtattatattttgtattataaatattgaggtttttatttttaaaatgtgttatgggaaagagaaattaattgtgtataattatttggtaaatggtttagaaagttaattttaatgatatttggttttaagtatgtattgttaattatataaaagtaatataaaagaggagataaaaatgataagatttggtttttatttttaagggaattaataatgtagttatatgtggttataatgaataatataaggaaaagaatttgaggggagagggaattttgaggtttggtttgggattttttaaattttattatttgggttttggtgtaggaaagtaagtttagtagaattatttgatattagatgttattttagtgttatttatttaataaataaaattaataagtagaagtagataggttgaagtgtaattagagtttgtttttatgaaagttgagggagagattagtaaagtttatgtaatgtaaagattagaaaaatataatattgtttattggaattggtaattaaggtattagtttttgagaagtatgttagtttttttaaagtgttttggatcgaaaggtagagataaaagttaaatttgaaaagaggataataataaataggagaataggtatttattgtaataggagttttaatttatgttgtatttagtaattatgaatttgtttttaatgattaatatgattattatatttttgatgttatttgagatttaggtttttattaatataagtaaatttatattagcgttttatttggaatattgatattaatatttcgaatataatttagattattgttttttttagttatatttaaaatgtgaggttttttatttttttatgtatttatttttatattattatgtgtttttttttttgagatttagttttttattttttttttttttattaaatttttttatatattatttggtattttatattttttgttaggggggaatgtttttagtttttttattttttatttttttaaatttatttttatttatattttttatttttaaaagataaaggaaatattttttgttgttagtaggttagttttaatttggatgttttaagtttatttttatttttttaagaaatttttttagttattttttttttttattgtatttttagttttttaaattgaattttttaatgttagtatttttttattgaaaaaggtaaaaagattttttttttaagttttatttttttttatttttttttatagtttataagtatgtgtttataaaagagtagtttagttgtgaagttttttttttattgtatatttttttgattttattgtaattaagttattttttatattattttattgtagttgtttttattagttatttttatttgttaaatttagtggttattttttagttttttatttattttttttttgattatttgaaattattaattatttattttttgaagtttttttttttgtagtttatgatattattttttgtcggttttttttaattttgtgtattttttttttcgtttttttttaaaaggttttttttttattagtttttaatggttaatatttattaagattttatttttagttttttttgtaatatataaatatgtttaagtaagtatgatttttagaataaaattttttttattttgtgtttttttttaagttatgatcgtatttgttaatatgtttttatggttttataggatgtttagatagttttttttttagaatataaagatagatcgagattttagaaatttttttttggagcgttttttttaaattttattagttttttagtttgttttttttgtttaaatttttttggattatttagatagtattattttatatttttttgtttatttatttttttattatagtatttaattataatttgttttttttgtataaatttttttggattattgagataatattattttatatttttttgtttatttataatatttttttattatagtatttaattatagtttgtattgtgattttatttttataaatgagtgtgatttttttgtgatgaggagaaaaaaaaattttttttttttttttttttttttttttttttgagatagagtttcgttttgttttttaggttggagtgtagtggtaggattttggtttattgtaagtttcgtttttcgggtttacgttatttttttgttttagttttttttttgagtagttgggattatagcgtttgttaatacgttcggttaattttttgtatttttagtagagacggggttttattattttagttagaatggttttgatttgatttcgtgattcgttcgtttcggttttttaaagtgttgggattataggcgtgagttattgtgttcggtttaaattttttttttttagtttttttaatgggagagaaattgtttttatgttttatatatagtatgtatttagtaaatgttggtttaagtttttgttggttgtgttgttttgttagttatggatagaagtttagtgtatcgaaataatatgatagattgaaggattttaataaatagtgatattgtagtaataatagtggtggattgatgaagaagtgataattgtggtttttttattagaaggataaagagggatgttgtttttagatagttagttttaggagttttagagttaatggaaggagtagagtgagggtagttatagatgatataaaatcgtaaatttaaaaatggtttaaataataaggatatatttatgatataataggaagtgtataagtagggtagttttaggtaattcgatattaaggatttaggttttttgttttttttgttttgttttttttatatattggtgtgttattttaaattggtttattttaaggtttgaagatggttgttattattttaggtattatttgtaaatgaaaatgttagaaggtagaaaagggaatatttttttttaagagtttgagtttttttttaagattgaagaaaattttaaaagtgtttttagttgatttattatgttatattggttagttatgatatatgtttaattttttatattagttatgtggtaaggagagtattatgattattgggtttgggttaagtagtagtagtagttgggaatttgtgataagtatatatgtttaggttttattgtagatttattaaattatgaaagaaatttagggtagtgtttgagagggttgatttattaatttatgttttaattagtaatttaagtaattttgatgtatattgagtttgagaattattggtttagagtaataaagatttattttttggggttagggaaaggtttagttttttttgaaggatatgaggttaagaagaggagaagagagaagggggaagaatgaatgttagataggtaattaaatatgtttatataattttttagggagtatgattttttttatttagtgttagttattattgttgttttttttttttttattttttgtgtgggttttaagatgttatattgatttatttgtttaatttttgaaggagtatattgtattttaaaaatgtgacgttttagttgtttttgattattatattattgtggttatgatttgtttgtttgttgtgaagggtttttagtttttttagattataaaaataggaatataaaataaaaatattttaaaaattgaagatattattggtagttattttaaagtatttagatatggttttttttttttattttttgttttttttgatttttttttaggatatttatattgattttgtattaagggaaaaattatggaatttaaaagatgtttttaaattaaaagagttaataatattttagtaaatttatattttgttttttttttgtaattttattgtgtttatttagttgtaataatattttgtttttttgttaggttttttaaagataaaaaaaaatggaggaatttgtaaattaaatgtagttattgaatgagaagtagatagttaatttttaggatggatatgtatggtaagttattgatatgaatcgattatatcggtttttatgtttcggttttgaaggtgggatttattatattaaagaatagaagttgggttttgaaaatgttgaagttttaattagattgattgaagatggtagaggatgtgaagtgatataagaaataaagttatttagttaagaaggtagaattataaagtaagagtttatgttttttgtatttgttatttgtttttagtgtttcgatataagtataaaataagtagtatttaaagttgtttttgaagtttgtcgtatttttatttatttttttatttttatttagtttaagaaagatttgaaggaaagtatgaaatgtggtatgtggggtcgtgtttttcggaaggttatagcggattggtataatgagaaaggtggtatggtttttgttttggtagttataaaatataaatagagaaatggttggttttataaagatttattaagattgttatattttaaattttttagtgaaggtaagtataagatttttattgggaagaagggtgggtaagggatatttaataaatagtaaatttttatttaatataagataagtgtgtaatattttttagaaatagttttttatttttaaaatatatattaatttaaatatatttaatgtttttttgggattatatttttattataggcgatttagatattaataattaagaattaaatgataggtttataggttaatattttgaattttaaaatgttatcgttttaattggaatgtttatttaagtgattttggattgtgtaagtagtaggggtaagattaaaagttgtaataagttttggatatgggtatagttattagaaggaattgtttttgagttttagttttgttagttatttattagatatttaaatttggttttagtataatcgtttgtaaaatttaggtaattgtatatagttgttttttaagattatgtatagaaaattattttgtaattaataaaatgttaagtagaaaagtaaaaaaaaaaaaaaaaagttgtaataagtaaattagttttttgttagtaggcggtagatggttatgttgtatttattgttttagtttattttttttttttttttttatttttttaggaatttattttttatggaatttaaaggaatatattagatatagtgttgaatttaataatttaggaagttaattgtttttaggtagttagttaggggatataataatttggggtagtttttttgtatttatggaaagagatttttgaaaagttagttggtttcgtaataattattagtttttttaagaaaagaaataagaaaaatttttgggtaggagtaatttgaagtgtgaagttttataaaaattaatatgtttaaaatttgattttttttttttttttgtatcggaagtgaaatttgaaaagatagttatttagaagggtgggtttatattttagttttgtggatttaagttaagtaagttaagttgagtttttgatttttatttattaaaaggagggtaaggagaataagtttataattattgagattaaatgttttagtatttaatatgtagtagaagtatattttggttttttattttttttttttatatatatttttatatatagaatttttttagtaatttttgatttattttttaattataattggggttttttaaatgaaatgtaaataataaattgtaaatatttatatgtataaatattttattttgattttattagattatatgttttaaaatagttgaataatatagaaaaatatgatgtagttttattttttaaaagaaataattgtatattagtagtttataatttttttgatattagggattggttttgtggaagatagttttttcgtaggtagtggggagggtagggtggttttagaatgaaattgttttattttagattattaggtattagatttttataaggagagcgtaatttagattttttatatgtttagattatagtaggattcgtgtttttatgagattaatgtttagttattgatttgataggaagtggagtttatttgtttgttgtttattttttgttgtgtagtttagtttttaataggttacggattggtattcgtgtatagtttgggagttgagggtttttgttgtatattagatgttgtaatttattttagattttttttaaatatatattattgtgttttattaaattttgttatatgttttttatgttttagtaaaaagtatattattgttattgttattgttgttttttttaggttagtagaaatagttgtatatatattattgtatgattgtaatttattagttagttttttattgataagagttgtttttggtttttttatattgttataaaaatattataatgaaaatatttgtatagagtatttatttttataatggttaaatttataaatagtatgtgaaagggattagtgtatttatatttgaatatttaattgttgttattattttttaattttttttagtagaattatgaaagattttttgaatttatatttttgggtagaagtttatttttgtatgtgttgattatatatatatatatatttatatattgtataatatagtatatataatatataatgttagtatatagtatagtatgtaatatatatatatttatatatatatatatatttatatatgtatgtatataattatatgtatgtatatataatatatatgtatgtgtgtgtatatatgtataattatataattatattatagtttttttgtttatttagttattgtttttttaattattgattgtgattattatttatttaataaatatttatttatttatttgttgtatttattttgagatggagttttatttttgttatttaggttggagtgtaatggtataatttaggtttattgtaatttttattttttagatttaagtaatttttttgttttagttttttaagtagttgggattataagtttttgtcgttatgttttgttaatttttgtatttttagtagaggtagggttttattatgttggtaatgttggtttcgaatttttgattttaggtgattcgtttgttttggttttttaaagtgttgggattataggtatgaattattgtgtttggtttttagtaaatatttattgagtatttattatggatagaaattgttttaagaatttggggtttatattagaggagttgataatgtattatttatatatagtgtatgtattttttttttttttttttttttgttttttttttttttggttgggggatatttttggtatattaaagttttgaattttaatgtagttaaatttatttatgtttttataggtttatgttttgtgttaggattagaagggttttttttaatttaaaatatttatttgtggtttttttttaatatttttttggttaagaaatattattttttatatttaaattttttatttaaatatttgatttaatataagaaggatttaggtatttagttttatttattggtttgttgagatgtgttttggaagtgtggagtaagtattagattaagagaaagatcgtttattattagttttaattggattaattagtttttgaatttgtgaaaataattattttgtgttttgtttttttggtttatataatgaggaattagtagatgttttttaaatttatttttatatataggattttttaatttgaaattgttgagggtagaatttatagttgaaattatgttagtaatagtaatattatattggatagagaatttttagtattttaaagtttaaaaatttggaaaaattttaagttatagaattaatagtattttaatgtttttaagtgtaatgtgtatttataatagataaaataagttaaaatgtgatttaagttattaggtatggtatttttattgtgtatttattgtatggttagcgtaattatagaatcgggtaggataaaattgttttaaggaatttttatttttattggaaaaataaaatagaagatatatttataggaaatatttatttatttaagatgattttgtattaaaatttggaagatagtaagagttataatatttgagaagtttttgtatgttagtgttaatttttgattaagttatttagtatttaaaaataatataataggtttagttggtatagagatgtgttttatgtggtttatataatatttttgggtaaaaatgaattttttgttattatttttaaaaatcgatataaaaatttatattttggttttttttgaaagtaagtttttttttttttggtagtattaagttaatacgtgtttatattatttgttagggtatattttgtttagttattatattttaataattttttattatattattgtgtttgtttgtttgtttgtttgtttgagatagagttttattttgttggttaggttggagtatagtggtacgattttggtttattgtaatttttgtttttttagtttaagtgatttttttgttttagttttttgagtagttggtattataggtatgtgttattacgtttagttaatttttttttattatattttaagttttagggtatatgtgtataacgtgtaggtttgttatatatgtatatatgtgttatgttggtgtgttgtatttattaattcgttatttaacgttacgtatattttttaatgttattttttttttttttttttattttataataggttttggtgtgtgatgtttttttttttgtgtttatgtgtttttattgtttaatttttatttatgagtgagaatatgtagtgtttcgttttttgtttttgcgatagtttgttgagaatgatggtttttagttttatttatgtttttataaaggatatgaatttattttttttatggttgtatagtattttatggtgtatatgtgttatatttttttaatttagtttattattgttggatatttgggttggttttaagtttttgttattgtgaatagtgtcgtaataaatatacgtgtgtatgtgtttttatagtagtatgatttataattttttgggtatatatttcgtaatgggattgtttggttaaatggtatttttagttttagatttttgaggaatcgttatattgatttttataatggttgaattagtttatagttttattaatagtgtaaaagtgtttttgtttttttatattttttttagtatttgttgttttttgattttttaatgatcgttattttaattgatgtgagatggtattttattgtggttttgaattgtatttttttgatggttagtgatgatgagtatgtttttatatgttttttggttgtataaatgtttttttttgagaagtgtttgtttatatttttcgtttattttttgatggggttgttttttttttgtaaatttgtttgagttttttgtagattttggatattagttttttgttagatgagtagattgtaaaaatttttttttattttgtaggttgtttgtttattttgatggtagttttttttgttgtgtagaagttttttagttgaattagatattatttgtgaattttggtttttgttgttattgtttttggtgttttagatatgaagtttttgtttacgtttatgttttgaatggtattgtttaggtttttttttagggtttttatggttttaggtgtaatatgtaagtttttaatttattttgaattaatttttgtataaggtgtaaggaagggatttagttttagttttcgagatggagttttgttacgttgggtatattgtttttaaatttttgattttaggtgatttatattttttggttttttaaagtgttagtattataggtatgagttatggtgtttggttttatcgtggtggttttatttattttatttgtttgttttttatagatattttaatgttgtaatttaatttttgttgttttatagaagtggtgaaattaagatttagaaagattattatttattggtagagtataggttagaatttagatttttttatttttaatttaaggttttttttttttttttttattggaagaaattgtggaggaaattaataagttattgtttttttttttttttttttttgagtagtaatattttttagttattaaaatatagtgtaaaagaagttattttgtttatttttatttatttttgttgtttttgtaaatatatatattttatttaatagtaaaaagagataagtgaatataattaatataatataatatattataatataatataatattaattgagatagatttgtattttcgtgagttgttttgagattatggatttgaaattttttaatgttggtgtttttaaaaagaaaagaaagaaaagtttttgtaataaaatatttaggatataggtttttttattttaaagttttatatttaaatagtaatgatggaataagaaaattaatttattttatttgtttaattgttatattatggaaagtagtattttagtgtaagggtattaatttttgtgtatttagttatgttgattatataatgtattttgaggaaatatgttttgtttttttatttggtaattttgtatgtttttttaattttttattttgttaaagg

SEQ ID NO: 1722 - DNA, 11805 bp, Artificial Sequence
  chemically treated genomic DNA (Homo sapiens)
tttttaataagataaagaattgaaaaagtatgtaggattattaagtaaaaaaatagaatatgtttttttaaaatgtattatatgattaatataattggatatataagagttaatgtttttatattgggatgttgttttttatgatataataattaagtaaatggggtgaattaatttttttattttattattattatttaaatatgagattttagagtaaaaaaatttgtattttgagtattttgttatagaggttttttttttttttttttttaaagatattagtattagaaagttttaggtttataattttagaataatttacgagagtatagatttattttaattaatattgtattgtattgtaatgtattatattatattaattatatttatttgtttttttttgttgttgaataaaatatatatatttataaaaatagtagaaataagtagaagtggatagggtagttttttttatattatgttttaatagttgagaagtattattgtttaaaaaaaaaaaaaaaaggaaatagtaatttgttgattttttttataattttttttaatagaagaaagagaaaagagttttggattgggggtgagaaagtttgggttttagtttatattttgttaataaatggtggtttttttaggttttagttttattatttttgtaaaatagtagggattggattataatattaaaatgtttatgagggataagtaaataaaataaataaaattattacggtgaggttaggtattatggtttatgtttgtaatgttagtattttgggaggttaaggagtgtggattatttgaggttaggggtttgagaatagtgtgtttaacgtggtaaaattttatttcgaaagttgaaattggattttttttttatattttatataaaaattaatttaagatggattaaagatttatatgttatatttaaaattataaaagttttagaagaaaatttaggtaatattatttaggatataggcgtgggtaaggattttatgtttaaaatattaaaagtaatggtaataaaagttaaaatttataaatggtatttaatttaattaaagagtttttgtatagtaaaagaaattattattagagtgaataggtaatttatagaatgggagaaaatttttgtaatttatttatttgataaggggttaatatttagaatttataaagaatttaaataaatttataagaaaaaaataattttattaaaaagtgggcgaaggatatgaatagatattttttaaaagaagatatttatgtagttaaaagatatatgaaaatatgtttattattattggttattagagaaatgtaatttaaaattataatgagatattattttatattagttagaatgacgattattaaaaagttaggaaataataggtgttggagaggatgtggagaaataggaatatttttatattgttggtgggattgtaaattagtttaattattgtggaagttagtgtggcgattttttagggatttagaattagaaatattatttgattaagtaattttattacggggtatatatttaaaggattataaattatgttgttataaagatatatgtatacgtatgtttattgcggtattatttataatagtaaagatttggaattagtttaaatgtttagtaatgatagattggattaagaaaatgtggtatatatatattatggaatattatgtagttataaaaaggatgagtttatgttttttgtagggatatggatgaagttggaaattattatttttagtaaattatcgtaaggataaaaaacgaaatattgtatgtttttatttataggtgggaattgaataatgagaatatatggatataggaaggggaatattatatattagggtttgttgtggggtggggggaggggggagggatagtattaggagatatacgtaacgttaaatgacgagttaatgggtgtagtatattaatatggtatatgtatatatatgtaataaatttgtacgttgtgtatatgtattttagaatttaaagtataataaaaaaaaattagttgggcgtggtggtatatgtttgtaatattagttatttaggaggttgaggtaggagaattatttgaattgaggaggtagaggttatagtgggttaagatcgtgttattgtgttttagtttggttaatagagtgagattttgttttaaataaataaataaataaataaatatagtgatgtaatagagagttgttagggtgtggtgattgaatagagtgtgttttgataagtggtgtagatacgtattgatttagtgttgttaaaagaaaaaaaatttatttttaagagaagttagaatatgggtttttatgtcgatttttaaagataatgataaagaatttatttttatttaaaaatattgtataggttatatgaaatatatttttatgttaattgagtttattatgttatttttgaatgttaaataatttgattaaaagttaatattaatatgtaggaattttttaagtattgtgatttttgttattttttagattttggtgtaaaattattttaaatgagtaaatgttttttgtgagtatattttttattttgtttttttagtgaaaataaaaattttttaaagtagttttattttattcggttttgtaattgcgttggttatgtagtgggtgtataataaaaatattatatttgatgatttgaattatattttgatttgttttgtttgttataaatatatattatatttaaaggtattaaaatattattaattttgtagtttagagtttttttaaatttttaagttttgaaatgttagggattttttgtttaatgtgatattgttattattaatatggttttaattgtgagttttgtttttaataattttaaattaaagaattttatgtgtggaagtaagtttaggaaatatttattaattttttattatatagattaaaaagataaagtatagaataattatttttataagtttagaaattaattggtttagttagaattagtaatgggcggttttttttttagtttagtatttgttttatatttttaagatatattttaataaattaataaataaagttggatgtttaagttttttttatgttggattaaatatttggataaaaaatttaaatgtaaaaaataatgttttttaattaagaaaatgttaggaaaaaattatagataaatattttaggttggaaaaggtttttttaattttaatataaaatataaatttatgaagatatggataaatttgattatattaaaatttaaaattttagtgtgttagaaatgttttttaattaaaaaaaaaaaagataaagaaaaaaaagaagaaaaaatgtatgtattgtatataaataatatattattaatttttttaatatgaattttaagtttttagaatagtttttatttatagtaggtgtttaataaatatttgttgagggttaggtatagtggtttatgtttataattttagtattttgggaggttaaggtaggcggattatttgaggttaggagttcgagattagtattattaatatggtgaaattttgtttttattaaaaatataaaaattagtagagtatggcggtaggagtttgtaattttagttatttgggaggttgaggtaggagaattgtttgaatttgggaggtggaggttatagtgagtttagattgtgttattgtattttagtttgggtgataaaagtgaaattttattttaaaataaatataataaataaataaataaatatttgttgaatgaatagtgattataattaatagttaaaaagatagtaattaagtggataaaagggttatgatgtaattgtataattatatatatatatatatatatatatatatattatatatatatatatataattatatgtatatatatataggtatatatatgtatataggtatatatatattatatattatattatatattaatattatatattatatatattatattatataatatataggtgtatatatatatataattagtatatgtaaagatgagtttttgtttaaaaatgtaaatttaaagaattttttatgattttattgaaagagattaaaaaataatgataatagttaagtgtttaaatgtgggtatattgattttttttatatattgtttgtggatttaattattatgaaagtaggtattttatgtaagtgtttttattgtagtatttttgtaatagtataaaaaaattagaaataatttttgttaataagagattagttaataaattatagttatataatggtatatatgtaattatttttattgatttgaaagaaatagtaatagtaatagtaataatatattttttattgaaatatagaaggtatgtaataaaatttagtgaaatatagtaatatatgtttaggaaaaatttggagtaaattataatatttgatatatagtaagggtttttaatttttaggttatatacggatattagttcgtggtttgttaggaattgggttgtatagtaggaggtgagtagtaggtaagtgagttttattttttgttagattagtagttgggtattagttttataagagtacgaattttattatgatttgagtatgtgagggatttaggttgcgttttttttatgagaatttgatgtttgatgatttgaggtggaatagttttattttgaaattattttgttttttttattgtttgcggaaaaattgttttttataaaattagtttttggtattagaagggttgtggattgttgatatgtagttattttttttgaagagtaggattgtattatatttttttgtattatttaattattttaaaatatgtaatttaataaaattaaaataaaatgtttatatatataaatatttgtaatttattatttatattttatttgaaaaattttagttatagttaaaaaataagttaggaattattgaagagattttgtatataaaaatatgtgtggaagggagaaatagagaattaaagtgtatttttattatatgttaggtgttgggatatttagttttaataattgtaagtttattttttttattttttttttaatagatgaaggttagaaatttagtttaatttatttggtttaagtttatagaattgaaatgtgaatttatttttttgagtggttgtttttttaagttttattttcggtgtaaaaaaaaaaaaaaagttaaattttgaatatgttgatttttgtggaattttatattttaaattatttttgtttaagagttttttttatttttttttttaaaaggattagtaattattacggagttaattaattttttaaaagtttttttttatagatatagaaaaattgttttaagttattatgttttttgattaattgtttgaagataattaattttttgaattgttaagtttagtattatatttggtatatttttttaggttttatggaagatgggtttttaggaagatggggagggaaaaaaggaatgggttagagtagtgggtatagtatggttatttgtcgtttattggtaaggagttgatttgtttattgtaattttttttttttttttttgtttttttatttagtattttattggttatagagtagttttttatatataattttaaggaatagttgtgtatagttatttaagttttataaacgattatattgagattaagtttgaatatttgatgagtaattggtaaagttggaatttaaaagtagttttttttagtgattgtatttatatttaaggtttattgtaatttttagttttgtttttgttatttatatagtttagaattatttgggtgagtattttagttaggacggtggtattttaagatttagaatattaatttataaatttgttatttgatttttgattattaatgtttggatcgtttgtggtaggggtgtaattttaggaaggtattaaatatatttgaattaatgtatattttgagaataaaaggttatttttagaaaatattatatatttgttttatgttaaataaaaatttgttatttattgaatattttttatttatttttttttttaatgaagattttatgtttatttttattggaaggtttaagatgtgataattttaatagatttttgtgagattagttatttttttgtttatattttgtaattgttagagtaagggttatgttattttttttattgtattagttcgttatagtttttcggagggtacgattttatatgttatattttatgtttttttttagattttttttaaattggataaaagtaaagagatgggtaggaatgcgataaattttagaaatagttttaaatgttgtttgttttgtgtttatgtcggagtattgggaataaatggtaagtgtaaagagtataggtttttgttttgtggttttgtttttttgattaaatgattttattttttgtattattttatattttttgttatttttaattaatttaattaaagttttagtatttttaaggtttaatttttgttttttgatataataagttttatttttagaatcgaaatataagaatcggtgtagtcgatttatgttagtgatttgttatatatatttattttgagaattggttatttgttttttatttagtggttgtatttggtttatagatttttttatttttttttgtttttaggaaatttaataaaaaggtaaaatgttattataattagatgggtataataaaattataaaaggaaaataaaatgtaggtttattgaaatgttattaatttttttaatttaaaaatattttttaagttttatagttttttttttagtataaaattaatataaatgttttgaagaaaaattaggaaaggtagaaaatgaaagaaaaaaattatatttgaatattttgaaatgattattagtaatatttttagtttttaaagtgtttttgttttgtatttttatttttataatttaaagaaattaaaagttttttatagtaaataaataaattatagttatagtggtgtgataattagaagtaattaaggcgttatatttttgagatatagtgtgtttttttagagattaagtaggtagattagtatggtattttgaggtttatatagagaataaaagaagggagggtagtaatagtagttggtattaagtaagaaagattatattttttgaagaattgtgtaaatatgtttggttgtttatttaatatttattttttttttttttttttttttttttttttggttttatattttttaaaggaggttaggtttttttttagttttaagggatggatttttattgttttaagttagtggtttttaaatttaatgtatattaaaattatttgaattattaattgaaatatagattggtgggttagtttttttaggtattgttttgagttttttttataatttagtaggtttgtagtgaggtttaagtatgtatatttattataagtttttagttgttgttgttgtttgatttaggtttaataattatggtgttttttttgttatatgattggtatagggagttgggtatgtgttatgattggttagtatgatatgataagttagttgagaatatttttgaggttttttttagttttaaaagggggtttaggtttttaaaaagaaatgtttttttttttgttttttgatatttttatttgtaagtgatgtttggagtggtaataattatttttagattttgagataagttagtttaagatggtatattaatatataaagagagtagaatagaaaaaataaagaatttgggtttttgatatcgggttatttgaaattgttttgtttatatattttttattatgttataaatgtatttttattgtttaagttatttttaggtttacggttttatgttatttgtaattatttttattttattttttttattagttttaaaatttttagaattagttgtttggaaataatatttttttttatttttttaatggaggaattataattgttatttttttattagtttattattattgttattatagtattattgtttattgaggttttttaatttgttatgttatttcggtgtattgggtttttgtttatggttaataaaatagtataattaataaaaatttaaattagtatttattgaatatatattatgtgtaagatatgaagataattttttttttattaaagagattaaaaaaaaaaaatttgggtcgggtatagtggtttacgtttgtaattttagtattttgggaggtcgagacgggcggattacgaggttagattaagattattttgattaaaatggtgaaatttcgtttttattaaaaatataaaaaattagtcgggcgtgttggtaggcgttgtagttttagttatttaggagggaggttgaggtaggagaatggcgtgaattcgggaggcggagtttgtagtgagttaagattttgttattgtattttagtttgggggatagagcgagattttgttttaaaaaaaaaaaaaaaaaaagaaagaaaaaaaatttttttttttttttattataggaaaattatatttatttgtggggatagaattataatgtaaattgtagttaagtgttgtagtagaaaagtattatgagtgagtaagggagtataaaataatattgttttaataatttagaaagatttgtgtagagaaggtaaattgtgattaagtgttgtagtggaaaagtgagtgagtaaggaagtataaaataatattgtttaaataatttagaaggatttgagtagagaaggtaaattaaaaaattgataaagtttagggaaggcgttttaggaagaggtttttgaaatttcgatttgtttttatattttagaaaagaaattgtttaagtattttgtagagttataaagatatgttgatagatacggttataatttaaagaggaatataagataaaagaagttttgttttgaagattatgtttatttgaatatgtttatatattataaggaaggttaaggatagaattttggtgaatattaattattaaaagttaatgagagaaaggttttttaaagagagacggaaaaggaggtgtatagagttgaagaaaatcgatagagaatagtattatggattataaggaagagaattttaaggagtgaatggttggtaattttaaatggttagaggaaaagtaaataaaaggttagaaaatgattattgggtttagtaagtaggagtgattagtgagagtaattgtagtagagtggtataagaagtagtttgattatagtgagattaggagaatatgtagtgaggaagaaattttatagttagattatttttttgtagatatatatttataaattatgaaggaaagtaaaagaggatgggatttagagaaaaaatttttttattttttttaatgggaagatgttaatattgaaagatttaatttggagagttgaagatatagtagagaagggggataattgaaggaattttttaaagaaatgagaatgagtttagagtatttaggttgagattggtttattgatagtaagagatattttttttattttttaagggtaaagagtataggtaaagatagatttgaaggaatgagggataaggaaattgaagatatttttttttgataggagatgtagaatgttaaatggtatgtggagaagtttggtagagaggggaggaatgaaagattgggttttagagaggggaatatatagtggtgtagggataagtgtatgggagaatgaagagttttatattttgaatgtgattgagggggatagtgatttgaattgtgttcggaatattagtgttaatattttaaataagacgttagtataaatttgtttatgttagtggaagtttaggttttaggtggtattagagatgtaatgattatattagttattagggataaatttatagttattgaatatagtataggttgaaatttttgttgtagtggatgtttgtttttttatttattattattttttttttaaatttggtttttatttttatttttcgatttaaaatattttaagaagattaatatgttttttaaagattgatattttaattgttaattttagtagataatgttatgtttttttgatttttatattatatagattttgttagttttttttttagtttttataaaaataggttttggttgtattttaatttgtttatttttgtttattagttttatttgttagatgagtaatattgaaatgatatttaatattagataattttattaaatttgtttttttgtattaaggtttaagtggtgggatttaaaaggttttaaattaaattttaaaattttttttttttttaaatttttttttttgtattatttattgtgattatatgtagttatattattggtttttttgaaagtagaaattaaattttattatttttgtttttttttttgtattgtttttatgtaattagtaatatatatttaaagttaaatattattaaagttgattttttgaattatttgttaaataattatgtataattggttttttttttttataatatattttgagaataaaagttttaatatttataatgtaaaatataatataagtttttaagataaattttgtaattagaatgataaatgtattatatgtaggtagtgaaaaatataattaagaaaaaataaagttttaaagaaaagtaatgaatattgagtaaaaatgttatttaagaataaaatttttgtttttttaatatatttaatattaggtatttaggtatttttttagagtaagtagtaaaatgaatttttaaatttatgaaggatgtttaagaggtaatttttaagtataatttttataatttttattagaagaaataaagttatttatttatggatttttttttttgtatgttatgatataaatgataattttgaggatatatttttttagtatttttgtagtagaaattgtttaggtttttttatgtttttgtgattgtattttttagagtgtaatataaaatagtggaatagataatattattagtagttagggtatttttttatttgattatataaatttattagggttatatttatattttaaaagatagaaaatagaataatatgttttaagttatttttttttttgttattgagtgtgatatatatataaatttaaaattcggtaaagtgatgtgatattgtggtattttataagagagagtatttggtttttggatataatatttagtagaaagttttaaaaattcgtggtattttttgagaaataggagtgtttttgttatattaatgaggtaatatgggtttttaggtagttttaggatgggggttaattattagaaagattaattatatgtttagaggaataaattggttaggttaattttttatgaaaggaggaggatttgagattaagtttagttatgtagttaatgatttaattaattatgtttatgtgatgaaattttataaaaattttttttatcgatatttagtggagtatttttggtgaataaaaattgatgtgttgggaaggtgatgtgtttatattttataaggatgggtatggaagttttgtattttttttttgttttagattttgttatatgtgtttattttttgtttggttgtttt

SEQ ID NO: 1723 - DNA, 7037 bp, Artificial Sequence
  chemically treated genomic DNA (Homo sapiens)
ttgttttattaagttttaaggaaggttggaaaaatgtagtttttatttttgattggttatatattttgttgaaagttataggtgattttattattatataggaaggagagagttaagagataagtgatagtatttgttataatgataaaattggtttaggttagtttgtaaattttttgttttagtttgttttgtgttgttataaatgaatattcgaggttggataattttttttaaaagaggtttatttggtttataatttcgtaggttgtataagaagtatgatatttattagtatttttttggtttttagtaagggtttttttgttgagttaaatatggtggaaaaggttaaagagaagtaggtatgtgtgaagaaagattaaatttgaggggtattttggtataataatttattgttttataataatttatttttatgggaattaatttatttttttgagagttaattagaagggaaagttattggttattataagaatagtattaagttatttataagggatttatttttatgatttatatataatttatagtatttttttagtaatatgtatttagttggtttttttttttttgaaatattttattttttagtttttatggtgttatatttttatagtattttttagggtttgtttattttagttgttgtataggtttttttttttttatttattatttaaaaaattcgaatgttagaggggttagtttgggatttttttatttttgttgtttatattttttttaggagagtttatataatgatatgatttaaaatgtttgttatatattaatagttttaaaatttatatttttaattttgatttttttaaatttatattaattgtttatttgatatttttattttgatgtttaataagtattttaatttgaaattgagggttaatttgatttggtttattaaatttaatttgttttatttgtttttagttaattttaaaagttatatatttaatagttaaaagttatgtagttaagtaatatatatataaaattttattagtttttttatagattatatatttgagatataggttattatggtaatggttgtttgttttttaggaatttagagttagtttttgtttagtttaagttagttgagattaataattttttaattgggtttgtatgagtgtttaatgggtgattttttggtattataggattaagagttttatttttagattatgttaaagttgtaattttgtggatatgtgttttatgaagagttatgaagtttgattatgtttgtgtatagtattagttgttttattgttttttattttaattatttttttttatgttttagattattttgtttttttatttcgtaaatattttaaaattttatttttgggagttggatttgagatttgtttttttgtttttttatttggttgttttatgaataaattttttttttgtagtaaaatttgatgttttagtgattgggtatattgtgtaataggtagaataagtttaatttagtaataaaattaaatttttaaaatagagtaatgttattattttagattaaatgtttttaatatgaggttgggagtagtaattagttttataattaagaagttgtttcgaaatgtaggtgggattttttattgttatagtgattgggggttgttatttatattttttttgaaatttttttttaaatttagtattatgtttgtgaaatttattaatgttaatttatgtagatttagtttattttttttattgtatagaattttattatttaattatattataatttaatttagttatttatttttttgtggtgaatatttagttgatttttagttttttaaatttataaattatattgttatgaatatttttttttttttttttttttttttagcgacggagttttgttttgttatttaggttggagtgtagtggtatgattttggtttattgtaattttcgttttttaggtttaagtaagttttttgttttagttttttaagtagttgggattataggtacgtgttattatgtttggttaattttcgtatttttagtagagacggggttttattatgttggttaggttggttttaaatttttgattttgtgatttattttttttagttttttaaagtgttgggattataggtatgagttattgtatttcgttcgaatatgtttgaatatgtttttttgtgtatagatgtgaatattgttttagagtataatttttttttttttaatgagatagagttttatttttgtcgtttaggttggagtgtaatggcgcgattttgattttttgtaatttttattttttaggtttaagtaatttttttgttttagtttttttagtagttgggattataggtatgtattattatgtttggttaatttttgtatttttagtagaaatagggttttattatgttggttaggttgggagtatattttttagagtggattttttgtattattagttatgtatattttaaattttaatagatattattaatttgtttttaaagtaattgtattaagtgtatatttagaaagatggttttttagtgtattgatttataaagttatgttatgagagatggatattagtatgagagagagtttttttttaggtattgtaaatgaaatatgaagttttttggtttgtcgttaggaatttattttttttagagggtgtgtttgtatggaattttgtttttggaagggaacgagggagaaaaagaaaagataagaaaagggttggatatggtggtttatgtttgtaattttagtattttaggaggttgaggcgggtggattatttgaggttaggagttcgagattaatttggttaatatggcgaagcgttgattttattaaaaataaaaaaattagttaggtatggtggcgggcgtttgtaattttagttatttaggaggttgaggtaggagaattatttgaatttgggaggtagaggttgtagtgagtcgaggtggtgttattgcgttttagtttgggcgatagagggagattgtttaaaaaaaaagaagaagaaagaaaaagataaaaaagaaaagataagaaagggagagtaaaggattagggatttgatgagaatatgaaataaatgttttttttgtcggtgtgatttttgataataggttgtattgtagttttgtttagatgttgtgggatatgaagaagtagttatatttgtttaggtggttttgtttttaggtagattttgatttttttttttatttttagtgttaagtttttatattaggatattaataggtatgtaataaatagttagttgaatggatgaatgagagtattttgatattgatattatttgttttgttaaatatatatatttttattgatttgattaaaataagaattaaggttttaattgtgtttggtataaaatagagagtagataaatattttttgagtggataaaagataatttaattaatttgaatttaaattatttgagtataattttgttaaatatgtttttttttattggttttaagaaaagaaaaaagagtttagagtagtttgaattatgtgaggtatgcggaatttattaggtatagagagatatgagtttgggattttagttatgtttttatatttttgtattagttagtttttatattgtaataaagatatatttaagattcggtaatttataaagaaaagaggtttaattgatttatagtttcgtatgtttggggagattttaggaaatttataattatggtggaaggggaagaggtatgttttatatagtggtaggtgagagggagcgagtaagagtagggaaaattgttttataaaattattaggagaatagtatgggggaaattatttttatgatttagttattttttattttgtgtgtggttttttttttttatatttggggattatggggattataattcgagatgagatttgtgtggggatatagaattaaattatattagtcgttatgtttggggggtaattgttttaagttattttgttttttattatttgttttatttatttttatgtttttcgaatttgtgatataaagaagaatgtatagttaattaatagtttgttattgtaatgtaagttatcggtaaataatttaggaattgtttttttttttttttttaaaagttatttgtaagtgttgttaattagagtatatatttagggtaatttgaatttatgtttttatgtggtagtttttaaatttggtttaaataaattgtttatttatattaattttgttttagtttttttttttaggttgataatattgtattaagttgaatatttatagtaattgtatgaattaggtagtatttattatcggttttatttatatttgaggaatagagaagttgaataatttgtttaagattatagttttatagtaggaggattattatttgaagtaggtagtttgattttagatatttagtttttatacgttgtattgtattgtttttaaaattttaagattttatggatttttgattttttttttaaattttatttgttttttttttttttttgagaattattataatacgatgtgtgtgtgtatttatatatatttttggaaaatatttgaaaaaaaatttaaagtattttatatgaatggagggttaaaggaagggttggggtatagacgtcgtttagaaatatttaaaaataaatgtttatattaatataaattagtagttatttttttataatttggagtattttttaatttaatttgtttgggattgagggcgggattttagggtttttgggaggtttcggtagtcgcgtatgtttagagtatagggatcgttttatttcgttcgtggttttgtttatttaggtcgtaagagttgtcgggacggtttttatttttttggagcgttttaggttggtcggcggcgttgggaggtggagtcgttgttgttgttgtttgtgagtttgtggcgcggtttttgtgggtcggaattttaaaggtgagtaattttcggtggttaatgagaagttataaaagggttcgttttgttggtgcgcgattgcgcgttttcgttttttattgtttttcgcggcgttcgttcgtttttcgttttttttacgtttaggtcgagcgtcgcgtgggtcgtagtcggaggcgcggagtcgagggggcgcgggcggcggcgaggttgttttcgcgaggaatgcgggattttgggtttttcgtacgtggttggtgtttaggtagtttcgcggttgtttagagacgggattgtggttgtttttatttttattgcgttttttttttttttttttttttttatttttatcgttttttagttttatcgaaggtttgtggttatttttgtaaagtttttggggaggtgggtacggggtaaacgtcggagggttttgtggagtttatgggattgattggaggttaaagaattttgggtcgtagatgtatattagcgttatttttttggtttgttagggtttttatcgtttatattaggttttagtgtgaaacgggaaaacgtgggtaatattttatttatagtcgtatattttggaaaagtatttgatgaaacgtagttttaaaattaggttaaataggttttgtagggtttaaatagttattttattttatcgtttgttttgtagggggttttagattacggtagtaatttaggagtgtagattgtgatagataagataatgtataaaattgagtaatttttttagggggatgtggattatatagtatttcgttgtaagtgttttttatgtgtatttatggtatcgaatgtaattgtagtgtgttaggggatgtttttaggaagtgtatttatattagtttataattagagttaattaatggtaatattttcgatgatttgtttatataatttttgtatagttgggatgattgggtggtttagtagagttttggaggtaagtattttgtaagtagaagatttggtttgtaatttttagtaaattaatagtatagttttttttttttattgtagtgttaatgttaggaatacgaaataggaaattggttatttaatgtattagtaaattagtaggtatattttttagtttaatgttgtgttagtatgattatatttttttatttttgttttcgtatgttttttagtatagagtatttaaggaattgtaatattttttattttaaagttatgatgtttaatttggtaataaggtttgggtaagttagttgtgattatattttaaaagaaatgaggtcgggcgcggtggtttatatttgtaattttagtattttgggaggtcgaggcgggtggatcgttagaggttaggagtttaagattagtttgattaatatggtgaaatttcgtttttattaaaaatataaaaattagttagtcgtagtcgtggtggtgggcgtttgtaattttagttatttaggaggcgaaggcggaatcgttggaatttgggaggtagaggttgtagtgagtcgagatcgtattattgtattttagtttgggtaataaaagcgagatttcgttttaaaaaaaaaaaaaaaaaaagaggtgaatttatattaaataaatgtatagagagttatggtaatatatagatagatagttatttgtttaaaattggaaatggttggtaagtgattggagtttttttttttaaagtttgtttgattagttaagtgaagataaatagttttttgttatagaagatggggtagtgatttattgaaagataagttttttatagtttttagatttttttattatttattttaaagtgttgttttgttgagatatttgagaattgagtaaagaaattgaattcgtgaaaatagaaatttttgattttttaagaaaacgggatattaatattttgtaaatattatttttttatttttgagttttatataaaaaataattttatgttaatttgggaaattttataga

SEQ ID NO: 1724 - DNA, 7037 bp, Artificial Sequence
  chemically treated genomic DNA (Homo sapiens)
tttgtaaaattttttaaattagtataaagttattttttatataaaatttaagaatagaaagataatgtttataaagtattaatatttcgtttttttaaaaaattaagaatttttatttttacgggtttagtttttttatttagtttttaaatattttaataaagtaatattttggaataagtgatgaaaaaatttaaaaattataaaaaatttgttttttagtaaattattattttattttttataataagaaattgtttatttttatttagttggttaagtaagttttagggaaaaaaattttaattatttattaattatttttagttttaaatagataattatttatttgtatattattatggttttttgtgtatttgtttggtatgggtttatttttttttttttttttttttttgagacggagtttcgtttttgttgtttaggttggagtgtaatggtgcgatttcggtttattgtaatttttgttttttaggttttagcgatttcgttttcgttttttgagtagttgggattataggcgtttattattacggttgcggttgattaatttttgtatttttagtagagacggggttttattatgttggttagattggttttgaatttttgatttttggcgatttattcgtttcggttttttaaagtgttgggattataggtgtgagttatcgcgttcggttttattttttttaaaatgtagttataattgatttatttaaattttgttattaagttagatattataattttaaggtgaaaaatgttatagttttttagatattttatgttaaggaatatacgaaaataaaaatgggagaatgtggttatattaatataatattaaattggggagtatgtttattaatttattaatatattggatagttagttttttgtttcgtatttttgatattagtattgtaatgaaaaaaggaagttgtgttattagtttgttagaaattataaattaagttttttatttataaagtatttgtttttaggattttattaagttatttagttattttaattgtataaaagttatgtgaataaattatcgagaatattgttattagttgattttagttatgaattgatgtaggtatattttttggaagtattttttgatatattgtaattgtattcgatattatggatatatataggaagtatttgtaacggggtattgtgtgatttatatttttttagagaaattatttaattttatgtattgttttgtttattataatttatatttttaagttattatcgtgatttagggttttttataaagtaaacgatgaaataaaataattatttagattttgtaaaatttatttggtttaattttggaattgcgttttattagatatttttttagaatgtacgattgtaaatgaaatattatttacgttttttcgttttatattgaaatttgatgtgagcgatgaaggttttaatagattaaaagagtgacgttggtgtatatttgcggtttaaagttttttggtttttagttagttttataggttttatagaatttttcggcgtttatttcgtgtttatttttttagaaattttatagagatggttataagttttcggtgagattagaaggcggtggaggtaaaaaaaaaaaaaaaaaaaaaagacgtaatggggatgagggtagttatagtttcgtttttaagtaatcgcggaattgtttgggtattagttacgtgcggggaatttaggatttcgtatttttcgcgggggtagtttcgtcgtcgttcgcgttttttcggtttcgcgttttcggttgcggtttacgcggcgttcggtttgaacgtgaggaaggcgaggggcggacggacgtcgcgagaagtagtaaagaacggaaacgcgtagtcgcgtattagtaaagcggatttttttgtagttttttattagttatcgagagttatttatttttaaggtttcggtttatagaagtcgcgttataggtttataaatagtaatagtaacgattttattttttagcgtcgtcggttagtttaaagcgttttaagaagatggggatcgtttcggtagtttttgcggtttgggtgggtagggttacggacgaggtggagcggtttttgtgttttgagtatgcgcggttgtcggggttttttagggattttggagtttcgtttttaattttaaatagattgggttaaaaagtattttaggttgtaggggaatggttgttagtttgtgttagtataaatatttatttttaagtatttttggacggcgtttgtattttagttttttttttggttttttatttatgtgaagtgttttgggtttttttttagatattttttaaaaatgtgtgtgaatatatatatatatcgtgttgtagtagtttttaaaaaaaaaaaaaggataagtgaaatttaaaaaaaaaattaaagatttatgaaattttagagttttgaaaataatatagtatagcgtgtaaaaattgggtgtttggaattagattgtttgttttaaataatggtttttttgttgtgaaattgtgattttggataagttgtttaatttttttgttttttaggtataaatagggtcggtaataaatattatttagtttatataattgttgtgagtatttaatttgatgtaatattgttaatttaaagggaaaaattgaggtaaaattaatataagtagatagtttatttgagttaagtttgaggattgttatatgagagtatggatttaaattgttttgaatatatgttttgattagtagtatttataagtagtttttaaagaaaaaagaagaggtagtttttaaattgtttatcgataatttatattataataataagttattgattggttatatatttttttttgtattataaattcgaagaatatgaaaatggatgaagtaggtagtaagggataaagtgatttgaaataattgttttttaagtatggcgattgatatagtttggttttgtgtttttatataaattttatttcgaattgtaatttttataatttttaagtgtggaggggaggaattatatatagggtgggaggtgattggattatggggatggttttttttatgttgtttttttggtggttttatagggtagttttttttgtttttgttcgtttttttttatttgttattgtgtaagatatgttttttttttttttattatgattgtaaattttttgaggtttttttagatatgcggaattatgagttaattaaattttttttttttatgaattatcgagttttgggtatgtttttattgtagtatgagaattaattaatataggggtgtagggatatgattgaagttttaaatttatatttttttgtgtttgataaatttcgtatattttatatagtttaaattgttttgggtttttttttttttttttaaggttaatgagaaaaaatatatttaatagggttgtgtttaggtagtttaaatttaaattaattagattattttttatttatttaaagaatatttatttattttttattttatgttagatataattgaaattttaatttttgttttgattaagttagtgagaatatatgtatttaatagaataaataatattagtgttagggtatttttatttatttatttagttaattgtttattatatgtttgttaatgttttggtatggaggtttaatattgggaatagaaagaagagttagaatttgtttagagatagagttatttaaataaatataattgtttttttatgttttataatatttgggtagaattgtagtatagtttattattagaagttatatcggtaaaaaaaatatttattttatgtttttattaggtttttggttttttgtttttttttttttgtttttttttttttatttttttttttttttttttttttttttagatagtttttttttgtcgtttaggttggagcgtagtggtattatttcggtttattgtaatttttgttttttaggtttaagtgatttttttgttttagttttttgagtagttgggattataggcgttcgttattatgtttggttaatttttttatttttagtagagttagcgtttcgttatgttggttaggttggtttcgaatttttggttttaggtgatttattcgttttagttttttaaagtgttgggattataggtatgagttattatgtttaattttttttttattttttttttttttttttcgtttttttttagaagtagagttttatgtagatatattttttgaggaaaatgaatttttggcggtagattaggaagttttatgttttatttatagtatttaggagaggatttttttttatattggtatttattttttatagtataattttgtaagttagtatattaaaagattatttttttgggtatatatttagtataattattttgagaataaattgataatatttattaaagtttaagatgtgtatagttgatggtgtagaaagtttattttaaagaatatatttttagtttggttaatatggtgaaattttgtttttattaaaaatataaaaattagttaggtatggtggtgtatgtttgtaattttagttattagggaggttgaagtaggagaattgtttgaatttgggaggtggaggttgtagagagttaagatcgcgttattgtattttagtttgggcgataagagtaagattttgttttattaaaaaaaaaaagattatattttagagtaatgtttatatttgtatataagaaaatatgtttaagtatattcgggcggggtgtagtggtttatgtttgtaattttagtattttgggaggttgaggagagtagattataaggttaagagtttgagattagtttggttaatatggtgaaatttcgtttttattaaaaatacgaaaattagttaggtatggtggtacgtgtttgtaattttagttatttgggaggttgaggtaggagatttgtttgaatttgggaggcggagattgtagtgagttaagattatgttattgtattttagtttggatgatagagtaagatttcgtcgttaaaaaaaaaaaaaaaaaaaaaagaatatttatagtaatatggtttgtaaatttagggaattggaaattaattaaatgtttattataaaagaatgggtaattaaattaaattgtgatataattaaataatgaaattttatatagtgagaaaaataaattagatttatatgaattgatattgataaattttataaatataatgttgagtttaaaaagagattttagaagaaatataagtagtaatttttagttattgtgataatgaaaaattttatttatatttcgaaatagttttttaattatgaggttggttattgtttttagttttatattaagaatatttagtttagggtaatagtattgttttattttgaagatttggttttgttattgaattgggtttgttttgtttgttgtataatatgtttaattattgagatattaaattttgttgtagagaaagggtttatttatgaagtagttaagtgaggagataggagaatagattttaaatttagtttttaaagatggggttttagggtatttacgggataaaggagtaaggtggtttgaggtatggggaaaggtaattggggtaagaaatagtgaggtaattggtgttgtgtataagtatagttaagttttatagttttttataggatatatgtttataaaattgtagttttagtatgatttgagggtggagtttttggttttgtgatgttaaaaggttatttattggatatttatgtaggtttagttgaagagttgttggttttagttggtttaagttggataagagttaattttaagtttttgaaaaataagtaattattattatggtgatttatattttagatatgtaatttgtaaggaagttaatggaattttatgtatatattgtttagttatatgatttttagttattaaatatgtagtttttaaaattaattaaaaataaatgagataagttaagtttggtgggttaaattaggttagtttttagttttaggttgaaatgtttattagatattaaggtaaagatgttaagtaggtagttggtatgagtttgaagaagttagggttaaagatataaattttggaattattagtatatagtagatattttaagttatgttattatatgagtttttttaaaaagagtatagataataaagatgggaggattttagattgatttttttagtattcgaattttttggataatgaataaaagaagagaagtttgtatagtagttagaataagtagattttgagaggtgttatgaaaatatggtattatagaagttaaagagtggaatgttttaaggaaggagggattaattgagtatatattgttgagaagatgttatggattgtgtatgggttatgaggatggattttttatgagtggtttggtgttgtttttgtagtagttagtaatttttttttttgattggtttttagaggaatgggttagtttttatgagaatgggttgttatgaaataatgggttgttatattagggtgttttttagatttggtttttttttatatatgtttgtttttttttgattttttttattatgtttgatttagtagaaaagtttttattgggagttaagaagatgttggtgggtgttatgttttttgtatagtttgcgaaattgtgagttaaataaattttttttaaaaaaaattatttagtttcgggtatttatttatagtaatataaaatagattaagatagaagatttgtaagttgatttaaattaattttgttattgtggtagatattgttatttattttttggtttttttttttttatataataataaaattatttgtggtttttaataaaatgtatggttaattagaaataaaaattatatttttttagttttttttgaagtttagtaagataa

SEQ ID NO: 1725 - DNA, 6082 bp, Artificial Sequence
  chemically treated genomic DNA (Homo sapiens)
gagattgtgtggttttggttaagttttaattaaatttttgtttgtaagtagaagaaatgattgttgttgttttaagatgttaaatttgtaatttgtagtgtttaattttttttttttttttttttgagatggagtttcgtttttgttgtttaggttggagggtaatggtgtgatttcggtttattgtaatttttatttttcgtgtttaagcgatttttttgttttagttttttgagtagttgagattataggtatgcgttattatgtttagttaattttgtatttttagtagagatagggtttttttatgttggttaggttggttttgaattttcgattttaggtgatttgtttttttcggttttttatagtgttgggattatagacgtgagatatcgtgtttaggtataatagatatttgtaatatatattatattattaagtgttatataatagaggtagttaattaataaatggattaataaatatttattatgtgtttattattagttaggtattgagttaggaaaggtttttaagaagtaaaatttaagcggaagtttagaggagatttaggatttaaatagagtaagagtaggaaaagtagaaagagttgtttgtttgaagatataaaaagtatgggggcgaatgttagtagtttagaaaggttaacgtagagggtaggagaaaaaaaattgcgaagagatgagttattgagaggttagtttattaaggaggtaatgttaaagaaggggggtttaattttgaaggtaaggttattttgtatatttgtaattatataattaatttaattttttatttaatgattattttttttaaaggttgtattttaaaaaggttaaattttatagagtttttatttttataattttagtatttaaaatgttatttggtatacgtgggagttaatatatatttgttgaatgattgagtaattgaagaaattttataagaattttaaggaaatgatatataattagatttgtgtattagaaaaattattttggcggtaagatagagaatggtttagaggtaatagttgtattagttagtttaggttgttataataaaatattagagtgagtgatttatataatagaaattaatttttttgtcgttttaaaggttggaagtttgagattagggtattagtatggttgggttttggcgagggtttttttattggtttgtagatagttgttttttcgttatatttttatatggtagagagagggagagatagtaagtaatttagtgttttttttataagggtattaattttattagtaaggtcgtagttttatgattttatttaattttaattattttttaaagattttgtttttaaatattattatattgggtataagggttttaatatttgtatttttgaggatataatttagtttatagttgtaggaaaggagaaaagatagtaggaggtgaatgtagtaatttgtttaagagatgagggtataaattaaagtagtgataatgtagaggaagaggaaagattgagaaatagtaattatttttatttgggttggaattattaaattgttaaaaatttttttaggatatttttttttttgaatttgaaaattatagattttttcgtgtagtaattttatttgtatattagttttttgttttttgttttgtttttttgtttgttttttttgttttttgagatagagtttttttttgtcgtttaggttggagtgaagtggttcgatttcggtttattgtaatttttatattttaggtttaagcgatttttttgttttatttttttgagtagttgggattatagttgtttattattacgtttagttaagtttttgtatttttggtagagatcgagtttcgttatgttggttaggttggttttaaatttttgattttagatgatttatttgttttagttttttaaagtgttaggattataggtatgagttattatatttggttagtatttttgtttttaatgtagatgaatttttaaaattaaattgagaataaagggatataatatttaataaataattatagaatttattaaatatataatattatagaaatattttaatatgttattgatatgtagtttttaaaacgttttaaaaattgtggtaatattaaaagtgaaatttatagaattttagtattttaaagggataataagggacgttaattataaaatataaagtattttattttttatgtttgttttttaagttaaatattaaaaattttatatttaaaaaatgtttattatttatatagtatattaattatcgagatttttttgtttttatagttaaagttattttaggttagaatgtacggatattgtttttaatattagtatgtattatttttagtgtatatatattgataattaaggtttgaatagtttgtgttttggtttattgttggtaatagagtaatttagttcggagtatagaatatgtataaatgtatttttattaatatttggttttgatatatttagtttgagttattaatatttggtttaggtatttatgataatggtttaagatattgtttaggattttaaggtaaataagttgttatttaattttgttagtttagtaattaaagtatatttttgagagggaatgttttgattttcgtattagtcgtgatattttcgaataattttatatttgttataatgaaatataagtacgtttttggtattggttttttaaaatattaagaaattggtggtattaatatattatttttgatattgttgtattttaatattttttttgtttttgaaaggaatatacgtttattattaaaatattttgaataataaaatgtataaagaataaaaatattgtttagaattttgttatttagagataattatgttataatatttttatgtatttttttttagatttttaaaattgtgggtatttgtaattttataaggtttgtaatttttttttgaaaatttgtgtatttagatgtttatgtaaatatgaatttgtattatgtattttaaatggttgtgtagtttttatattttatgtattatgatttaattgattagtgtaaattatagtgattagttatatttatttagtgtttattttatgttaggtattgtaataagcgttttgtttgtattaatttatttgatttttataattttattatttttgttttttatatatgaggaaattgagatattaagaggtgaagtaatttgtttaattatttaatgtgggatatttaatggttggtaatgttttgattttttagataatgttgttatgtatatttttgtttatgttttaaaagaatgtttttaggattaatttgtcgaaatggaattgttgggttttaaggttttaaaaatttttttatatgtttttaaatattttttttaggaagattatatagtatttatattttatttaatagtatgtgagtgtttgattttttatatttttgattttttgtaatttttttttttttttgagacggagtttcgttttcgggtttaaacgatttttagttttagtttttcgaatagttgggattataagcgcgtattattacgttcggttaattttttgtatttttagtagagacggggttttattatggttaggttggttttgaatttttgattttaggtgatttgtcggtttcggttttttagagtgttgggattataggcgtgagttatcgcgttcggtcgattttttgtaatttttatttaaatgataaaatattatttaattgttattttaatttgtatattttatttttagaggtgggattttatttttaatgaatttttaagtattttttgattattatgtattaattttgtgttgatatgttaatattagtttttacgttatatttggagatgtcgtaatttgcgggataatttttatttacgtataagatgtgtttattaagtttgttttaagtgggacgtaatatttttagtagatgttttttaaaatttttttattatatagagaataatttttattggttaattaaatttataagtaaaataaataaattaatattttgggttgttaggaattatttattgattaatttttagttttagtttttttttgtttttttttttttgtttagtttagggaggttattttgggttgtgaaagatatgttattaattattatagttgttgagtgattgtacggttagttagtaggtgttaacgttttgttagaagagttgtttgtagattttaaagtcgggcgtttagggattttcgggaaggagttagcgttattttagttttttcgagggatacgcgcgttttgaatattttttttttgggatttaggttaattcgtttagtttttatgattttattcgagtaagtttgttattttacgtagttaattaaattgtttatttagaagatgatttaaaggaatttttatttttttttagagggaatataaggttatgataatcgagagagcgagaggaaaaaaggcgtatagttcgattcgaatttaatttgtttttttttttttggtttttttagttatttttggggttgttagtaggttttagtacgtttgaaggatttcgttttacggagatttttagttaagggaaaagtagaaaatataagaattaattttatttttatgtgtgattaattaaaagaggagttaggtagaggggattttttgtttagtttttatcgatggggtaggttcggggtagttttgagataggtagcgttaaggtcgtttagattttcgataagtttcgcgcgggggttttttcggttttttgttgttgtcgtcgtcgtagttgttgtcgcggttggtggggttgggtgagaggaggagttgtcgcggattttgtagagtcggtttttgttgttttttttgtttgaggagttttttattttacgtcgagttttgattttcgtgttgtcgagagggagttttcggggatatttcggtacgtagcggagatgtttttttttgttattaattttttcgattaggatgttggtaagtgtttttgtttttttttgtttattttttatcggattgtacgtttattttgttagtttttgtttgtatttaggattttcgggttagggttaaggaagagttcgtttttttttttttttgaggtttttttttttagagttgggaggaggttgagggtttggcgtattttttttgaaagaaatgggatttattttgtgaaatgggttttgagttaggattgtaggttgttaaagaattgttgaatgggttggtgtaaagggtttgggaggagtagttggtgtagtatttggtgtagggattgtgtttttggaagaatagcgaagggtttaaggcgtatgttggttagattaggattgtaaattttgtattaaaagtgtttgtttagataaataaatgttgagcgtttggaattggtagaatgttttaggtaaggttttttagaggattttaaaattttttgtaacggtaattgaaggagggagttttggttaagggtagatttttaaatatgttaggagcgatgaagatgaaatatttggtaacgattgaaatcgaattgaggatttgagtttttgggatgttttttttaggttaggtttttgtattttaaaaggtgtaaagaagtgtggaagaagttgttgaatttggaaagagtttgaaatgttatatttttgttgttttttgaattattggtattaggtattgatgatgttaatttaataggtttgtttttggtttttaattttattttattttatttttttttgatttgaagataataattatgggaatttgagttttcggggagagaattttggtttaatttgaacgtacgtaggaattattttggtatataagtgtggaatgaaagtaagttaaatattatttttaaattttttatggtagaatgtaattattattgtgaataaggataattttatgaatttatttgtttttgtgtattttaattatgaaaggtggatgttgaatttttttt

SEQ ID NO: 1726 - DNA, 6082 bp, Artificial Sequence
  chemically treated genomic DNA (Homo sapiens)
aagaaaaatttaatatttattttttataattaaaatatataaagataagtaaatttataaggttgtttttatttatagtaatgattatattttgttataagggatttggaaatggtatttggtttgtttttattttatatttgtgtgttaaggtagtttttacgtgcgtttaaattaaattaaaatttttttttcggaaatttaaatttttataattattatttttaagttagaaaaaaataaaataaaataaaattaaaaattaaaagtaaatttattgaattgatattattagtatttaatattagtgatttagaaaataataaaaatgtagtattttaaattttttttagatttaataattttttttatatttttttatattttttaaagtgtagagatttagtttaagagagatattttaaaggtttaggtttttaattcggttttagtcgttgttaagtattttatttttatcgtttttaatatgtttgagagtttatttttaattagagtttttttttttagttatcgttataaaagattttaaaattttttaaggaattttatttaaaatattttgttagttttagacgtttaatatttatttgtttaggtaagtatttttggtatagggtttataattttaatttagttaatatacgttttaagtttttcgttgtttttttagaagtatagtttttgtattagatgttatattagttgttttttttaggttttttatattaatttatttagtagttttttggtaatttatagttttagtttaaggtttattttataggatgagttttattttttttaaagaggatgcgttaagtttttaatttttttttagttttgaaggagggagttttaggaaaggggaagagcgagtttttttttggttttggttcgagggttttgaatgtaggtaggggttggtagagtgagcgtgtagttcggtgaggaatgggtagggagaggtaaaaatatttattaatattttgatcgaagggattggtggtaaaaagaggtattttcgttgcgtgtcgaggtgttttcggggattttttttcgatagtacgggagttagagttcgacgtaggatggaagattttttaggtaaaaagagtaatagagatcgattttatagggttcgcgatagtttttttttttatttaattttattaatcgcggtagtagttgcggcggcggtaatagtaaggagtcgaggaagttttcgcgcggagtttgtcgggaatttgggcgattttggcgttgtttgttttaaagttgtttcgagtttgttttatcggtaaaggttgaatagggagttttttttgtttgattttttttttaattagttatatataagagtggaattagtttttgtgttttttgttttttttttggttaggagttttcgtaggacggggttttttaggcgtgttgaagtttattaataattttaggagtgattgggagagttaggagaaagaaagtaggttgagttcgggtcgagttgtgcgtttttttttttttcgttttttcggttattataattttgtattttttttggaaggaaatggaaatttttttggattattttttaggtaaatagtttaattagttgcgtgaggtgataaatttgttcggatgaagttatgggagttgaacgaattggtttgaattttaagaggggagtgtttagggcgcgcgtgtttttcggagaggttgaggtaacgttggttttttttcgggagtttttgaacgttcggttttggaatttgtagatagtttttttagtagggcgttggtatttattgattaatcgtgtaattatttagtagttgtgatggttggtgatatgttttttatagtttaagatagtttttttagattgagtaaaaaaaagaaaatagaaaaaaattggagttaaaagttgattagtgagtgatttttagtaatttaaaatgttggtttatttattttatttataagtttagttaattaataaaaattattttttgtgtgatggagaagttttaaggagtatttattagagatgttgcgttttatttggaataaatttagtaagtatattttgtacgtaaatggaaattatttcgtaaattacggtatttttaaatgtagcgtggaaattaatattgatatgttaatataggattaatatatagtaattaaagagtgtttaaaaatttattaaaaatgaagttttatttttaaaagtgaaatgtgtaaattaaagtagtagttagataatgttttgttatttaggtaaaaattataaagaatcggtcgggcgcggtggtttacgtttgtaattttagtattttgggaggtcgaggtcggtagattatttgaggttaggagtttaagattagtttggttatggtgaaatttcgtttttattaaaagtataaaaaattagtcgggcgtggtggtgcgcgtttgtaattttagttattcgggaggttgaggttgggaatcgtttgaattcgggagcgaaatttcgttttaaaaaaagaaaaaaattgtaaagaattagggatgtgaggagttagatatttatatattgttggatgaagtgtaaatattgtataatttttttaagggaaatatttggaagtatgtaaaaaaatttttaaaattttaggatttagtaattttatttcggtaaattaattttaaagatatttttttaaaatatgaataaaggtatatatggtaatattgtttaaaggattaaagtattgttagttattaaatgttttatattgagtgattggataaattgttttattttttggtgttttagtttttttatgtgtaagaaataggaataatagggttgtgaggattaaatgaattagtataagtaaaacgtttattatagtgtttggtatagagtaagtattaaataagtgtaattgattattgtaatttatattggttagttaaattatagtatataagatgtgaaaattatatagttatttaaggtgtataatatagatttatatttatatagatatttgaatatataagtttttagaaggaagttataaattttataaaattataaatgtttataattttaaaaatttgaaaggaaatatatgagaatattatgatatgattgtttttgagtggtaagattttagataatgtttttgttttttgtgtattttattatttaaaatattttaatgatgagcgtgtattttttttaaaagtagaaaaaatgttaaaatataataatgttaaaaatggtatgttggtattattagttttttaatgttttgaagggttaatattaaaagcgtgtttgtgttttattatgataagtatagaattattcggaaatattacgattgatacggaagttagaatatttttttttaaaaatgtgttttgattgttgggttgatagaattaggtgataatttgtttattttaagattttgagtagtgttttgggttattattataagtgtttgagttagatattggtggtttagattgggtgtattagagttagatattgatgaaaatgtatttgtatatgttttgtatttcggattgaattattttgttgttagtaataagttagggtataaattgtttaagttttgattattaatatgtgtgtattgggagtaatatatattagtattgagagtagtattcgtgtattttgatttagaatgattttagttgtgggggtaggggggtttcgatgattaatgtgttgtataaataataaatattttttaaatataaaatttttaatatttaatttaaaagataaatataaaaagtgaaatgttttgtattttgtggttaacgttttttattatttttttaaaatattgaaattttatgagttttatttttagtattattatagtttttaaaacgttttgaagattatatattaatggtatattaaaatgtttttgtaatgttgtatgtttaataaattttgtggttgtttgttaaatgttatatttttttatttttagtttgattttgaaaatttatttatattaaaaataaaaatattggttaagtgtggtggtttatgtttgtaattttagtattttgggaggttgaggtaggtggattatttgaggttaggagtttgagattagtttggttaatatggcgaaattcggtttttattaaaaatataaaaatttagttgggcgtggtggtgggtagttgtaattttagttatttaggaggatgaggtaggagaatcgtttgaatttggggtatggaggttgtagtgagtcgagatcgggttattttattttagtttgggcgatagagagagattttgttttaaaaaataaaaaaaataaataaaaaaataaaataaaaaataaaaaattggtgtgtaaatagagttattatacgaaaaagtttataatttttaaatttaggaaaaagaatattttaggaaggtttttaatagtttaataattttagtttaagtaggaatgattattattttttagttttttttttttttttgtattgttattattttagtttatatttttattttttaggtaagttattatatttattttttgttgttttttttttttttttatagttgtggattgaattgtatttttaaaaatataaatattgaagtttttatgtttaatgtgatggtatttggagatagaatttttgggagataattagagttagatgaggttatgaggttgcggttttgttaatgggattagtgtttttataagaaggatattggattgtttgttgtttttttttttttttgttatgtggggatgtggcgagaaggtagttgtttgtaggttagtaagagagttttcgttagaatttaattatgttggtattttgattttagatttttaatttttagaacggtaagaaaattaatttttgttgtataagttatttattttggtattttgttatggtagtttaagttagttaatatagttattatttttaaattattttttgttttatcgttagaatgatttttttaatatataaatttgattatatattatttttttaaaatttttatagggtttttttagttatttagttatttagtaaatatgtattaatttttacgtgtgttaggtaatattttagatgttggaattatagggataaaagttttgtgagatttagtttttttggagtatagtttttggggaagatagttattaaataaaaaattaaattaattgtatgattataagtgtgtagagtagttttatttttaggattaaattttttttttttagtattatttttttaatgaattgattttttagtaatttattttttcgtagtttttttttttttattttttacgttagtttttttgaattattagtattcgtttttatgttttttgtatttttaaataagtaattttttttgttttttttgtttttattttatttaggttttagattttttttaaattttcgtttagattttgttttttaaaagttttttttgatttagtatttgattagtaataggtatataataaatatttgttaatttatttgttaattgattatttttattatatagtatttaatggtatggtatgtgttataggtgtttattatatttgagtacggtgttttacgtttgtaattttagtattgtgggaggtcgaggggggtagattatttgaggtcgggagtttaaaattagtttgattaatatggagaaattttgtttttattaaaaatataaaattagttgggtatggtggcgtatatttgtaattttagttatttaggaggttgaggtaggagaatcgtttgaatacgggaggtggaggttgtagtgagtcgagattatattattgttttttagtttgggtaataagagcgaaattttattttaaaaaaaaaaaaaaaaaaaattaagtattgtaaattgtaaatttagtattttagggtaataataattattttttttgtttataaatagaaatttggttagaatttagttaggattatatagtttt

SEQ ID NO: 1727 - DNA, 8530 bp, Artificial Sequence
  chemically treated genomic DNA (Homo sapiens)
agtgagttaagattacgttattgtattttagtttgagtaatagagtgagattgtttttagaaaataaaataaaataaaaatttgttaggtatggtggtgcgtgtttgtaattttaattattagggagattgagatataagaatcgtttgaattcgggatgtggaggttgtagtgagttgtgatcgtgttattgtattttattttgggtaatagagtgagattgtgtttttagaaaaaaaaaggaaaagaaaaagaaaaagaaaaaaaaaaaaagatatgggataggattgtagggtttaaaaggggaaaggttagtttgttagtatgggttaaaggtgagaaggataaagtttgggttgggaagagatgtataaatatttgtaaatgttttgttttttattgttttggaagttattaattttttggtttttttgtgattttgggaaagggtagattaaaaatagtaataataataataatagtaatttaggttatgaagatattaaagtaaatgagatgtttggattgttttttttttttgatttgtttttttttaaaataggaggattatttatattttttaagagtgaagatgaggtgtgtttagggtaatcgaagtttttaagagttaagatattttttagttttggttagttttggtgtttttttgttttgagtttttttttattttttaatttgagtattgtttttttttagtagggttgttttgttgtttttttatggtttaagttgtgttgttgttttgttgtgttttgttgtttttggtgtttgtttttttaagaaatgtttagaatgagattttgattttttagttatttttaatagagattgggtatttattaaatatgttttttattatttggagaatatggagagttagattttttttttagattttaggatttgttaagattttttatatatagttttttttttagtttttttgtttgagtatttgtttaatttagttttgagggtgtttttggaggaggtgggttgtttaattgaggtttatgttttgtagttttagatgcgaggaaaggatattattgaaatttttattcgtgagagttaaaaagtttaatggggaggaaggtaatattaatattattgtgacgaatttagtagttttttagggaagtgtgaataaatttagtatttagttgtttattttgggaaatgtatggatggtggtaaatatatttattggggtagttggtttattaggtagtttagatggtgattgagtttgttgagaaattattttttatgatgtttggtgttatagtttaaagttttgggtgtttatattattaagaattgtaggtatgagttttgggagtatattgaagaattaggtaaaaagttgaagaagtttttaagattatttaaattgtttatggatagtgataatataatttattaaatgttttatagttattttgaagtgttttgtgaggaaaatgatttaggaattgatttcggtttattttagttatttaatattatataagtaatgagtttttttttttaggattgtatttaaggatggtatatagtaagtagttagaaatgttggagattatttaggatagatgaatgttttttattttatttttttttttaaatatatatgtgattagtgttagttttgtttttttttatttagtaggtgttagtttttttttttttttttttttaagacggagttttattttgttatttaggttggagtgtagtagtgcgattttggtttattgtaatttttatttttcgggtttaagtaatttttttgttttagttttttgagtagttgggattatagacgtttattattacgtttgggtgtatatatatatatatatatatatatatttttttttttttagtagagatagggttttattatattggttaggttggtttcgaatttttgattttgtgattcgttcgttttggttttttaaagtgttgggattataggcgtgagttattatgtttagtcgttaatttaatttttaaaatgaagagaaatgagagtattataaatattttattttttttaattttgaatttttttggtttttattatgagtttagagtgggaatgtggtagggatatataggaaatgttaaagaataggattgtaggtatagaggttgagtgtgtgataaggggtataaggtttgagtagttagtataaatgggtaaatatttgtagagattatattttttattgattataggggaaagtaaatattttttttttttatgggatatagaattaggtagaataggattaggaagcgattaaatttattaaggtagttttattttttaatgattggattgtgtggtaatttggggtttttatatatgggtggaaataaaatagaagtttttggtgatttgtaaatgggggagattaagtgggagtaattggggtgtattttttattttttaggtttttatttaaaaagaatagaagtttggggttaggcgcggtggtttatatttggaagtttattattttgggaggcggaggtggaaggattatttgagtttaaagtttagaattaggttgggttagatggtaaaattacgtttttataaaaaatttaaaaattagttgggtatggtgttacgtatttgtagttttagttgtttgggaggttgaggtaggaggatttttcgagtttaggaatttaaggtagtagtgatttgtgattttattattgtattttagtttgggtaatagagtaagattttgtttttaaaaagaaagtataaaagtttggaagtaggtgatgtatgaggtgtttttttaattgagttttgggtttattatcgtttttagggaaatggtttgtatgtttcggattttttttttttttagggtattttgttttagatatgcgtggttttagatttattatgatattagttgagttgttattttgttattttttgttgtattttgtggatgttattttatatggaaagtagataaatgttttgatgtatttttttttgtttttggaattttagatattttttttagattttttgttttgttaatttttgtatttaaagttattgtttggttttagttatatggtttttttatttaagtttttggtaagtttggttttaaggaatgttttggaggaagttggttgttaggttgatgtttgggttttatagttatagttttatcgttagggtggtgtgaatgttatataggtttttatttagtattttcgagggttttagaaaggtagaagtatagagaggaacgtgttagtggaagttttggtttttgttttgtagttgttagttagggagtagtaaagtataggaagggtcgggcgttttttttcgatagaggattgtgagaatgagaaggagtaagttgtgtataatgtagtttagttgttgttaggagtgggaattttttataatttgggtatagttttgtattatgttatttaaaattgtttgggtaaggttagggaacgaggtcgagatggggttatagatttgggatatgattttttgatgattatggttgggatgttaggggggtttatgggtttagcgattagtgttgtatttaaatttgtattaaggtttggggtttagtagttgatttagtattattaagattagaaagacgtaaatattttttagtcggagattattaaggagggtttgagggttattttagatgtgagtgatttggaagaaataattattttggttttttttatattagaagtagtaagtttagttttttattgggggtgggttataattaagagttatgatttagattttggggttgggagttttgagatataaaagaatgtggtaattatagaattaataattgtattattttgataagttatatatatgtttttaaaattttaatttgatttatttaggaggaaggttgtatagtaaaacgtaagaacgtaaatgtttgggtgttgaagttatagggtttggtttcgaatttaggttttatttgttagagtttcggtgattattgaatagtaattttttttttgaattaagattagttttgaagtttttaaaggagatagaatgattttaattttaatgagttgttttgtaaatttaaaatgatataatgaatttaaaatgtttattatagtatttttaataaatagttattagttaggtgcggtggtttacgtttgtaattttagtattgtgagaggttgaggcgggatgattatttgaggttaggagtttaagattagtttgggtaatatggcgaaatttcgtttttataataaatataaaaaattattttggcggagttatgtacgtttgtagttttaattatttgggaggttgaggcgggagaattatttgagtttgggaggtcgaggttgtagcgagtcgagatcgcgtcgttgtattttagtttgggtgatagagcgagattatgttttaaaaaataaaaataaaaaaaaattgtttttattattttagtttttttttttttattttaaggcgtcgaaatttcggttttatttttttttatggagtttttggcgtttttaggttttttaagttagtttcggtttcggggtttacgcgcgggttttcgaaaattagttgttttagttttgggttagtttattaattggattttttttttcgtagaaagtgtttatttgaatttttttattaatcgttgaagttgtaggtgtggtttcggtttagtttgtttcgttttgcggaggggcggagttgcggcggcgttagtgagttcgtagtttgggaagggtttgattgaatggtagttagtgtcggggtggcggttgggaatgggggtcgtttcggattttcgttgttaattataagggggcgggttcgaggggggttagtcgaagttgtaggcggggcgcgaggttttagtattcgagtttatattagggacgggaagtcgcgattagagttattggagggcgcggggattgtaattttaattaggtacgggttttgagagggtgtgttggggtaggggtgggggtgagagtgagagttttttcgagggaagggcgattggttttaggggttattttttggagagggtagtttcggtttttagattgaaataggagttgtcgtttgttcggttttcgatttttttttgtttagtttatttttttaattttaatgttttttttttaaaattgttttgtagttttcgagattcggaatttggtattgttatgttggttcggtatttgacgtttttttttttgttttgtattattttttatttttattaaaaaacgatgtttaaagatagataaatttaaaaataaagatagataaatttattatttttgttttgttaaaaagtataagttattgaaagatgaaacgattgtttaaggttatatataaaatttagtttattttagaaaagttttttgagtgtaaaatatgtgtttaagaatgagagataatgagaaaaaattgttttagtttttaattttagtgtttgtaatttatttggggagattaggttttttgttttgtttttatatttgaatttttgttgatttgtttttttaatattagatatttaaatttttaagaattgggattttattattaatttttttttggagatggaattttattatgttgtttaagtttggttttaaatttttgggtttaagttattttttcgttttgtgggttttataaagtgttgggattataggtatgagttattatgtttggttatttgattatttttttaatttttttttggtattataaaagtaatatagatatatagttttaaaaattaagtattattaaaagagttaaaatgaaaatagtttttgtttaatttttttttttttttgtttttgttggaggtagaaaggtagttgatgttatttatgttagtagaagatttttttattttaagtatttttttttattttgtaataaaattatgtgatttttttagattataaatatgtatgaattttgttttgttaggtttaggttgtaataagtataagttttagttttttaaatagatattagttggtagtgagtagggaatagtggggagaaagatgtatgggatagtttgtttggtgataggtaaaaattaatttgttgtttttttgagatagagttttgttttgttatttaggttggagtgtagtgatgtgatttttgtttattgtaatttttgttttttgggtataagttatttttttgttttagttttttgagtagttgggattataggtaataattttaagtgaagttttaggattttataaagttgataatttataattatatttaagatttataggttataaacgtgttatatttttgggattgagttatttattgtatagtatttagatgttttttagaatggagttttttttttttatatggagggtagtttatatggtgtatttatttgattattaaaaagatttggtttttaaaaaagttttaggtggtcgggtatggtggtttatttttgtaattttagtattttgggaggttaaggtgggtagattatttgaggttagaagttttagattagtttggataatatggtgaaattttatttttattaaaaatataaaaattagttgggtatggtagtgggcgtttgtaattttagttagtcgggaggttgaggtaggagaatttttttaattcgggaggtagagtttgtagtgagtcgagatcgtgttattgtattttagtttgggtgatagagtaagattttattttaaaaaaagaaaaaaaaaaaaagaaaaaaaaaagttttagagttagtagggattatgttgtaataaatatttaatattaatattgatttttaaatgttttagtataattaaatataaataataaatatatatataaatgtaaaataaatgaattagggagatagatgaaataagattgtggaaatagtaatgtttgttaaagttggatggtgatttttgtattatttattttattttagtgtgtatttgaaaattattattaggttggttatggtggtttatgtttgttaatttcggtattttggaaggttgaggtaggcggattatttgagtttaggagtttgagatttgtttgggtaatatggtaaaattttatttttataaaaaattagttggtatgatggtatatttttgtagttttagttttttgaggggttgaggtagagaatggtttgaatttgagaggttaaagttgtagtgagttaagattatgttattgtattttagtttgggtgattaagtgagattttgttttaaaaaaaaaaaaaaaaaaagaaagaaaatttttattaaagtataaaggtttatttattgaagttattaaaatataggttggggtcggttgggtatagcggtttacgtttgtaattttagtattttggaaggtcgaggtaggtagattacgagtttaggagatcgagattattttggttaatacggtgaaattttatttttattaaaaatataaaaaaaaaaattagtcgggtatggtggcgggagtttatagttttagttattcgggaggttgaggtaggagaatggtatgagttcgggaggcggagtttgtagtgagttaaaattatattattgtattttagtttgggtaatagatcgagattttatttgaagaaaaaaaaaatataggttgggattatagtggtttatgtttgtaattttagtattttgggagttcgaagtaggtggattatttgaggttaggagtttgagattagtttggttaatatggtaaaattttatttttattaaaaaatatataaaaattagttgggcgtggtggtgggtgtttgtaattttagttatttaggaggttgaggtagaagaattatttgaattagggggatggtggttgtaatgagttaagattatgttattttatttcggtttaggtaaaagagtgagagtttattttaaaaaaaaaaaaaaaaaaaaaaaaaaaatatagattaggtatttttaatttgaaaaatttggttttaaaatgttttagtgagtattttttttgagtgttatgtgggtgtttaaaaagttagattttggattattttagattttagagttttggattagggatgttcgattggtaagtaatgtagatattttaaaatttggataaatttgaaatttaaaatgtttggaatagtagatatttaattggtagtattttttggaagaatatgtattaaattgatagtagtggttatttttggagaggaggggaaagaattaagattagtagtaggattaatatatattttaatgttttttgtatttttattatttgtataatttaaatattttaaattagtaataatgaataattatgaaattatggatgatttagtttagtaaaatatttaattgggaatttttatttttttgacgtaga

SEQ ID NO: 1728 - DNA, 8530 bp, Artificial Sequence
  chemically treated genomic DNA (Homo sapiens)
tttgcgttagaaggatgagggtttttaattggatattttgttggattaaattatttatagttttatgattgtttattattattaatttaaaatgtttaaattatataagtaataaaaatatagaaaatattaaaatatatgttgattttattgttaattttggttttttttttttttttttagaagtaattattgttattagtttggtgtatatttttttagggagtgttattagttgagtatttgttattttaagtattttggattttagatttgtttagattttggaatatttgtattatttattagtcgagtatttttaatttaaaattttgaaatttgaaatggtttaaaatttaattttttgagtatttatatgatatttaaaggaaatgtttattggagtattttggagttaaattttttagattaggaatgtttaatttgtattttttttttttttttttttttttttttaagatggatttttatttttttgtttgggtcggagtgaagtggtatgattttggtttattgtaattattatttttttggtttaagtgatttttttgttttagttttttgagtagttgggattataggtatttattattacgtttagttaatttttgtatattttttagtagagatggggttttgttatgttggttaggttggttttaaatttttgattttaggtgatttatttatttcggatttttaaagtattaggattataggtatgagttattgtggttttaatttgtattttttttttttttagatggagtttcgatttgttgtttaggttggagtgtagtggtgtgattttggtttattgtaagtttcgtttttcgggtttatgttatttttttgttttagtttttcgagtagttgggattataggttttcgttattatgttcggttgatttttttttttgtatttttagtagagatggggttttatcgtgttagttaggatggtttcgattttttgaattcgtgatttgtttatttcggttttttaaagtgttgggattataggcgtgagtcgttgtgtttagtcggttttaatttgtattttaatagttttaataagtgggtttttgtgttttaatgggaattttttttttttttttttttttttttttgagatagggttttatttggttatttaggttggagtgtagtggtatgattttggtttattgtagttttgattttttaggtttaagttattttttgttttagttttttaaggagttgggattataggagtgtgttattatgttagttaattttttgtagagatgggattttgttatgttgtttaggtagattttaaatttttgagtttaagtaattcgtttgttttagttttttaaaatgtcgggattaataggtatgagttattataattagtttaatggtaatttttaaatatatattagagtagagtgaatagtataaggattattatttagttttaataaatattattatttttataattttattttatttatttttttaatttatttattttgtatttatgtgtgtgtttgttatttatatttgattgtgttaaagtatttaaagattagtgttgatgttaagtatttattatagtatgatttttgttggttttgaagtttttttttttttttttttttttttttttttttgagatggagttttgttttgttatttaggttggagtgtagtgatacgatttcggtttattgtaaattttgtttttcgagttgaagggatttttttgttttagtttttcgattagttgggattataggcgtttattattatgtttagttaatttttgtatttttagtagagatggggttttattatattgtttaggttggtttggaatttttgattttaggtgatttgtttattttggttttttaaagtgttgggattataggggtgaattattatgttcggttatttgaagtttttttaggagttaaatttttttggtggttaggtaagtatattatataaattgttttttatataggaaggaggagttttattttagaagatatttaaatgttgtgtaatgggtggtttaattttaagaatatgatacgtttatgatttgtgaattttgaatatgattataggttattaattttgtgagattttgaaattttatttaaaattgttgtttgtaattttagttatttaagaggttgaggtaggagaatggtttgtatttaggaggtaggggttgtagtaagtagagattatattattatattttagtttgggtgataaagtaagattttgttttaaaagaataataaattggtttttgtttgttattaagtaggttgttttatgtatttttttttttattgttttttgtttattgttagttggtgtttatttaggaaattgaaatttatgtttgttgtagtttgagtttaatagaatagaatttatgtatatttgtggtttaaaaaggttatatgattttattataaaataaagagaaatgtttggggtgggagagttttttattaatatgaataatattagttgtttttttatttttagtaggaataagggaagggagggattgggtaggggttatttttattttaatttttttagtagtgtttgatttttaaaattatgtatttgtattgtttttatgatattaaaaaaaagttaaaaaaatgattaggtggttaggtatgatggtttatgtttgtaattttagtattttgtgaggtttataagacgagaggatggtttgagtttaggagtttgagattaagtttgagtaatatagtgagattttatttttaaaaaaaaattaatgatgaggttttaatttttgaggatttaagtgtttgatattaaaggagtaagttagtaaagatttaaatatgaaaataaaataaaaaatttggtttttttaaatggattgtaaatattgaggttaagggttgaaataatttttttttattattttttatttttaggtatatattttgtatttaagaagtttttttgaaatgaattgaattttgtgtgtgattttaggtaatcgttttattttttagtagtttatattttttaataaaataaggataatagatttatttatttttgtttttagatttatttatttttgaatatcgttttttggtgaagataaaaaataatgtagagtagagggaaaaacgttagatatcgaattaatataataatgttagatttcgggtttcggaagttgtagggtagttttgggagaggggtattagggttagggagataggttggatagaagaagatcgaggatcgagtaggcgatagtttttattttaatttggggatcgaagttattttttttagggggtaatttttggggttagtcgtttttttttcggaggaatttttatttttatttttatttttattttagtatatttttttagggttcgtatttgattagggttgtagttttcgcgttttttaatggttttggtcgcgatttttcgtttttagtatgagttcgggtattagaatttcgcgtttcgtttataatttcggttaatttttttcggattcgtttttttgtagttggtagcggaagttcggagcggtttttatttttagtcgttatttcgatattggttgttatttagttaagttttttttagattgcgagtttattggcgtcgtcgtaatttcgttttttcgtagggcgggataagttgagtcgaaattatatttgtagttttagcgattggtggagaagtttaagtaggtattttttacgaggggaggagtttaattagtggattagtttaagattgaaatagttgattttcgagaattcgcgcgtgagtttcggaatcgaaattagtttgaggagtttggagacgttaagggttttatgggaaggggtgggatcggaatttcgacgttttgggataggaagaggagggttgaggtaatgaaaataatttttttttatttttattttttgagatatggtttcgttttgttatttaggttggaatgtagcggcgcgatttcggttcgttgtagtttcgattttttaggtttaggtgattttttcgttttagttttttaggtagttgggattataagcgtgtataatttcgttaggataattttttgtatttattgtagagacggggtttcgttatgttgtttaggttgattttgaatttttgattttaggtgattatttcgttttagttttttatagtgttgggattataggcgtgagttatcgtatttggttaatagttatttattgaaagtattgtgataagtattttagatttattgtattattttaaatttatagggtaatttattgaggttaaaattattttattttttttagaaattttaaaattgattttagtttaagaaagaagttattatttagtgattatcgaggttttaataagtggagtttagattcgaaattaaattttgtgattttaatatttaaatatttacgtttttacgttttattgtatagttttttttttggataaattagattaaaattttgaagatatgtatatagtttgttagggtagtatagttattaattttgtggttattatatttttttatattttaagatttttagttttaggatttaagttatagtttttgattatggtttatttttagtagggagttgaatttattatttttgatatgaaagaagttagagtagttgttttttttaagttatttatatttgagatggtttttaaattttttttggtggttttcggttgagagatgtttgcgtttttttgattttggtaatattggattaattgttgaattttagattttaatgtaggtttaagtgtagtattgatcgttagatttataggtttttttgatattttagttatggttattagaaggttatattttagatttatggttttatttcggtttcgttttttggttttgtttaggtagttttgagtagtataatataaagttgtgtttaggttgtagaaggtttttatttttggtagtagttggattatattgtgtatagtttgtttttttttatttttatagttttttgtcgggagggagcgttcgattttttttgtgttttgttgttttttggttaatagttgtagagtagaggttagggtttttattgatacgtttttttttgtgtttttgtttttttggagttttcgaagatgttggatgaggatttgtgtagtatttatattattttggcggtagagttgtagttgtagagtttaaatattagtttgataattagttttttttagggtattttttagagttaggtttattaagaatttgggtagaggggttatgtggttgaaattaggtagtgattttgggtgtagaaattggtaggataaggggtttgaggagggtgtttgggattttaaggataagggaaagtgtattaagatatttgtttgttttttatatgaagtggtatttatagggtgtagtaggaggtagtaaagtagtagtttaattggtattatgatgagtttgaggttacgtatgtttggagtagagtattttagaaaggggagaaattcgaaatatataaattatttttttaagggcgatggtgagtttaagatttagttagggggatattttatatattatttgtttttaagtttttgtattttttttttagagatagggttttgttttgttgtttagattagagtgtagtgatgggattataaattattgttgttttgaatttttgggttcgagggatttttttgttttagttttttaagtagttgggattataggtgcgtgatattatgtttagttaatttttaaattttttgtagagacgtggttttgttatttggtttagtttagttttgaattttgggtttaagtgatttttttattttcgttttttaaagtgataggtttttagatgtgagttatcgcgtttggttttaagtttttgttttttttaggtaaaggtttaggaaataggaaatgtattttagttgtttttatttggttttttttatttataggttattagggatttttgttttatttttatttatatatagggattttaaattattatatagtttagttattgagaagtgagattgttttggtaggtttgatcgttttttgattttgttttgtttagttttgtgttttatgaggaaaggagatatttgtttttttttatgattagtgaaggatgtaatttttgtaaatatttgtttatttatattggttgtttaaattttgtgttttttgttatatatttaatttttatgtttatagttttgttttttggtattttttgtatgtttttgttatatttttattttaagtttatgataggagttagggaaatttagaattaggaaagatgagatgtttgtgatatttttatttttttttattttaaaaattaaattagcggttgagtatggtggtttacgtttgtaattttagtattttgggaggttaaggcgggcggattataaggttaggagttcgagattagtttggttaatatggtgaaattttgtttttattaaaaaaaaaaaaatatatatatatatatatatatatatatatttaggcgtggtggtgggcgtttgtagttttagttatttaggaggttgaggtaggagaattgtttgaattcgggaggtggaggttgtagtaagttaagatcgtattattgtattttagtttgggtgatagagtgagatttcgttttaaaaaaaaaaaaggaggggagttgatatttattaagtggagaggggtaaggttaatattggttatatatgtgtttaagggaagaggtgaaataaagagtatttatttgttttaagtggtttttaatatttttaattatttattgtgtgttatttttgaatatagttttgggaaaggagatttattatttatgtgatattgaatagttgaaatgagtcgggattaatttttggattattttttttataaagtattttagaatagttgtggaatatttgatagattatattgttattgtttatggataatttaaatgattttgagagtttttttaattttttgtttaattttttaatatgtttttaagatttatatttgtagtttttggtgatgtggatatttaaaattttgaattgtgatattaagtattatgggagatggttttttagtaaatttaattattatttgagttatttggtaggttagttattttagtgggtatatttgttattatttatatattttttaggatgggtagttgggtgttgggtttatttatatttttttaagggattattagattcgttataatgatgttggtattgtttttttttttattgaattttttgatttttacggatgagggttttagtggtatttttttttcgtatttgaaattgtagaatatgggttttagttgggtagtttattttttttaagggtatttttagagttaagttggataggtatttaggtagaggggttagggagggggttgtgtgtaagagattttggtagattttgggatttgggagaggaatttggttttttatgttttttaaataatggagagtatgtttgatggatgtttagtttttgttaaagatggttggagggttagagttttattttgagtattttttggaaaggtagatattagggatagtaggatatagtaaagtagtagtatagtttggattatggggggatagtagagtagttttgttggaaggaagtagtgtttaggttgggaagtggagaaaggtttaggataaagagatattaagattggttagagttagaaagtgttttagtttttggaaatttcggttgttttgagtatattttatttttatttttaaaggatgtgggtgatttttttattttgaggagaaataagttagaggaaaaaaatagtttaaatattttatttgttttggtatttttatgatttgaattattattattgttgttgttgttgtttttaatttgtttttttttagaattataaggaaattagaaagttgatggtttttaaaatagtgaaggataaaatatttgtaaatatttatgtatttttttttagtttagattttgttttttttatttttgatttatattgataaattgatttttttttttttaggttttgtagttttgttttatatttttttttttttttttttttttttttttttttttttttttttttggagatatagttttattttgttgtttagggtagagtgtagtggtacgattatagtttattgtaatttttatatttcgggtttaagcgatttttgtgttttagtttttttagtagttgggattataggtacgtattattatgtttggtaaatttttgttttgttttgttttttggagatagttttattttgttgtttaggttggaatgtaatggcgtgattttggtttatt

SEQ ID NO: 1729 - DNA, 5512 bp, Artificial Sequence
  chemically treated genomic DNA (Homo sapiens)
ggttaggttggttttaaatttttgattttaggtgatttatttgttttagttttttaaagtgttaggattataggtttgagttatcgtatcgggtttgtgattgggttttaatagaaattttagtagtgggttttgttatttttttataagtgaggatgtttagatttaagaggtagatttatttatttaagattttatagtagagttagggtttgtattaggattttatgattttaaagtttttgtgtttttttttaggttatattaattttaggaaagatgaggttaattttattaggtggttaagggaggaatgatattttaggtagatggaatgaaaggggttagtgtttggagttgagaggttagcgtaaggggaaaagtttggtcgaagtatttttttgaggtttggagtaaggaagatgtgggtagatttgagatttaagaaacgaagaaataatgagaaatagattttatagaaaggaattttttttagttataataaaggaaagtggtagagtattgggaggtgtcgtggaagatgtttagttttttcgtatataatttttagagggtttgaggttgggtattgggttggttaaggtataaaagattttttgttgggttggaaggaggagaaattagtttagcgggaagagcggtttgatagttattatggatgaggatgagaagttaggtttgatttagggttgtttaggatagtgttaattttatttagttgtttggttttgtgtgtttttttttttttttttaggtttttgggtttggttttgtaatgagggggttgtaaagggtgggttttttttgtttatttgattggttgggaaatgtgaatttggtatagattttgtattttttttttttcgtttagaaagaaatcggtttataagttttttttttagggtaggtaggttgggtagttgggtagaggaagtaggattttttttttatttattttgtttagttttatatttttttttttatgttatttttagaaatagaggatagttattatgttttaggtaggatggttttgtgtttttttggtgattttattgtaaagtgatttttttgaagagtggtggataggggatagcggtaggaacgggttttatttaagtttcggtagttttttttttttttttagatttgtatagaagtttttattttgtgtatataaatatatattttttttaggttttgatttgtttttttggataagaatgggggtggtatttttatagggaggtattagggtttggttttagaggtggggtatattttgagtatgggtttatggttttatttttagaagtttttttcggtgggggttggagtgtaggtaggttgtttaagtagaggtaaggtgggggtgaaataggatgtttaagtgttttagggttttttttttttgtcgtagggtgaaaagatattttttagaaagtttttagtttttttgggaaggttttttatttttattttattttttttttggtttttatgtaataggaattttttttgaagaagggatttggagtataggaaataaaggtatttttgtattatttttttttattttttaaggaaggttaagttaaggtgattttaatttgttttttttagggtaggggtatgggtagatttgatcgttaagggtaaggtagaaaggggatttgggataattttttttttttttttttttttttttttttttttttgtgacggagtttcgtttttgttgtttaggttggagtgtaacggcgtgattttagttaattgtaatttttatttttttggtttaagtgattattttgttttagcgtattgagtagttgggattataggtgtgtattattacgtttagttaatttttggatttttagtagagacggggttttattatattggttaggttgatttcgaatttttgattttaggtgatgtattcgttttagttttttaaagtgttgggattataggcgtgagttattatgttcggttttttgggataatttttttaatttataaatttaaatttatttttatgtaagtgtgtatagagtatattgttttatttaatagagtaggggtgtaggttgggcgagaatggagatgttatgtttcgtatcgtagaaaaatggtgggttagtttagtttagggaggtttttttatttcgtcggtgtgtgttgggtttggggaagtttagaaaggttatattgagattttgtttataaggttcggtaatttggattttggtgttatttgtgtatttattggttagatagttttgggtaggttttttttatggattaattaaagggtgtgattttggttttgattgtttttaaggttattgaaaggattcgttgagttgaagagtataattatgtttgtatataaatgtgttttgatgtagtttaggatacgaatatagtgtgttaattgaagtttaggttgtagattattattatttttaataaaatataggaggtttttttttggagaatatattgttttttttttttttttttttttttttttgagatagagtttgattttgttgtttaggttggagtgtagtggtatgatttcggtttattgtaattttcgttttttgtgtttaagagatttttgtgttttagtttttcgagtagttgggattataggtgcgtgatattacgtttagttaattgttttgtatttttagtagatacgaggttttattatgttggttagattggttttaaatttttggttttaagtgatttttttattttagttttttagagtgttgggattataggcgtgagttattgtatttagtttggggaatatatttttgtaagatttttaaaatttttttttattttttatttaatattgtgatttggatttgggggtgaagagtagttaggggtaaggaggttagtttcggatcgtagtttagttagatttttgatagtttttgatttttttgaatttttatttcgtggttttagtttttttttttatagtttggttttttaaaattattagggtattttgtggtgggaaattatttatataaggggataaataaggggattgaaagtaaaaagaaattttaaatttgatatttttgggtagttgtgttatttggagttacgattatagttatttttttttaatttaattttgatatttttttttttatttttttgggtgttttttgtttattttgggaaagttttatagtttttttttttttttattgtattttaaagggagaataggtttgaagaaatggagagaaatttagatagaattagagaattagatggagatttaaggagataagggagagatatagagagaataaaagttagagtgggggtcgggtatggtagttgatgtttgtaattttagtattttgggaggtcgaggcgggtggattatttgaggtcgggagttcgagattagtttgattaatatggagaaatatcgtttttattaaaaatataaaattagaaatataaaattagttaggagtggtggtatatgtttgtaattttagttattcgggaggttgaggtaggagaatcgtttgaattttggaggtggaggttgttgtgagttaagatcgcgttattgtattttagtttgggtaacgagagcgaaattttattttaaaaaaaaaaaaaaaaaaaaaatttagaaggggaaatgtgtaatgaaagatatagatattcggggttttatagttagagattaaatgagggatggttaattaagggtatagttattgggtatagggttagggtgggaggtacgggagggttttgaaaatatagttatatatttttttaggtttattttttttattttgtattttggtattttaatgttagttttttaggatttaggattatttatattaaagttaagttcggtttaattaagatagatgtttggtgggtggggttgtttgttggagtaataggtttttgtaggttttggaggagaagtttagagaggtggttgtttggaagagagtaggtaggatttttttttttaagtaggtatttttattttattaggtgtttagatgttagtgtatggtaagggtggttttttgttttttagatttgggtgagaggatttgaaaatttgaggaatttgtttttattaattgatttttatatttgtttgaagggaattgttggagggtataggtgttaagtgggatttatttaaatgtggtaatgggtttgtatttagttatcgataggttgtatgacggtggtaaagttattttttttttttggtttttgtttttttatttgtaaaattatttttatggttatttttagttgtggtatttggtttttattttagttgattttttagttttgtgtttgatttttttttgttaaatttattgtttagagtgggaaaggagaggagagggattatatttttttttttttggggttttttgtagagtatttgggaagtaaggtttttttatattttttatgtatttttttagagtttttaattttttttttcgtgattttgttaattaagatattgtgattatatagagaaggtggggagaacgtagatattttggtttttgtagttttgaagtttttttttttttttttttttgaagttaaaagaatgaaattgggagaggtagtaaggggtaagaaaggagagtggaaatggagagaaaagggtagttttgagaagtagttggggagggaggtagatgagaatgtattttttttaatagaatatgtagttttggtttagttgtgttgtgagtgggtagttgggttggttttttttttggtgttgttaattcgttgttaggtagaggggaggtttagaggagagggaagttgggtaaaggggatggaaggcgtttagttcgattttattaaattttttgggtttcgtgggaaggggttttttggagagggggattgaggttttagataggatatttattgttgtggtaaggtttgtagagagtttcgaagttaggaggatttaagacggtttttttttggatttttttgaaggtagaattagttttataagtaattaggttgggtgaacgggggcgttggttagtttatggattatagtcggttggtgaggttacgtgtttattgtgtggttttgggtggtttcgggtaagttttttttttttttaggatttttattttttatttgtaaaattgtggagagggggagggttgaaatatatgattgttaagattttttttagttttttcgttagggttgagtttagatggtcggagtaaaagaaggagggaggtgttgcggtggtgggggtgattttggttttattagaatttttagttttttttttttttatagttttgtttttgaggttataaaatttgtggtttttaagatatatatgcgtatatacgcgcgtgtatatatatattttatatatttattttttaatttagg

SEQ ID NO: 1730 - DNA, 5512 bp, Artificial Sequence
  chemically treated genomic DNA (Homo sapiens)
tttagattaaaaaataaatgtgtggggtgtgtgtgtgtacgcgcgtgtgtgcgtatgtgtgttttgggggttataggttttgtgattttagagataaaattgtagagaggggaagaattggggattttagtgaagttaagattatttttattatcgtagtattttttttttttttttatttcggttatttaaatttaattttgacggaggaattggaaagaattttggtagttatgtgttttagttttttttttttttataattttgtaggtaagaaatggaagttttgagagggaaaggggtttgttcggggttatttagggttatatagtaggtacgtggttttattagtcgattgtgatttataaattagttagcgttttcgtttatttagtttagttatttatgaggttggttttatttttagaaaagtttagggagggatcgttttgagtttttttaatttcgaaattttttataggttttgttatagtagtgaatattttgtttagagttttagtttttttttttaagaggtttttttttacgaggtttaaggggtttggtaaggtcgggttggacgttttttattttttttgtttagttttttttttttttgggttttttttttgtttggtagcgggttggtagtattagaggaggggttagtttagttgtttatttatagtatagttgggttaagattgtatgttttgttggggggggtgtatttttatttgtttttttttttagttgttttttagagttgtttttttttttttatttttattttttttttttgttttttattattttttttagttttatttttttaattttagaggaaaaaaaaaaaaagaattttaaagttgtagaagttaaaatgtttgcgttttttttattttttttgtgtggttatagtgttttagttggtaggattacgaggaaaggaattgaaaattttaagggggtgtatggaggatgtagggaagttttgttttttagatgttttgtagggggttttagggaggaggaagtatagttttttttttttttttttttattttgagtaatggatttggtaggggagggttagatatagagttagggggttaattggaatgaaagttaagtgttatagttggaagtgattataaagatgattttataagtggaaaaataaaggttagagaggggaagtgattttgttatcgttatgtagtttgtcggtggttggatataaatttattgttatatttgggtgggttttatttggtatttgtgttttttagtagttttttttaggtaggtgtggaagttagttgatgggagtagattttttaggtttttaagtttttttatttaggtttggagggtagagggttatttttgttatgtattgatatttgggtatttgatggggtgggggtgtttgtttaagagagggggttttgtttgtttttttttaggtagttatttttttagattttttttttagggtttgtagaggtttgttgttttagtaggtagttttatttattaaatatttgttttggttgggtcgggtttggttttagtgtgggtagttttaggttttaaaaagttagtattgaggtgttagagtatagaatgggaaggatgggtttaaaagggtgtgtggttgtgtttttagagttttttcgtgttttttattttgattttgtgtttagtggttgtgtttttggttgattattttttatttggtttttgattgtaaggtttcgaatatttgtgttttttattgtatatttttttttttgggttttttttttttttttttttttgagatggagtttcgttttcgttgtttagattggagtgtaatggcgcgattttggtttatagtaatttttatttttaaggtttaagcgatttttttattttagtttttcgagtagttgggattataggtatgtgttattatttttggttaattttgtatttttaattttgtatttttagtagaggcggtgtttttttatgttggttaggttggtttcgaattttcgattttaggtgatttattcgtttcggttttttaaagtgttggaattataggtattagttattatgttcggtttttattttggtttttattttttttgtgttttttttttgtttttttaggtttttatttggttttttgattttgtttgggtttttttttatttttttaggtttgttttttttttgagatgtagtggggaggaggaggagttatggaatttttttaggatgggtaaagggtatttaagggagtagagggaagggtgttagagttgggttgggaagaggtgattgtagtcgtggttttagataatataattatttagaaatgttaaatttggggtttttttttgtttttagtttttttgtttgtttttttgtgtgggtgattttttattataaagtgttttggtgattttggggaattaggttgtggaggagaaaattgaggttacgggatgggggtttaggaagattagaaattgttaagggtttgattgagttgcggttcgaggttggtttttttgtttttaattgttttttatttttaaatttaagttatagtattagatggggagtgaggaaggattttagaaattttatagaaatatattttttaggttaggtgtagtggtttacgtttgtaattttagtattttgggaggttgaggtgggaggattatttgaggttaggagtttgagattagtttgattaatatggtgaaatttcgtgtttattaaaaatataaaataattagttgggcgtggtgttacgtatttgtaattttagttattcgggaggttgaggtataagaattttttgaatataggaggcggaggttgtagtgagtcgagattatattattgtattttagtttgggtaatagagttagattttgttttaaaaaaaaagaaaagaaaaaaaaaaaagtaatatattttttaaaagaagattttttatattttattaggaataataatagtttgtagtttaggttttagttggtatattatattcgtattttgaattatattaaggtatatttgtgtatagatatggttgtgttttttaatttaacggatttttttaataattttgaaggtagttagggttagaattatattttttgattagtttatgaaagaaatttgtttaaagttgtttggttagtaagtgtatagatggtattaggatttaagttgtcgggttttgtgggtagggttttagtataatttttttaagtttttttaagtttagtatatatcggcggagtgaagaggtttttttgggttgggttagtttattatttttttgcggtgcggagtatggtatttttattttcgtttagtttatatttttgttttattgaatgggatagtgtgttttgtgtatatttatatgaaggtgggtttgagtttatggattaagagaattattttaaagggtcgggtatggtggtttacgtttgtagttttagtattttgggaggttgaggcgggtgtattatttgaggttaggagttcgagattagtttggttaatatggtgaaatttcgtttttattaaaaatttaaaaattagttgggcgtggtggtgtatatttgtagttttagttatttagtacgttgaggtaggataattatttgaattagggaggtggaggttgtagttagttgagattacgtcgttgtattttagtttgggtaataaaagcgaaatttcgttataaaaagaaaaaaaaaaaaagagggagagagaaagaattattttaggttttttttttgttttgtttttgacgattaggtttgtttatgtttttattttggggagaatagattgaggttattttgatttgattttttttggggggtggagggaggtggtatagagatgtttttgttttttgtgttttaagttttttttttaaggagagtttttgttatatgggagttagaggggaggtggggtaggggtgaagggtttttttaagaaagttggaggttttttaggaagtatttttttattttgcggtaaaggggagaagttttggagtatttaaatattttgttttatttttattttgtttttgtttggatagtttatttgtattttagtttttatcggagaaggtttttagaagtggggttatgggtttatgtttagagtatattttatttttgaggttaggttttggtatttttttatagaaatgttatttttatttttgtttaagaagatagattaggatttagggagggtgtgtgtttatatgtatagggtgaggatttttgtgtaaatttgggggaagggaaggagttgtcggagtttgggtgaagttcgtttttgtcgttgttttttatttattattttttagggaagttattttatagtgaagttattaagagaatataaggttattttgtttgaggtatagtgattgttttttgtttttgggaatagtatgaggggaagggtgtggggttggatagggtgggtaggagaggagttttgttttttttgtttagttgtttagtttgtttgttttgggggagaggtttgtaggtcggtttttttttggacgaagagaagaggatgtagagtttgtgttaggtttatattttttagttagttaggtgggtaggaggagtttattttttgtagtttttttattgtagggttaggtttaggagtttggagagaggagagagggtatatagagttaggtagttgagtggaattggtattgttttgggtagttttgggttaagtttggttttttatttttatttatgatgattattaggtcgtttttttcgttgagttagttttttttttttttagtttaataagaaattttttgtgttttggttagtttagtatttaattttaagttttttgggggttgtgtgcgagggggttgagtattttttacgatattttttagtattttgttatttttttttgttatgattggagggggtttttttttgtagaatttgttttttattgttttttcgttttttaagttttagatttatttatattttttttgttttaagttttaaaaaagtgtttcggttaggtttttttttttacgttggttttttaattttaagtattagttttttttattttatttatttggaatgttattttttttttggttatttggtgaaattggttttattttttttagggttagtgtggtttagaggaaaatataaaggttttggagttataaggttttggtgtagattttggttttgttgtaggattttgagtgagtgagtttgttttttggatttaagtatttttatttgtaaagaaatagtaagatttattgttgggatttttgttaagatttagttataggttcggtgcggtggtttaagtttgtaattttagtattttgggaggttgaggtaggtggattatttgaggttaggagtttgaggttagtttgatt

SEQ ID NO: 1731 - DNA, 7455 bp, Artificial Sequence
  chemically treated genomic DNA (Homo sapiens)
tttaagttttagtagaattgattgaagtattttgtattagaggttttgcgaagttatatattttttatttggtttgttattttatatttaattaatatatggattttaagcgtagttagattattgtacgtatttattttaatatttgatttgtttttggatttttttgttatagtatatatgttaagtttttaaagtttttattttttttattttagtttttgtagattagaagataatttttatgttattttatagttttaggtaagaatttagaatataataatgttttttatgagtttgttagtaattatttttttttatttatatattgagtgatattcgatggtttgataaggttttttttagatattgtatatgtagtaaggtttaagagagatgaaagttggtttttaggtagtttatattgtagttgggagatagaaataataagtgaaaaaataatatatagtattttaagtaattataagtgtgttaaagatgaagaaggtaggattaaggtaaagaggtaatttaaaataggatggttaagaaaagtttttttggtatagtggtattttagaaaatatatgaagtgtttatgtttataagttagtatgaaaaaaaaaatttagtagaagaaatagtagggttgtattttattgtggtagaaatatatttattgcgtttgggaaaattttaatgaaaatagtatgaatagagaaggaaagatgtggattaaaataaattatattatagaaaagaggtgaggagatgattgaagcgttataggttaaagatagtttttggattgagataaatgttattggattaggtattgatttgatttatattttggaagggaggtaagggttgaagtatagattttttattttggtattatagaattttgttggtttttaatagttttatatttttttgttttatttgtttattttttttttttatatttttttaatttataatttaatatttatgatttagtatatatttttaataatttaaataattttagtgaagtttgaatttgattaattatatttgttaaaattttaattttattaattgttaaatttttttatattgtatttttattaagaaaacgtaaatgtataaagaaaagaatttattttatgttttataaatgtggtatataatgttgttaagtaaataatatttttgtatttagttttatagtttttattttttttttttaataaaatgtttaaatgtattattaagttttttgaaatatttaatttattttattttgtagttagttttagaaaataatttattttgaattaaaaattgagtttatttgatttaatttatttaagttttttatttttatttgtttataaattaatttatatttgattagatttgtaattttttgtaatattttgattattgatatgattttaatgtttttttagagatatatttttgttgtttttggttttgtatttttttttttatatttggagaattttaaaaattaagatgtttttttttatgaagattatgatgatgaaaattataataatgatagaatttaatatttgtatttgagttattttaatttataatgtgatttttatatatttttttttaagttttacgtattattgtaatattttataaataagaaaattttagtttaaagatataaagtaaattaagtaatttataaggttattgtaatatggtaattaatattttttttttgatgttttatttttttggtttttataatatataaatagtcgagaaatattttttttgttatttttttttattatagattttttttatagattttttatttttttttatatattatattagtgtttagtaggatatttgtttttagtttatttttttttgattttatatattttgattgtataagttgtaataattttatagtttgattataattaataagatgataagtgtttaatttgtaattttattgttgattttttttttttaattttagatttatgtttttttgggtttttttgttttagtttttatttttgtttgatttataaattatattgtaaattttttaagaataagagtaaagttttttatgttatgtttttagaataaataatattttatttatttagtagattattatatgttgtttagtatttgttaattatatatgttattttagtaatttaaataggaatataatataatatttttagttaaataaataaatattatggatattggttataaatggttttatgtttttattataagagaattgtagaataaggagaaggaggagtagtaattggagtagtaggaagataaggaggatgaagaggaagaggagaaggagacggtagtaaagaagatagagaagtaagattgaggagagtttagtataaatattattataaatatttatttatgggttgtatttttaagtaaaaattgtattgttttatttgtgataaagtagtagttttttgttgatgttttttttgtaacgaaaggttatgatatttttaaagagaatagtgtttggtatagaggataagatatttgttttttttaattataaaatatgaagttatgttttggtttattagttttttaaattggtttgttttttttggagggtgggattataattaatacgagaaggttatttttttgtttttagtttgttatttttgtttgatttattatatataatttttatattttttaatttggggaagtagaaaatgatgggtggattaatgtttatatgttggtattttaatataatatgtagatgagttaagtttaattgtaattttaaagtgtgtatattaagatgtattaatattttttattatgtagtttgttgtttgttagtgtttttgggttattagtttgttttatgtttattagaatatgaatattttagatttattagaatagtatttagtattgttggataaatgaagtggtgaagaaaattagaggtaagaaaggagaagagagggagaagaaagaaagaagaaaagaagaaaattatttgattttttttaagtaatcgaagtagtttatttttaaaattagatatagtttagtagttattgaattatgggttaggtataatggtttatgattgtaattttagtattatttggaggttaaggtagaaggatttttgtggttaaaagtttaagattagtatgggtaatatagtaagattaagtttttattaaaaataatttaaattaaattaattaagagtgataatatatgtttgtagttttagttaaatatgaggttgaggttgtaggattatttgagtttaggagttttaggtatttgtgaattatgattttattaatgtatttaagattgtgttatgtagtaagattttatttttggaaaaataaaatagttattgaattttatgtaatttttttttatttagaatgtaaagagattgtgtttgttttatatatgagaagaaattttgtatttataatgtttataaattttatgataaaagaataagaataatatttatttaatttaatttgaattatttatttgttttaagaaatgatttatatttttttgtatattatttagagagtaattataatttttagtaaggttgttttaatatagtataaaaatttatttaataaatatttttttaaaaaatttgatataaaattaaattataaattatttttattggttaaagtttaaggataattaatgtatttaagagataaatatgtggttgtttttttttttatgtttttgtggagatacgggttttattatgttgtttaggttatttttgaatttttatgtttaagtaatttttttgtttcggttttttaaagtgttgggattatagatatgagttattgagattagttttgttttaaattttatagtatttaaagaattatttggagataatgttaaaatgtaaacgttttaggataattttaagattttgatttagtaagtttgcgaaggtggattaagaatttatatttttataggttttagttgatgttgtttgtgatgtttttatatggtatattttgaggaataatgtattaggttgtataatttattttaattttatatataagtttttgatattcgttttttagtatattgagttatttaattagtagtgagtagggtaatttttatataaatttttttaggaatgtaatgaaaatatttttttttttattttagtgtaattatgttaatatatggttgttatggaaaaatatgtagttttaaaaattttaggaaattaaattgaatttttaaatatatatatttagttatatgtgagatatgtattagtgagtatttagagttattttattataaatataataattttttattatatagtatttaaaagattattgaatttggtaaatgtttacgtttattttgtaatttaaaatattttaaagttaatagaagatggtaaaagtatgagataaataatgatttgaagaaaaatttttgaagtatatgaagattgtaattttattatgttagttattacgagttattagagaatatgtaaaattttgataatatggtaagtattatttgtgttatagagttgttttattttggatatatatttgtggaaatatttttattattgtaattatttttatgtttggttttttttagtatgtttttttgttatttgatttatttagcgttagattaatagtgggattaatatgtagtgggtatagttgttttttggttattttgtttttataattatttattgtaaaattattttgttacggttatttttattatttgtagagatagattttgggtattatttttagtttttataatgtgattttataattgttattatttaataaaaataaatgggggattttagagtgtttaaatatattggttttttagggtagtatattattttttgaagttttattttaattttattatttttgtagttttattttgagtaaaaggtaatatgtttatgtataatcgaatatgttgttttaatttagagtgttgttttttaaaattttttgaaaattaattataaaaatgtgtatttatgtaatgataattttttataaagaaataattgagagaaatgatgatttttttaggatttgaaggtaagttgagaatttgaataattatatattgaaattagtaattattatgtaaagtaaataatgtggaatatggagatatattttaattttttttttgatggaatttttgaaaagttttttatttttttgtttacgtattggtatttattttgttatttattatttttatttttattcgaagtttatattttaagaaaatagtatacgtttttttttttgtaaatgtatatattgttttataagtttaatttttaaaaatttattttttttttataagtaaatattttttattatttttttattgatttttttattattttaaatagttatgttattttgtataataaaaaatgttgtataatagttatgttttattgttttattgttttatattatttaagttgtttttatttagttgtgatatggtagaaaataaagattttattattttatatttttattattttttattggggaaatatttttttaaaattatgatatatatatttatatatttatgtttatatatttattttttagtttattaaggttagtaaaataaaattatttttttatgagtattttttgattttatatttttaataaaatttataggtataaaatatattaaagtttttatgttttttgtattataaaatgattgatgggtaggtttatttattaggtgatagaaaaattttaaagtatatattatttttatatttattttaatattagaaatttttttttttttttttttttttttttaatttgagatagagtttcgtttttgttgtttaggttggagtgtaatggtgtaatttcggtttatcgtaatttttatttttcgggtttaagtgatttttttgttttagttttttaagtagttgggattataggtatttattattatgtttagttaaatttttattattattatttttagtagagacggggtttttttatgttggttaggttggttttgaatttttgattataggtgatttgtttattttggttttttaaagtgttgtgattataggtatgagttattatattcggttagaaattttagtttgaataattgaggtaaattagtgaataagtaataaagtaaatgttataaattatgagttttgttttatgttttggagatttggggttattaataatagtaattttttttataattaggtaaaaaatatttttgtaatgttttattataagttattggtaaaagagattaaaataatgaagattattatttttatatgaattattttatagtttttaataaataggtaaaaatgttatttatttgtaatttttgtggtaattatgtgttttattgaaaatgtttttatttagatgtttataatttataaataaataatttaacgttttttgtttaataataaaggaattgggttaattggtttatattgtttatgataatatattatagttttagataaggttaattttgttgaatgagattatttaaaatattaagttatttttattaatttaattttttagaggaggtacgaatattttttttgtgattttttattagtttgattgttttttatttagtattattaatgttttaatttgaaggtgattttatttttgtaatttttaagatagaaatttggtttatttttagtaatattataaagcgattgtttattgttggttattttaatatttaaatatttttttatattgtattttaaatattatttttaatgttattatttaaggcgttttataatatttagttttattttttttatattttgaattgttttagttttattttttgataaattgttttagttttattttttttatattttgaattgtttgtatttttaatatggtatttttttttttttttatttttttgtagttatttaatatttttttatttattttgtataatttaatttaagttttatttttttttttatttttatatttttatttttttggtttgtgtaaggtgttgatttgtgtgttattttaatgttttagtatttttatattaatatatttatttttatttattagtgtttttaataagtttttaagttttatgatgttaggtaatgggttttaattgtttttttatttggagtgtgttttttagtgttttggagcgtagtataattaataaatttttgatgggcgaatgtaagaaaaaatgtgatattgaatttttatatatgtttttaga

SEQ ID NO: 1732 - DNA, 7455 bp, Artificial Sequence
  chemically treated genomic DNA (Homo sapiens)
tttgaaaatatatgtggaaatttagtattatatttttttttgtattcgtttattaaaagtttattgattatattacgttttaaagtattgggagatatattttagatagaaagataattaaaatttattgtttgatattatgaaatttggagatttgttggagatattgataagtaaaagtgagtgtattgatatggaaatgttaaggtattagagtaatatataaattaatattttatatagattaagagaataggggtatgaaggtaaagaagaaagtaaagtttgagttggattatgtaggatgagtaaagaggtgttgggtgattgtaagaaaatgaaaaagagggaggatattatattgaaagtgtaaatagtttaaaatgtagggaagataaaattggagtagtttattagaagataaaattggaatagtttaaaatgtagggaagatagaattggatattatggggcgttttaaataatgatattagggatgatatttaaggtatagtgtaaagagatgtttggatgttagaatgattagtaatgggtaatcgttttataatgttattgaaaatgagttagatttttgttttgagagttgtaaaaatggggttatttttagattagaatattaatgatattgggtagagaataattaaattgataagaagttatagagaaaatattcgtattttttttgagaagttgaattggtgaagatgatttaatattttaaataattttatttaataaaattaattttatttgggattgtgatatgttattataaatagtataagttagttaatttagtttttttgttattaaataaaaaacgttagattatttatttgtaaattataaatatttaaataaagatatttttagtgaaatatataattgttataagagttataaataaatgatatttttatttgtttattgaaaattatagagtaatttatataaaggtaatggtttttattattttaattttttttattaataatttgtgataaaatattataagaatattttttatttaattataaaaaaaattattgttattaataattttaaatttttaaaatataaagtagaatttatgatttatggtatttgttttgttatttatttattgatttgttttagttatttaaattgaaatttttggtcgggtgtggtggtttatgtttgtaattatagtattttggaaggttaaggtgggtagattatttgtggttaggagtttaagattagtttgattaatatggagaaatttcgtttttattaaaaataataataataaaaatttagttgggtatggtggtgagtgtttataattttagttatttaggaagttgaggtaggagaattatttgagttcgggaggtggaggttgcggtgagtcgagattgtattattgtattttagtttgggtaataagagcgaaattttgttttaaattaaaaaaaaaaaaaaaaaaaaaaggaaatttttggtattagagtaagtgtaaaaataatatgtattttggggtttttttattatttgatagataaatttatttattagttattttatgatgtaaaaagtataaaaattttagtgtattttatatttgtaaattttattgaaagtatggaattaaaaaatgtttatagaagagtagttttgttttattaattttgataaattgaaagatggatatatagatatagatatataaatatatatgttatggttttaaaaaaatatttttttaatgaaaaataataaaaatatgaaatagtaaaatttttgttttttgttatattataattgaatgaaaataatttaagtaatataaaatagtaaggtagtaaagtatgattgttatataatattttttattatgtagaatgatataattgtttaaaatgatggaaaggttaatgaaaaggtagtgagaaatgtttatttatgggaaaaaagtaaatttttaaaagttaaatttgtgaaataatatatatatttgtaaaaaagagaacgtatgttatttttttaaaatatgaatttcgaataaaggtaaaagtagtaagtagtagagtagatgttagtacgtagataaggaaataaaaagttttttagaagttttattaggagagaagttggaatatgtttttatattttatattatttattttgtatgatgattgttgattttaatgtatagttatttagatttttaatttatttttagattttaagaaggttattattttttttaattgtttttttatgagaaattattattatataaatatatatttttataattagtttttaaaagattttaggaagtaatattttagattaagataatatattcgattatatatgaatatattattttttatttaagatgagattatagaagtagtgaagttgaagtgaagttttaagagatgatgtgttattttagagggttaatgtatttaaatattttgaagttttttatttgtttttgttaaataatggtaattatgagattatattatggaaattaaaagtaatgtttaaaatttgtttttataaatgataaaaataatcgtaataaagtgattttgtaatagatgattgtgaagataaagtaattaggaaataattgtatttattgtatgttaattttattgttagtttagcgttgagtgagttagatgatagaaaagtatgttggaggaaattaggtatagaaataattgtagtgataaagatgtttttataagtatgtgtttaaggtggaataattttatgatataaataatatttattatgttattaagattttatatgttttttgataattcgtggtaattggtataataaaattatagtttttatatattttaagagtttttttttaaattattatttattttatatttttattattttttattgattttagaatattttaagttataaagtgaacgtaaatatttgttaaatttagtaattttttgggtattatatgataaaaaattattatatttatggtgaaatgattttaagtgtttattgatatatattttatatatgattgaatatatgtatttggaaatttaatttaattttttggagtttttaaggttatatatttttttatagtagttatgtgttgatatgattatattagagtgaaggaaaaaatgtttttattatatttttaggaaaatttgtgtaaaaattattttatttattgttggttggataatttaatgtattaagaaacgaatattaaaaatttatatataaagttgaggtaagttatatagtttagtgtattgttttttagagtgtgttatatgggaatattatagatagtattagttggagtttgtggaaatgtaaatttttagtttattttcgtaaatttgttgagttagaattttggggttgttttaaggcgtttgtattttaatattatttttaggtgattttttgggtattgtgaagtttgaaataaggttggttttagtggtttatgtttgtaattttagtattttgggaggtcgaggtaggaggattgtttgagtatagaagtttaagaatagtttaggtaatatagtgagattcgtatttttataaaaatataaaaaaaaaaataattatatatttgttttttgaatgtattagttatttttaggttttaattagtaaagataatttgtggtttaattttgtattagattttttaaggaagtatttattaggtaaatttttatgttgtattggaatagttttattggaaattatgattattttttgggtaatatataagaaaatataaattattttttaaggtaaataaataatttaaattaaattagatagatattatttttatttttttgttatgagatttataagtattatagatataaagtttttttttatgtgtaaaataaatataatttttttatattttgagtggaaaaaagttatatagggtttagtaattattttatttttttagagatggggttttgttgtatagtatagttttgagtgtattggtgagattatagtttatagatgtttggaatttttgggtttaagtggttttataattttagttttatgtttagttgggattatagatatgtgttattatttttggttaatttaatttaaattgtttttggtggagatttggttttgttatgttgtttatgttggttttgaatttttgattataaaaatttttttgttttagtttttaagtagtgttgggattgtagttatgagttattgtgtttggtttatggtttagtaattattgaattatatttgattttaaaaataaattgtttcgattatttggggaaagttaaatgatttttttttttttttttttttttttttttttttttttttttttttttatttttggttttttttattattttatttatttaataatattaggtattgttttagtagatttaaggtatttatgttttagtgaatataaagtaaattaatagtttaaaggtattaataaatagtaaattatatggtaagaaatattgatatattttaatatatatattttaaaattatagttaaatttaatttatttatatgttatgttggaatattaatatgtaggtattagtttatttattattttttgtttttttaagttaggaagtgtggggattatgtatgataggttaaataaggatagtagattagaaataaaggagtgattttttcgtgttagttatggttttattttttaggaagagtagattaatttagaagattgatgaattagaatatgattttatattttataattaaagaaaatagatattttattttttatgttaaatattgttttttttgaaaatgttatgatttttcgttataaaggaaatattaataaagaattattgttttattataggtgaggtaatataatttttgtttaaggatataatttatgaatgggtatttgtagtgatgtttatgttgggttttttttaattttgtttttttattttttttattgtcgttttttttttttttttttttttattttttttgtttttttgttgttttagttgttgtttttttttttttttattttgtaatttttttatgatggaaatatgaaattatttatgattaatatttatgatatttatttatttaattaaaaatgttatattatgtttttgtttgaattattaaaatgatatatatgattgataaatgttgaataatatatgataatttattagatagatagaatgttgtttattttggagatatgatatgagaagttttatttttgtttttaaggagtttatagtataatttgtgaattagataaggataaaggttaagatagagaaatttaggaaaatatgagtttaaaattgggagaagaaggttaataatggagttgtagattgggtatttattattttattgattgtaattaaattatgagattattatagtttatataattaagatgtgtagagttagaagagaataggttgaggatagatattttgttgagtattgatgtaatgtgtaagagaaaatagaaagtttatgaaaaaaatttgtgatggaaaagaatagtagaagaggtatttttcggttgtttgtatgttgtggaagttaagaggatgaaatattaggaaggaaatgttaattattatgttgtagtgattttataggttgtttagtttgttttatgtttttaaattaaaatttttttatttataaaatgttatagtaatacgtgaaatttaaaggagagtatataaaaattatattgtaaattaaaatgatttaaatgtaaatattagattttattattattataatttttattattataatttttatgaaaaagaatattttaatttttaaaattttttaagtataaaggaggaaatataaaattaggaataataggaatatatttttggaaaaatattagaattatgttaatgattaagatgttgtagagagttataaatttggttaagtatagattaatttataaataagtgaaagtagagagtttaaatgggttagattaaatgggtttagtttttaatttagagtagattgttttttggaattgattataaggtaagatgagttggatattttagaaaatttaatgatatatttggatattttattgaagggaaagggtgagagttataaaattaaatataagaatattatttgtttagtaatattgtatgttatatttataaaatataaaataaatttttttttttgtatatttgcgtttttttggtagagatgtagtgtaagaagatttaataattagtaggattgagattttagtaaatataattaattaaatttagattttattggagttgtttgagttattgaaagtatgtattaaattataaatattaagttgtaggttaggagaatatggaaaaaaagaatgaataggtagaataaaaggatgtaaaattattaagggttagtagggttttgtaatgttaaagtaagggatttatgttttaatttttgttttttttttaaaatataaattagattaatgtttgatttaatggtatttattttaatttaaaggttatttttgatttatggcgttttaattatttttttattttttttttgtaatatagtttattttaatttatatttttttttttttatttatgttgtttttattagagtttttttaaacgtaataaatgtatttttattatagtagaatgtagttttgttattttttttgttggatttttttttttatgttaatttatgaatataagtattttatatgttttttaaaatgttattgtgttagagaagttttttttgattattttattttaaattgtttttttgttttagttttgttttttttatttttagtatatttatgattatttgagatattatgtattatttttttatttgttgtttttattttttaattatagtgtaaattgtttgaaggttaatttttattttttttagattttgttgtatgtgtagtatttaaagagggttttgttaggttatcgagtgttatttaatgtataaatgaaggaaagtaattgttgataaatttatggagaatattgttgtgttttgaatttttgtttaaagttatggagtgatatgggggttattttttggtttgtagggattgagataagaaaagtgaggattttggaggtttagtatatgtgttgtgataaaggaatttaggagtaaattaaatgttagagtaaatacgtgtaataatttagttgcgtttgaagtttatatgttggttagatataagatgatagattaaatgagaaatatgtgatttcgtaggatttttgatataaggtgttttagttagttttattgaaatttgaa

SEQ ID NO: 1733 - DNA, 7851 bp, Artificial Sequence
  chemically treated genomic DNA (Homo sapiens)
tgtgaggaaatgaattaattattatttatagggtaggtattttttaaattgtaggtttaaagataaaaataacgagggaggttgggtatggggatttacgtttataattttagtattgtgggaggttgaggcggtaggattatttgagtttaggagtttgagatttgtttgagtaatacggcgagatatcgtttttacgaaaaataaaataaaaaattagttaggtatggtggtgggtatttatagttttagttatttaggaggttgaggtaggaggattttttgagtttaggaggtcgaggttgtaatgagttattgtattattgtattgtagtttgggtgatagagtaagatattgtttttaaaaaatataaataggtcgggtgtggtagtttacgtttgtaattttagtattttaggaggtcgaggtgggtgaattatttgaggttagaagttcgagattagtttggttaatatggtgaaattttatttttattaaaaatataaaaattagttgggtatggtggtaggcgtttgtaattttagttatttaggaggttgaggtaagagaattgtttgaattcgggaggtaaaggttgtagtgagtcgagattatgttattgtattttagtttgggggataggagtgagatttcgttttaaaaaaaaaaaaaaatatatatatatatatatatatatattttttaaatgtataaatatattatatatattttaatatataaatatattatatatattatatattttaatatataaatatattatatataatatattttaatatataaatattatatatattatattttaatatataaatattatatatattaattatatattttaatatataatatatattatattatataataataaattatatattatattatatagtaataagttatatattatattatataataatatagtataatatataatatatattataatatatattatattatattatattatattatatattataatataaattatatatattttatatatatgttttatatattatatattttaatatatgaaataggggaattttttttaaggaaaagatagaattaaggtaataggttgattttagtttattagagaagaaattgaggtcgggagtaggagtttagtttattgaagggtagattttaagttagagtttaagtttttttatttttttatttatttaattttttttgagatggagttttatttttgttgtttaaattgagtataatggtataatttcggtttatcgtaatttttgttttttgggtttaagttattttcgtgttttagatttttaagtagttgggattataggtatgtgttattacgttcggttaatttttgtgtttttagtagaggtggggttttattatgttggttagattggttttaaatttttggttttaagttatttgtttgttttagttttttaaagtgttgggattataggtatgagtcgttgtgtttggttttatgtttttttttttgaatttagagttttttttcgtgtagtgagtgtttttgtttttttagttttttttgtgggttttgtttgggtttgatttttgtgagagatttggtaggaataggtttgttaggttttgtggggagtgggtgtgggaataggttttgatatttaatttagtaggtgattttgagatgggaggatatagggttgtttgggatgggcgttttagttatagtaaggtttggtttatattaagtagggattatttatggcgttatttttaggttttatttttttagtatgttatagaaaattatttgggtagtagaggtgtgggaagaaaataaaaaagaaagttgggtataagtggtatacgtttgtaattttagtatttttggaggtcgaggcgggtggattatttgaggtcgggagtttaagattagtttgaataatatggagaaattttgtttttattaaaaatataagattagtcgggcgtggtagtatatatttgtaattttagttatttgggaggttgagataagagaatcgtttgaatttaggaggcggaggttgtggtgagtcgagatcgtgttattgtattttagtttgggtaataagagtgaaattttgttttaaaaatagataaataaataaataataaaaaaattttaaaaattagttgggtatggtggcgtgtgtttgtaattttagttattagggaggttgaggtaggagaatcgtttgaattcgggagggggaagttgtagtgagttaagattatgttattgtattttagtttgggtaatagagttaagattttgttttaaaataaataaataaataaataaaaaaacgtaggaaaagagtgtgtgatggttgaaatttgtaattttttatttttaacgagttttggttttaattaggttatttgggttttttttttaggttttagggatttttgtttaaagttttagtaatttgggttaggtataatggtttacgtttaaaattttagtattttaggagattaaggcgggtagattatttgaggttaggagtttgagattggtttggttaatatggtgaaattttgtttttattaaaagtataaaaattagtcgggtatggtggtgtatttttgtaattttagttatttaggaggttgaagtataagaattttttgaatttgggaggtagaggttgtaatgagttgagatggcgttacggtattttagtttgggcgatagagtaagattttgttttaaataataaaaaataaataaaataaataaggttttagtaattttattaatttgttatgaagattgatataggggtattatttgttttaattttttgatttaggttagttttatatttttattttaattttatttttattttcgttttatatttattatttttaaaatttttatggtttttcgggggtagttgtagatatattaagtttagggttatggggttattggaattttttttagtgggtttgaaaatattagtattttaggagttgatgagtttttatttgggtattatttttttttgggtttgagaaggtcggggggaatttgtaaggaatatgtggaattttatatggtgtttttgatattgcggtaatgttagggagaggtttgtttaattggttagggttttgaaatttcgattatttttttatttttgtattttgaaggttagtagagaggaggaattttgagttttttaggaggtgggtaggtggtggtagtatagatttttagatgtttaaacggagttgtagagagaaggttttttcggtagattttggaagggatttttacggtagaatttttattttataagtagggatagaggtttagatggggatagagacgtgtttaaggtaaaataatggacggaggtagggtagggagaggttaggttttagattcggttttagtattttttttatatatatatcgatatagaagttggtttagatttataatttaatggttgtgtagattttagttttttatttttgtcgtttacgtgtttattggtttggggttagggttttttgtttaaaggtatggatgtgcgggagtttttttgttaggtacgcgtttattagtttggggcgagagatggggttaggaaaaggttagcggtgatcgtatatttcgaggttagggtgatttaagagattggtgtttttaaggttgtagtttttaggtcgtgggaatacgtatttggagagagggtttatatcgaaatattcgaagtaggggttacgaaggcgggatttttaaggtttttgagttacgttagggggagtgcgggagttaggttgtaggggtagggggagtggttggggttgtggtataggagttaggtaaggtgtttttagggttttatttgtgtttttgaagtagcggttttttttcgaatttggtcgatattattaggattcggaagttataggagtaacggttgagggtcgtgttttttattttttatcgagcggaagaatatgaatggtgtcgaattcgtttttcgagtttttttttttttgttcggcggtttaatttattatatgtttcgtttttaggtttcgttgtagtttttcgcggaggtattcggcgttgagttttatggcggtagtttagttggaacggtagtttagtagggatataattttagttcgggcgtcggttacgttattttgttgttttataggagttattttcgttggaaaatttattttcgtttttattaaggcgtacgttaacgtagtattttcgtttttaagtagtcgggttttttagcggtttaggtttttcgcgtttgttatgtgttagttaattagagtttgaggaaggtgggattcgggcggagtcgatgttgaatggtacgcgttcgtcgattggatagtagtttggttttcgcggtcggatttttatattcgtttttagataggagaggggtacgtatcggcgttacggttttttgtaggttgttttcggatagttttcgagagtttgtttcgaagtaagtattttgtagttttagcgatttagtttttttttggattttaggttacggtaattaattttttgttgtggttttcgaattttaaggttcgatgggtttcgcgggggtcgcggcgaggttagggcgttttttcggcgtttatttgttttattgtttgaattttcggtatcggggtcgcgtttacgtggggtttattgttaatattgttcgtcgggtttagtagtataatgggggtcgtaaaaaaggcggggtttggcggattagcgggcgagggttttggtgagagggggaggttttttgtgtcgggaggaaggcgttttagaggaggcggatttcgcggggtataggtttgttgagaaggatcggttaggattgtgatagaggcggggcgtttgtggtggggacggggtttgtcgtaggggaggagcgtgacggggaggcggtgttcggggtattttcgcggcggaatttagggaaggagttagttggggtcggggtgatgatttaggttgggttttagtatagggtttttggtgggtacgttggggtcgggtggaatgtaggagagagaggaggtgggataggtgggtatttgggttggaggtagggtttgaggtgggtaggtgtagagggttgtatttttcggttgaagtcgggaatgaggatttcgttttcgggtgggattggaggggattcgcggttgaggcgttgggttgcgatagggatattatcgtttttttttttagggagatggtgttcgtcgtgtacggtttttcgtttttcgtggtcgtttttcgggtaaggaaggagatcgggtagcggcggtcgggtgagggtttgggtttcgtttttcgtttcgagtcgttttgatgtttttgtacgtcgttcgtagtttgagtgggtttggtagtattcgtacgtttcgcgtcgtttggcgtacgtggggtttcgtttgcgaggagagatagttttcgttttttatttgcgcgtgttggcgtatatgttgcgcgtatcgttttgggttcgtttttcgtttacgttgcgttgggtgcgtttagattttcgttaggatttttgtttttcgtcgtcgtcgtacgtgtttttggttttcgggtttttatcgttttaggtttcggttttaaggcgtcgcgtaggtttttttgatgacgcggagtttgagttagattagggggatttaggggtttgttgttttttgtgcgtttagattatttaggtgaggttttttcgaggaatggatggttttagagtttagacgatttcggatttagtttttttttgagggaaatttattgatacgttttggttattttatttttatttttaagatgttgatgttataggatttacggttatttttgagtaaagtaggttttgtttagggtttttattattttttttttaaagaaaaggtttttttttaggttattagtatttcgttgtattttagtgtggtcgatagagtatgattttttttttttttttttttttttttgagatggagtttagttttgtcgtttaggttagagtgtagtggcgcgatttttgtttattgtaagtttcgttttttgggtttacgttatttttttgttttagtttttcgagtagttgggattataggcgttcgttattacgtttggttaattttttgtatttttagtagagacggggttttatcgtgttagttaggatggtttcgatgttttagtttcgtgattcgttcgttttagttttttaaagtgttgggattataggtatgagttatcgcgttcggttttttttttttttttagatagagttttgttttgttgcggaggttggagtgtagtgattttagtttattggaagtttcgttttttgggtttaagcgatttttttattttaattttttaagtgtgttattatatttgtcgaatgtttgtgtttttagtagggatggggttcgttatgttgggtaggttggttttaaatttttgattttaagtgatttgttcgtttcggttttttagagtgttgggattataggcgtgagttattatgtttggatatgattttgtttttaaaataatgtaatgaattgtagtttatttttgtgtgtatttttttgtatttttttttttttaatatttattattgtttggtatgttacgtgtttttttgattttattagttttttttattttaattgttatattgtattattagagggtagtatttattattgttgtagaataaagttttgtattgagtcgatggtttagaaattttttttttatttatttatttatttttttttttgagatagagttttattttgtcgtttaggttggagtgtagtggcgcgattttagtttattgtaatttttgttttttggttttaagtaattttttttttttagtttttagagtagttgggattatacgcgtttgttatcgcgtttggttaatttttgtatttttagtagagatggggttttaattatgttggttaggttggttttaaatttttgattttaggtgattttgtttatttaagttttttaaaatgttggtattataggtatgagttatcgtgttcggtttaaatatttaataaaataatggacgatgggtgttttttattgagttttcggtaattgtgagtgagtagaggatttgttttggggatatttagtgatttgttgggtgttgttgagttgtgaggaagtttaggtttggttgtagtggtgaggttgtgatttaattaattattgttgatgtttttaggatttgtattagtttagttttaggggtaaggattttaattgtttattttagtttttttatttgtaagatgtaaataatagttatttttgttttatgggatggagttgtgtaatgttcgtaatagtgtttgttgtatagaggggttgttgttagttgtttttttttttttgttttttatttgtttgttgtttgggttaggatgaagaggggtttttgtgttgtttttattttggttgtttgttaagggtttatgtgatttgtttggtagaggagtttttttaggaagaattagggtagtttttgtttttagagggttaatgtttttggtgagtgtagttttttggttttagtttggtttatttttgggaagagggtgtttagttgtgtaatttaggtttaggtagttgagtttttattttagtatttagggcggatattggagggggtttgtggtatttgattttgtattttttatttgtttttttttttggtagt

SEQ ID NO: 1734 - DNA, 7851 bp, Artificial Sequence
  chemically treated genomic DNA (Homo sapiens)
gttattaaggagaggggtaggtaggagatatagagttagatgttataagttttttttagtattcgttttggatgttgagatgagggtttagttgtttgggtttggattgtataattgggtattttttttttagaggtggattaggttggggttaggggattgtatttattaagggtattggttttttaggggtagaagttgttttggttttttttgaagaaatttttttgttaggtagattatatgggtttttagtaggtagttagggtgggggtaatataagggtttttttttattttgatttaggtagtaggtaggtaagagataaggagggagaggtagttggtagtaatttttttatgtagtaggtattgttgcgggtattatatagttttattttatgaggtaggggtgattgttatttgtattttataaatgaagaaattgaggtggatagttaaaatttttgtttttaggattaagttggtgtaggttttgggagtattagtagtgattgattgagttatagttttattattgtagttagatttgaatttttttatagtttagtaatatttagtaggttattgaatgtttttagggtaagttttttatttatttataattatcgggagtttagtagaaggtatttatcgtttattattttattaaatatttaggtcgggtacggtggtttatgtttgtaatattagtattttgggaggtttaggtgggtaggattatttgaggttaggagtttgagattagtttggttaatatggttgaaattttatttttattaaaaatataaaaattagttaggcgcggtggtaggcgcgtgtaattttagttattttggaggttgaggaaggagaattgtttgaaattaggaggtagaggttgtagtgagttgagatcgcgttattatattttagtttgagcgatagagtaagattttgttttaaaaaaaaaaataaataaataaataaaaagaaaatttttgggttatcggtttagtgtaggattttgttttatagtagtgataagtgttgttttttgatagtgtagtgtggtagttggggtgggagaggttaatgagattaagaaaatacgtagtatgttagataatagtaagtgttaagggaaagggggtgtagaaaagtgtatataagaatgagttgtagtttattatattgttttagagatagggttatgtttaggtatggtggtttacgtttataattttagtattttgggaggtcgaggcgggtagattatttgaggttaggagtttgagattagtttgtttaatatggcgaattttatttttattaaaaatataaatattcggtaggtgtggtggtatatttgggaggttgagataggagaatcgtttgaatttaggaggcggagtttttagtgagttgagattattgtattttagttttcgtaatagagtaagattttgtttaaaaaaaaaaaaagggtcgggcgcggtggtttatgtttgtaattttagtattttgggaggttgaggcgggcggattacgaggttaggatatcgagattattttggttaatacggtgaaatttcgtttttattaaaaatataaaaaattaattaggcgtggtggcgggcgtttgtagttttagttattcgggaggttgaggtaggagaatggcgtgaatttaggaggcggagtttgtagtgagtagagatcgcgttattgtattttagtttgggcgatagagttagattttattttaaaaaaaaaaaaaaaaaaaaagagggttatgttttgtcgattatattggagtgtagcggagtattgatggtttagggaagaattttttttttgaaggggaaatggtgaaggttttgagtagggtttgttttgtttaggaatggtcgtaagttttatagtattagtattttagagatggggatagggtggttaaagcgtgttagtgggttttttttaagaaagagttggattcgaagtcgtttggattttagagttatttatttttcggggggattttatttggatggtttgggcgtatagggagtagtaggtttttggatttttttggtttggtttaggtttcgcgttattaaagggatttgcgcggcgttttggggtcggggtttggggcggtggaggttcgaaggttagaggtacgtgcggcggcggcgggaggtagaggttttggcggaggtttgggcgtatttagcgtagcgtgagcgggaggcgagtttagggcggtgcgcgtagtatgtgcgttagtacgcgtaggtggaaagcgaaggttgttttttttcgtaggcgaggttttacgtgcgttaggcggcgcgaggcgtgcgggtgttgttaagtttatttaaattgcgggcggcgtataggggtattagggcggttcggagcgaggggcggaatttaagtttttattcggtcgtcgttgttcggtttttttttttattcgaagggcggttacggaggacgggaagtcgtgtacgacgagtattatttttttgaggaggagaacggtgatgtttttgtcgtagtttagcgttttagtcgcgggttttttttaattttattcgagagcggggtttttattttcggttttagtcgagaagtgtagttttttgtatttatttattttaggttttgtttttagtttaggtatttatttgttttatttttttttttttttgtattttattcgattttagcgtgtttattaagagttttatgttggaatttagtttggattattatttcggttttagttagttttttttttgagtttcgtcgcggagatgtttcgggtatcgttttttcgttacgttttttttttgcgataggtttcgtttttattatagacgtttcgtttttgttatagttttggtcggttttttttaataggtttgtgtttcgcggggttcgttttttttgggacgtttttttttcggtatagaaggttttttttttttattagggttttcgttcgttggttcgttaggtttcgttttttttgcggtttttattgtgttgttggattcgacgagtagtgttgatagtgaattttacgtagacgcggtttcggtatcgggggtttaggtagtagagtaggtagacgtcgaaaaagcgttttggtttcgtcgcgattttcgcgggatttatcgggttttggggttcgggaattatagtagggggttgattgtcgtgatttagggtttaggggagggttggatcgttagggttgtagggtgtttgtttcggaataagttttcggggattattcggaggtagtttgtaggaagtcgtagcgtcggtacgtgttttttttttgtttggaggcgggtgtagaagttcgatcgcggaagttagattgttgtttagtcggcgagcgcgtattatttagtatcggtttcgttcgagttttattttttttaggttttgattggttgatatatggtaagcgcgaaaagtttggatcgttggaaagttcggttgtttgagggcggaagtattgcgttgacgtacgttttagtaagggcggaagtgagttttttagcggaagtggtttttgtaaggtagtaaggtagcgtggtcggcgttcgagttggggttgtgtttttgttgggttgtcgttttagttggattgtcgttatggaatttagcgtcgaatattttcgcgagaagttgtagcgggatttggaggcggagtatgtggtgagttgagtcgtcggataaggggaaaagagttcggggggcgggttcggtattatttatattttttcgttcggtaggaggtggaggatacgatttttaatcgttgtttttgtagttttcgagttttggtggtgtcggttaagttcgaggggaaatcgttgttttagagatataggtaaggttttgggagtattttgtttagtttttgtattataattttagttattttttttatttttgtaatttgattttcgtattttttttggcgtggtttagggattttgaggatttcgttttcgtgatttttgtttcgagtatttcgatgtagattttttttttaagtacgtgtttttacggtttggggattataattttggggatattagttttttgggttattttagtttcggggtgtgcgattatcgttggtttttttttaattttatttttcgttttaggttggtgaacgcgtgtttagtagaagagttttcgtatatttatgtttttgaatagaaaattttgattttagattagtgggtacgtgagcgatagaaatgagggattgggatttgtatagttattaaattataaatttggattagtttttgtgtcgatgtgtgtgtgggaggggtgttgaggtcgagtttaggatttggtttttttttgttttgttttcgtttattgttttattttggatacgtttttgtttttatttaggtttttatttttgtttgtaaaatgaaagttttatcgtaaaagttttttttagggtttatcgagaaagttttttttttgtaatttcgtttagatatttaggagtttgtattgttattatttatttattttttagagagtttagggttttttttttttgttagtttttaagatgtagagatgagaaagtgatcggggttttagggttttgattagttgaataaatttttttttgatattatcgtagtattagaggtattatatagaattttatatattttttgtaggtttttttcggtttttttaggtttaagagggagtggtgtttaggtaggggtttattaatttttggaatgttgatgtttttagatttattggagaaggttttagtggttttatagttttgggtttaatgtgtttatagttgttttcggaggattatggaggttttaagaatagtgggtgtgggacggggataggggtgagattagagtaggaatataaggttgatttgagttagaaaattggggtaggtgatgtttttgtattagtttttataataggttagtagggttgttaggattttgtttgttttatttgttttttgttgtttgagatagggttttgttttgtcgtttaggttggagtgtcgtggcgttattttagtttattgtaatttttgttttttaggtttaaaagatttttgtgttttagttttttgagtagttgggattataggggtgtattattatgttcggttaatttttgtatttttagtagagatagggttttattatgttggttaggttagttttaaatttttggttttaagtgatttgttcgttttggttttttaaagtgttggaattttaggcgtgagttattgtatttggtttagattgttaggattttgaatagaggtttttgagatttagggagggagtttaaataatttagttggggttagggttcgttgagagtgagaaattgtaagttttagttattatatattttttttttgcgtttttttgtttgtttgtttgtttgttttgagatagagttttggttttgttgtttaggttggagtgtagtagtatgattttggtttattataatttttttttttcgggtttaagcgatttttttgttttagtttttttagtagttgggattataggtatacgttattatgtttagttaatttttggggtttttttattgtttgtttgtttgtttgtttttgagatagagttttatttttgttgtttaggttggagtgtaatggtacgatttcggtttattataattttcgttttttgggtttaagcgatttttttgttttagttttttaagtagttgggattataggtatgtgttattacgttcggttaattttgtatttttaatagagatagggtttttttatgttgtttaggttggttttgaattttcgattttaggtgatttattcgtttcggtttttaaaagtgttgggattataggcgtgtgttatttatgtttagtttttttttttgttttttttttatatttttattgtttaagtagttttttatggtatattgaagaggtggggtttggaaatgacgttatgggtggtttttgtttgatatgaattaaattttattatggttaagacgtttattttaaatagttttgtgtttttttattttaggattatttgttaagttgggtattaaaatttatttttatatttattttttataaggtttgatagatttgtttttgttaggttttttatagaggttaggtttaggtagaatttataggaagggttagagaggtagaagtatttattatacgggggaaggttttgaatttaaaaggggagatataaggttaggtatagcggtttatgtttgtaattttagtattttgggaggttgaggtaggtagatgatttgaggttaggagtttgagattagtttggttaatatggtgagattttatttttattgaaaatataaaagttagtcggacgtggtggtatatgtttgtaattttagttatttgggagtttgaggtacgagaatggtttgaatttagaaggtagaggttgcggtgagtcgagattgtgttattgtatttaatttgggtaataagaatgaaattttattttagaaaaaattaaataaataaaaaagtggggagatttggattttgatttgggatttgttttttagtgagttgggtttttgttttcggttttagttttttttttggtaaattaggattagtttgttgttttaattttgttttttttttagaagaagtttttttgttttatatattaaaatatataatatataaaatatatatataaaatatatataatttatattataatatataatataatataatataatataatatatattataatatatattatatattatattatattattatatagtataatatataatttattattatataatataatatataatttattattatataatataatatatattatatattaaaatatataattaatatatataatatttatatattaaaatataatatatataatatttatatattaaaatatattatatataatatatttatatattaaaatatataatatatataatatatttatatattaaaatatatatgatgtatttatatatttaaaaaatatatatatatatatatatatatatttttttttttttttgagacgaagttttatttttgttttttaggttggagtataatggtatgatttcggtttattgtaatttttgtttttcggatttaagtaatttttttgttttagttttttgagtagttgagattataggcgtttgttattatgtttagttaatttttgtatttttagtagagatggggttttattatgttggttaggttggtttcgaatttttgattttaggtgatttatttatttcggttttttaaagtgttgggattataggcgtgagttgttatattcggtttatttatattttttagagatagtgttttgttttgttatttaggttgtagtgtagtggtgtaatggtttattgtagtttcgattttttgggtttaagggatttttttgttttagttttttgagtagttggaattataggtgtttattattatgtttggttaattttttattttatttttcgtagagacggtatttcgtcgtgttgtttaggtaggttttaaatttttgggtttaaatgattttgtcgttttagttttttatagtgttgggattatagacgtgagtttttatgtttagtttttttcgttatttttatttttggatttgtagtttaaaagatgtttattttgtaagtgatggttggtttatttttttata

SEQ ID NO: 1735 - DNA, 5981 bp, Artificial Sequence
  chemically treated genomic DNA (Homo sapiens)
agttatgaggacgtaaaggcgtaagaatgatataatggattttggggatttagggggacgagttggcgggggcgagggataaaatataataagtagggtgtagtgtatattgtttaggtgatgggtgtattaaaattataaattattattaaagagtttatgtaattatatattatttgtattttaataatttatggaataaataataaataaataatttttttaaaaaattaattttgggttttattgattttttgtatggttttttacgtttttattttatttaggttagtttcgatgttggtttttttttttttttttgttagttttggggttgatttgtttttgtttttttaatttttttaggtgtgatgttaggcggtttatttgagatttttttagttttttagtgtagttttttagtattagaaattttttttgagtattgttttagttgtgttttagagattttgggatgttgtatgtttgtttttattagttttagataatttttttatttttgttttaattttagtttttatttaaaagttatttggaagtaggttgtttaatttttatgatgattttaggtcgggtatggtggtttatgtttgtaattttagttatttgggaggttgaggtaggagaatcgtttgaatttaggaggtagaggttttagtgagttaagattacgttattgtattttagttcgggcgatagagtgaggttgcgttttaaaaaaaaaaaaaaaaaaaaaaaaaattgtttttttttaagtttgtatttagatttttttttttttgattatttttaatttatttttatttttgatatgatatttaattttttatttattttttgtttattattgttttttttttaatttaaaaaaaaattttgtattttatgaatttttgttttaaggtgttttttttatttttaaatgtttatttgaaaatgttttttttttttttggtttattttttttggtgtgtgtgtgcgcgcgttcgcgtgtatgtgtgtattcgggttttattttttgttttttttttgtagtatttcgtttatgggagatgtatttcgtttttgttatttttttagtagagagggggttttattggtttagttagaatagtttcgattttttgatttcgtgattcgtttatttcgggtttttaaagtgttgggattttaggagtgagttatcgcgttcggtcgtttattttgttttttgtagaggttgatggtttgagtaattttcgagatttatagttcgagcgcgttttgttttgtttatgtagtgaagggtagttttttgtatttacggttttttgttggtaaggaggaatgtgtagtggttagatttgttttttttttttttgttgttgttgttgttgttgtattttattttgtagtattttaaagtgttttttttttttattttttatttttatttaggtagggtttagaaaagttaattttaggggtaggggagagagagaaagagaggaagagaaaatgagaatgaatgataatatatgaatttatgggttaatttttattttaaggtagtttaaaaggacggttttttttttttttttatttttttttttgcgtgtgaagttgatgtagtataggcgagtttttaaaattgagtttagttcggggtggttttttggttttttttagaaattaatttaagaatcgggttagtggtttacgtttgtaattttagtattttgggagttgagcggatggattatttgaggtaaggagttcgagattagtttggttatatggtgaaattttatttttattaaatatataaaattattcgggtatggggacgggtgtttgtaattttaacgttgtttaggagtttgaggttaggggaatcgtttgaattcgggaggtcggaggtttgtagtgaatagagatcgtgttattgtattttagtttgggtgatagagtgcgatttcgtttgaaaaaaaaaataaagaatttaaggtaggtcggtggttttagacgtaatttttatcgaagttttagtgtatagttatagtagagggatatatatttgtattttttttaagattgggagaattttatattgtttgattaattgaatagtgtttcgaggatggatattaggtataaataattttttttgttatatgagttaggtaataaattaaatttaaatgtgtttaaaaaagaatttttattagaaagtcggtatatatttttagaaatttatcgggtttttgttattttagacgttattttgttttttattttatggtatttaaggatgtttaaattttggaatgtaaaataattttttttaatttgtaagtttttttataatttaggatgagaatttgtaaggatagattgtaagttcgaattttttggttatattattttaatagtagttatgttatttgtttttgtttaaatttatggagtttagtttttaatttggttaatttattgaaattaagaaaggttgaaatattagtttagttaataagtaattgtaatatattatttgtgatgttaaattggtatttatttttaattaagattgagataggaggaagataaattattttttttattattattatttttgataatggttggataaaagttgatgttttatttaaaattgtttatttgattttaagtttttttgtttgtaaataatttttttttttggttataaaattaatattttgtttataatttatttataagatttaaaatattaaaataggatattttttttaaagtattatgatttatataataagaaaaagttaaatataatttgtaaaagttatatgtttatagtatttgtattagtatagaaaatagtaaatagtattataatgattatatatttaattttttatattttattttatataatattataatataaatattatttggtgattattaaagagagtatatggttttttaatattttaatttaaaataaaattttttaaattttattgtaataaatgtttaatttttagaaaagttgaaaaaaatttatattgattaatataatttgttatttcgatttaaaattagttaagttttgttatatatgttaaaaatatagattttaaaattttgttgtagatagtatgatgtttttttatagaatagtttagaaaagatttttttaaaataagaatagttttttatattaatatagtaggatatgattaattagaatatttttaaggttaaattttagtacgtttttttgtagttatgtgtatgtgagtatttttattcgtttttaatttgtttttgaagagtgtgtaatagtattattaagtagattttttatttagtttttgtttttggtttggttgttatttcgtaagaatgagttttttggatttttttaatatgtgattttttttttttatttagaatggtgattttaaatgtgtgagtgtatgtattattttattttagatatttgtatttttaatttatttttatttttttaaagttagaatatttgttaattgatttgttgtataggttttttagaaatatataattaggttgggcgtggcggattataaggttaggagattgaaattattttggttaatacggtgaaatttcgtttttattaaaaatataaaaaattagttgggcgtggtggcgggtatttgtagttttagttattttggaggttgaggtaggagaatggtatgaatttagtaggtagagtttgtagcgagtcgagatcgcgttattatattttagtttggacgatagagtgagattttattttaaaaaaaaaaaaaaaaaaataaatatataattaatatttaaggttgggtgttgttaattttttgtgaaaatttaaatattattaaggaaatagggagatgttattaatttttgattttttatttaaaaatatatatgtttatgtaaataaatttttttatatttatagtgattttttaagtatttgagtttaaagatttttattttatatttttatatcgtttaaattgtttataattattatatatacgttagttattaattaaagttgtattttaaaaatttattataatatatatattgttaatatttgtatttattttttttttttttagagtggaggtataattgtgtgatattttagaaatatagataaatgatttaaaaagttttagggagaataatgtttttttgatcgtgaataattgattagtaatttttgtttatatttttttgagagtatatgataaatgtttttaaggtaataagatgagaatagataaagattgtgtggttttttggatttggagagatatattttaatttttaaatgtagttataaattataatgtatttatatttgtattttttgttaaaatgtacgattgtaggattatttagattttgtgtttatgtttgatgaaaagttttgtttttgtttttaagtttgtatttaaattttaagaaataaatttatttatattattaaaaaaaatatttgttttcgtgtttgttattcgattttgtagtttatttttaggaacgtaagtttagatgatttttaaaatggtttttagataagtttatgattgtttaatatttttaattttttgagtatgggttatattatatttttttttattagtaagtaaattttataataaatatgtgatatgttgggataaggttaaagatcgttttatttttgttgtaaaagttgatttgtttgtagttgttatagtttttagcggtggttatagttgaaatttttatattacgtaggaagaggttattattatgtcggacgattttttatggtttgaaggtatagttttttttattatgggttttagattcgaaattttaagaaaagtacgtgatgagttcgtgataagggatgaagatgtaataatattgatttattttaaattaggtaaggaggtagaattgtgaattgagaaaggttgtggttgtgtttttgtttatttagtgtatgattggagttttttttttatgttagatagtgtataatgttttaaggggaagagaggaatgtttaatattattgataattagagaaaaggatttagttaggaaattatatagtaggatgagtgtttagaggggtaatttaaggtattaggagaatttataggagtgaattttaaggtaaatttaggtgtttgtttggtggtagtgggagggaggatggttgaggatgattaatgatgttttgaaagaagaaatagtatttaaatggaaatgtaaagaatgagtatgaaattatttggggggagggttatttttagttaggagaattattagggtaatggttaggaattataaaagagttaggtaattttaaggggttgaaagatgaggattatatgtttttgggagtggggttgtgggtggagggcggtaagagtattgcggatgcggtgaggattgaggttgaagatattggaagtggtatggttttgagaggttaagagtaatgggaatataataagagggattttagtaaatagttaaaagatggaagtaatttagatatttattgataggtgagtgaataaataaaatgtggtatatagttataatggaatgttatttatttttgagaaggaagaaaattttgatgtatgatatagtagagataaatattaaggatattatgttaaatgaaataagttagttataaaaatataaatagtgtgtgattttatttatataaggtatttggagttattaagtttatagaaatagaaagtatattggcggttgttaggggttgaagagaagggtaaatggggagtcggtgttggttttgtatagagtttcggttttgtaatataaaaattttttggagattggttgagtagtattgggaatatatttaatatttaatattacgaaatcgtaggtttaaa

SEQ ID NO: 1736 - DNA, 5981 bp, Artificial Sequence
  chemically treated genomic DNA (Homo sapiens)
tttaagtttacggtttcgtagtgttaagtgttaagtatatttttagtgttgtttaattaatttttagaggatttttgtgttgtaaaatcgaaattttatgtagagttagtatcgattttttatttatttttttttttagtttttggtagtcgttagtgtattttttgtttttatggatttgatgattttaggtattttatgtaagtggaattatatattatttgtatttttgtgattggtttattttatttagtataatgtttttgatgtttatttttgttgtattatgtattagaattttttttttttttaaggatgaataatattttattatagttatatattatattttgtttatttatttatttgttagtggatatttgggttgtttttattttttggttatttgttgaaattttttttattatgtttttattgtttttggttttttagggttatgttatttttaatgtttttagttttaatttttatcgtattcgtagtgtttttatcgttttttatttatagttttatttttagagatatatgatttttattttttagttttttgagattgtttggtttttttgtggtttttggttattgttttgatgatttttttaattgaaaatagttttttttttaagtaattttatatttattttttgtatttttatttaaatgttatttttttttttaggatattattggttatttttagttatttttttttttattgttattaaataaatatttgaatttgttttgggatttatttttgtggatttttttaatattttagattatttttttgaatatttattttattgtgtaattttttgattaaatttttttttttgattgttaatggtattaggtattttttttttttttttaaagtattgtatattgtttgatataaaggaagaattttaattatgtattgaatggataggaatataattatagttttttttagtttataattttgtttttttatttgatttggggtaagttaatattattatatttttattttttattacgaatttattacgtattttttttaaggtttcggatttgaaatttatagtagggaaagttatgtttttaaattataagaaatcgttcgatatgatgatgatttttttttgcgtggtgtgagggttttaattgtagttatcgttggaggttgtggtagttataggtagattagtttttatagtaaggataaaacgatttttaattttgttttagtatgttatatgtttgttgtaaagtttatttgttgataaagagaggtataatgtgatttatatttaaaagattgaagatgttgagtaattatgaatttatttagagattattttaggggttatttgagtttgcgtttttgagagtgaattgtaagatcgaataataaatacgaggataaatattttttttgataatatgggtgaatttattttttaaggtttgagtgtaaatttaaaaataagaataaagttttttattaagtataaatataaaatttaaataattttgtaatcgtgtattttaatagaaagtataaatatgaatatattataatttgtaattgtatttaaaaattaaaatatgtttttttaaatttaaaagattatatagtttttatttgtttttattttgttattttagaaatatttgttatatgtttttaggaaaatataggtaagaattattaattagttatttacgattaaagaaatattattttttttgagattttttgaattatttatttgtatttttgaagtattatataattatatttttattttagagaaaaaaagagtaagtataaatattagtagtgtatatattgtagtaaatttttaaagtataattttagttgatggttgacgtgtatgtaataattgtgaataatttaaacggtataaaaatgtgagatgaaaatttttagatttaaatatttgaaaagttattatgaatatggaaagatttgtttgtataaatatgtatgtttttagatggaaaattaagagttagtggtatttttttgtttttttaataatatttggatttttataaagaattggtagtatttaattttaagtgttaattatgtgtttgtttttttttttttttttttgagatggagttttattttgtcgtttaggttggagtgtagtggcgcgatttcggttcgttgtaagttttgtttattgggtttatgttatttttttgttttagtttttagagtagttgggattataggtgttcgttattacgtttagttaattttttgtatttttagtagagacggggttttatcgtgttagttaggatggttttaattttttgattttgtgattcgttacgtttagtttaattatgtgtttttaaaggatttatataatagattagttggtagatgttttagttttagggagatgggggtggattgggggtgtaaatatttgagataagataatgtatgtatttatatatttaaaattattattttaaatgggaaaaaaaaattatatattgggaaagtttaagaaatttatttttacgggataatagttaggttaggagtaaaagttgaatagaaggtttatttgataatattgttatatattttttaaaggtaagttgggaacgaatgagaatatttatatatatataattataggaaaacgtgttagaatttaattttgaaaatattttgattgattatattttattatgttaatgtaggagattgtttttgttttaaggagattttttttaagttattttatggaaaagtattatattgtttgtaataaaattttaagatttatatttttggtatgtgtggtaaaatttaattaattttgagtcgaggtgataaattgtgttggttaatataaattttttttaatttttttgaaaattagatatttgttgtaataaaatttgggggattttattttagattaaaatgttaagaaattatgtattttttttggtagttattaaataatatttgtgttataatattatatgaggtagaatataagagattaaatatatgattattataatgttatttgttattttttgtattggtataggtattgtaaatatgtaatttttataaattatatttaatttttttttattatgtaagttataatgttttaaagaaaatattttattttgatattttaagttttgtgaatgaattataaatagaatgttaattttatgattagagaaagaggttgtttgtaagtagaaaaatttggaattaaataaataattttaaataaaatattaatttttatttagttattgttaaaaataatagtaatgaagaaaataatttattttttttttattttaattttagttggaaatgggtattaatttagtattataaatagtatattataattatttattgattagattgatattttagttttttttaattttagtgggttaattaaattgagagttaaattttatgaatttaaataaaaataaataatataattattgttggagtggtgtgattaagaaattcgaatttgtaatttgtttttgtaagtttttattttaggttatgaggaaatttgtaagttaggaaaaattattttgtattttagaatttagatatttttgaatgttatggaataaggaataggataacgtttggaataataggaattcgatgagtttttggaagtgtgtgtcgattttttgatagagatttttttttgggtatatttagatttggtttgttgtttgatttatgtaataggaggaattatttatatttagtgtttattttcgaggtattgtttaattagttaagtaatgtaaaatttttttagttttagaaaagatataggtgtgtgtttttttgttgtggttgtgtattgaggtttcggtaaaggttgcgtttaaaattatcggtttgttttgaattttttatttttttttttagacggagtcgtattttattatttaggttggagtgtagtgatacgatttttgtttattgtaagttttcggtttttcgggtttaagcgatttttttggttttagatttttgaatagcgttgggattataggtattcgtttttatgttcgggtaattttgtatatttagtagagatggggttttattatgtggttaggttggtttcgaattttttattttaagtgatttattcgtttagtttttaaagtgttgggattataggcgtgagttattggttcggtttttgaattagtttttaggagaagttaagaaattatttcgggttaagtttaattttgggggttcgtttgtgttgtattagttttatacgtagagaagagagtgaaagagaagggagagtcgtttttttgggttgttttgaaataaaggttgatttatgggtttatgtattgttatttatttttatttttttttttttttttttttttttttttttgtttttgaagttagtttttttaaattttatttggataaggataagaaatagaaggaggggatattttaggatgttataaaataaaatataataataataatagtaataaaaggggaagaaataaatttggttattgtatatttttttttgttaataaaaagtcgtggatgtaaaaagttgttttttattgtatagatagaatagggcgcgttcgagttatgaatttcggaaattatttaaattattagtttttgtaagaagtaaagtggacggtcgggcgcggtggtttatttttggaattttagtattttgggagttcgaggtgggcggattacgaggttaggagatcgagattgttttggttaaattagtgaaattttttttttattaaaaaaataataaaagcgaagtgtattttttataaacgaggtattgtaggaagaaagtagaaaatgagattcgagtatatatatgtacgcgggcgcgcgtatatatatattagaagaaatgaattaagaggaaaggaaatatttttaaataagtatttggagatgggaaaaatattttgaaatagaaatttataaagtatagaatttttttttaagttaaaaaaggaataataatagatagaaaatgaatgaaaaattaaatgttatattagaagtgaagataaattaaaagtggttaaaggagaagagatttaaatgtaaatttaagaaggggtaattttttttttttttttttttttttttgagacgtagttttattttgtcgttcgggttggagtgtagtggcgtgattttggtttattgaaatttttgttttttggatttaagcgatttttttgttttagttttttaagtggttgggattataggtatgagttattatgttcggtttagagttattatggaaattaaataatttgtttttaaatgatttttgggtaaagattgaaattaaggtagaaataaaaaaattatttgaaattaatgaaaataaatatataatattttagaatttttgggatatagttagaatagtgtttaaaggaagtttttagtgttaaagggttatattaagaagttagaaagattttaaatgaatcgtttaatattatatttagaggaattagaaaaataagagtaaattaattttaaagttagtagaagaaaaaaaaaaaattaatatcggagttgatttgaatgaaatggagacgtaaaaaattatataaaagattaatgaaatttaaagttgattttttaaaaaaattatttatttattatttattttataaattattggggtataggtggtgtgtggttatataagttttttagtggtgatttgtgattttggtgtatttattatttgagtagtatatattatattttatttgttgtattttatttttcgttttcgttaattcgtttttttaagtttttaaagtttattgtattatttttacgtttttgcgtttttatagtt

SEQ ID NO: 1737 - DNA, 6876 bp, Artificial Sequence
  chemically treated genomic DNA (Homo sapiens)
cgggtataaggttttagggagtagggttttattattttcgaatttttttatttgattttcgattgataatagtgatagaattaggtttttttttcgggttttaatatagagaaaaggtaaaaggtatagatatataggtttttttaaaggtttgttttttgggttttgcgttttttttttaggagttaaagttttagaagtagaaaaattttcgatatttttaggatttttttgggaagtggttaatagtataggttttgaagttaggttttattgagtttgggttttttttttattaatttttttagttgtgttattagggaatggggtttaatttttttgagttttagtttttcgatagttgtaattattaggtagggttattgtgagatttaaaatacgtaaagtggttggtatatattaagtatttaataattattggtgaaataaaaaggagaaaattttatttttagtaatttttttaggaagagagtaggtttggggatgattagtagtttgggaagggagtaagatttgttagagaagttttaagtgggtaagtaagttgaaggtaaatattgatttgttttgggttataatgggtatgttttttaaaaaagatatcgtgtggaagaaaggaagaggagatatgagatatatataaaggagaagattattgggggtataggagaaatacgggggtttattaagtttttgttgtgagttgtgtgaattataatttttttagttttttgtaaagagtttagtaaagtttttatttttttaaattaatggattgggtgttggttgttttagaggatgtaaggagatgttgagtttgattttaagtggttttaagggtatagagtaattaggttattcgtaggagttatttttttgtattgtgttattgtcgtgagggggattttggattaaaatttaagtgggtaagagtaagaatgttatttaatttttgtattaagtttttattttattagattggtagaaaatattagttttgggtttttttggatttttttttttatttttttagttacgtgatgttaagagatcggggagagttcgttttgtttttgttttattttcgttatttaagtatggttgagggttttttgtttttgttgtttagaggttttgttttgggataagaatatttttttttaaaatagtttttgtatgtgagttaggtatagtggtttatatttgtaattttaatatttttagaggttaaggttagggggcgggggggattttttgacgttaggagtttgtgattagtttgggtaaaatagtaatatttttatttttataggaaaaaaaaaataattttaaaaatttaaaaagtttttgtatggattttttaatatagtttatatataatttgttttttttgggtggttgttttttagttatttttataatagataggtagggaggttgggtataggtttttttttaaaagaatttttttttttatttttttttttttgatatggggtaggatggagatgagataggagattattttttttttttaggttttagttaagatattttgtttttatattagtttttttttttattggttttatagttttttaagtttttttgtggatataggttttgagtatttgaaggagataggaaaggatatattttttttagttagtaagggttattcgaatttaggttttgtatttgttttttattattttatagtataggttatattatgagttttgtttttgtttgtttttaattaggtcgttgttgattgtggttattgaaagggtttatttttttaattataattttattttattacgttattattgttattgtaatgattttttttgttatggttattggaatattggtatttttagttagttagatagagataaaggtattaaggttagaataatattagagttggaagggattttttgtttgtttgttttgttttgttttgttttgagatagggtttttttttgtcgtttaggttggagtgtagtggttcgattatggtttacggtagttttaatttttttggtttaagggatttggaaaggatttttttgaagttttgtattagtttttttattgtattttgtttgaggttatatttatttagtagtcggtgagtgtgagaatttaatttcggaaatttagttttagtttttattttgttaggagaatggttgggaatttttagagcggggtatttttgtttaaagtaagtttttagagtttgatttttttttagtttttagtaagagaaataaaaggtatggttagaggtggggaagtattagagatttagtattttttcgatagaggtagacgtagttttgttatagatatgaatgattttgtatgttatatatcgttttgcgtttgtgttttggatatttttttttgttagtaagtataattttattttttgcgtttgttttatagtattttatagtatagataatatttgttttttgtttgtttgggttttgtttgtttgaattagttttatattgatgagtatttgggttgattttaggaatataatttatatattataaaggaagtttttttatgttttcgtgcgtatttgattttatatttttttaaagtaatttttttatttatatggtgggtagtgtggtgtatgtttttagtgtagatttaggtgtagggaaaggtggaatttgtttatagttatatagtaagtttgtgttagagatggtaaatacgagtttttaagattttagatttaatatttttttagttttagttgatgtttttttaatattagattttttgtttgttttaaatgatttagaataggtaagtgtgagggttgtattaggtaatgtggggtgagggagagattattaaataattttgattgattaaggggttgtcgtgtgtagttatttatgggatgaagtagtttggattatttttttaatttgtaaagtatatttatatttatgattttattttaattttttgggttttatattattattttttttatttagaaataaggaaattgaagtgtagaatggtaatttgtttttaaattatataattagtagtagtagagttaggattaggagttttgttttttaaaagtaaatatattattattgttaaaaagaaagatagtattgttgaaagtgtgaaaaaattgaaattgtaattataaaagaaaataataatattgtagaaaatatgaaaaaaaaaaattttgaaagtaagaaaaataaattaaaagaaaaaattttattgggtgattatggatttgttattttatttttttgaattttagttgttttatttttaaagaaagggaatgaggataagtatagcgacggtagttagtatatattgagtatcgttttattaaatttttaagtttgatttttttttgtaggttttatgtaagtatatatatttcgtacggttataattatgggaagtataattttgtttgtcgttttttatttgatattattttgtaaagtttttttattgattatatagatttagttagtatcgttttagtagttgtattttttaaggttgattaatttttgtttttggtgttggatattttttgttattaagtttttattattttggttgatgttgtaagaaatattttttggtttttgagaaattttttaaagttagagattgaggtatttagattttgaatttttgtttttttaaggttttttatttaattttatttgttttttgttttagggtttgggtagagtttcggttttgttgatagcgtgttggagaggtttattaggtttagtagttttagggtaggtttagtgaagtttgtaggtaaaggggttgaaggggttttttttttgtgtttttttgattgtttttaagaatatgtgtatttatgttttatattttaattaggaaagttttttttaaatttaatttttaaattttattttttgttttttttatatataatataaatttttttgggttatagttttgtgagaatttttttaaaacgtataggaagatataatgttgtttttataattgtacggtgttttttaattgttaagtttgttttaggtgaggttaagaattttagtttttttttattgttttatatttatttggttagatgcgttttttaaatttttttttattagtttggggttgttatttattttatttattggtttgttagtcgttgtaaggttgttatgtattagaggtatgagtataaatgatgggggtggggacgggggatttgaggagttgggtttaagttatgtttttttgtttgttggtattgagattttgggggaagttatgttattggtttttttttagttttttcgtagtttgggtttttttattagaaaattggaagcgattagaatttgtatttagtaagagttttgggatattttttgtgtgaaagtgttagatacgttgtaaagtagtatttaggagtgttttatttgggattatttttgaaaatgtttaagttttattttattattattattattataaggtaacgttttgttttattttttttatttatgttgggtggagatttgcgttatttttcggttttttatatttattcgtattacgtttaggtgaatttatattcgggattttgaattcgtttattttaggttttgcgggtttttttttttttttttgtacgttttattttttttttttatttagattttagtgtgtttatattttattttttattttagtttgtttttttttttttttttagcgtacgcgtgtattagggtatttacgaagttatttcggtaatatttgggagtacgcgtttttatatttggaaggtgggcgtaagcgtagtagggtcggtcgggtttttcgtcgtttttcggtttcgtaggtggtggagtagggcggggtgagggagggggaggttagcggggttgggcggggttcggggggcgggggtttgacggtcgggtcgggcggcggagttgtaagggatagaggcgcggtaggcgcgcggagttagcggagttagttgagttcgagtttagttcgcgttcgcgtcgttatgtttttggttttttgcggtagcgagaattattcggtcgtttatcgggtggattagggggtttttaataacggttgttttgtggacgcgtttaacgtggtgtcgtacgtttttttattttttattattttttttattttttttattggtgagtgcgcgtagcgagtcgcggaggaggggacgggagagtagggagggaggaggaggcgttgcgcgtcgtatcgttcggcgttttttttcggttcgcgatcgtcgttcgtttcgttttcggggttttttgttttgtgttttgttcgtcggttttcgtattcgtatattagtttatttttttattttttcggtgttttcgatttcgcgttaaatatagcggacgtttgtgatttatgggattattaagttttgtttttgtagggttaagagttgggatggggaaaagggaaagaggaggttttagtacgtagtgggaaattggagaggggtcgggttttatttttcgtggcgtagtttagggagtcgggttatttttttcgtaaggtagtttttttgttagtcgtagttgggtttagggaagagggaagtttgtgttttggagtttgggatggaggtttagttaatttttatgtttttatcgggttgagtcgcgtagtggttcgtgatttttgatagttttaggttcgcgttttgggcgaggagaggcgagagttagggatttggatttttttttttcgttattttattcgggtatgtgtttttagagcgtaattttttaggttttgcgtaaagtagtttcgattcgtcgacgtagcgatttcggcgtttttgtttgtaaagttgggcgttacggtcgggataatcgtgcgtgtttttttattgaggttttttttatttttttttaagattttgatttttttagattagttaagtttattaatttatagggtgttttttgtatttttaaaacgtgtttatttattttaagaaaataagtaaattttaaaatttatatatagttttggggaagaaaggaaagattgttataaaattagatttataagaggttgttgtagaagtagagttgttagttattaataaagatagttagatagaaatagaaataaaatatataaaatatgtgtttatatgtgtattaaaaattaaaaaagaatagtatttatatttttgtttttagttaaacggtttattaatttgatgatttgttatataagaagttagtatgtataatggggtattttggtagggtatagtggtttatatttgtaattttagtattttggtgggttgtgataggaagattgtttgagtttaggagttcgagattagtttgggtaatatagtgagatttttttcgttttttttataaaaaattaaaaattagttgagtatggtgatgtgcgtttgtagttttagttatttaggaggttgaggcgggaggattatttgagtttaggagattaaggttgtagtgagtcgtgatcgtggtattgtattttagtagaggtaatagagtaagattttgttttagtaaaaaggtgtggtgggggaggtattagtataggattaggttgaatgagttggacgtttagtttgtgtgtattagttttggggatttttatgtgtaggtgttatttttattatggatttaatgtttaagtatttttttggggtttatgtatttttttttttttttaagtgggtaggtattttgtttttgattgtttttttttgtagg

SEQ ID NO: 1738 - DNA, 6876 bp, Artificial Sequence
  chemically treated genomic DNA (Homo sapiens)
tttgtagggagagatagttagaggtaggatgtttgtttatttggaggaggaagagggtgtatgaattttagaaaggtgtttgggtattgggtttatggtgagggtgatatttatatatgaggatttttaaggttggtatatataaattaaacgtttaatttatttagtttggttttatgttggtattttttttattatatttttttattgagatagggttttgttttgttgtttttgttggagtgtagtgttacgattacggtttattatagttttgattttttaggtttaagtgattttttcgttttagttttttgagtagttgggattataggcgtatattattatgtttagttaatttttaattttttgtagaaagggcggggggggttttattatgttgtttaggttggtttcgaatttttggatttaagtagtttttttgttatagtttattaaaatgttgagattatagatgtaagttattgtgttttgttaaggtattttattatatatattaattttttgtgtgataagttattaggttaataaatcgtttggttgagaatagaagtgtaaatgttgtttttttttgatttttgatgtatatatgagtatatattttgtatgttttatttttatttttatttaattgtttttgttaataattagtaattttgtttttgtagtaattttttgtaaatttaattttgtgataatttttttttttttttttaaagttgtatatgaattttaagatttgtttgtttttttaaagtgaatgaatacgttttggggatgtaggggatattttatgagttgatagatttgattggtttggaagagttaaggttttggagagagatgggggggattttagtggagaggtacgtacgattgtttcggtcgtggcgtttaattttgtaagtaagggcgtcggggtcgttgcgtcggcgagtcggagttattttgcgtagagtttgagaagttgcgttttggagatatatgttcgggtggggtggcgggggaagggaatttaagtttttagttttcgttttttttcgtttagggcgcgggtttgggattgttagagattacggattattgcgcggtttagttcggtgaaagtataggggttagttgggtttttattttagattttaaagtataggttttttttttttttaggtttagttgcggttgatagggaggttgttttgcgggaggggtgattcggttttttaagttgcgttacggagggtgaggttcgatttttttttagttttttattgcgtgttgagatttttttttttttttttttttattttagtttttggttttgtagaagtaaaatttggtgattttatgggttataaacgttcgttgtgtttggcgcgggatcgggggtatcgggggagtgaagggatgagttggtgtgcgagtgcggggatcggcgggtaggatatagggtaggggatttcgggaacgaggcggacggcggtcgcgggtcggaaggggacgtcgagcggtgcggcgcgtagcgtttttttttttttttttgttttttcgttttttttttcgcggttcgttgcgcgtatttattaatgaagaggatggggaaggtgatgaagagtaggaagacgtgcggtattacgttgagcgcgtttataaagtagtcgttgttgaggattttttggtttattcggtaggcggtcgagtggttttcgttgtcgtagaaggttaggggtatggcggcgcgggcgcgggttgggttcgggtttagttggtttcgttggtttcgcgcgtttgtcgcgtttttgttttttgtagtttcgtcgttcggttcggtcgttaggttttcgtttttcgggtttcgtttagtttcgttggttttttttttttttatttcgttttgttttattatttgcggggtcggggggcggcgaggaattcgatcggttttgttacgtttgcgtttattttttagatgtggaggcgcgtgtttttagatgttgtcggggtggtttcgtgagtgttttgatgtacgcgtgcgttgggggagaggggaaaggtaggttaagatggggagtggggtgtgggtatattggagtttgggtgggaaaggagggtggggcgtgtagaagaggagagaagggttcgtaaggtttggagtgggcgggtttagggtttcgagtgtgagtttatttgggcgtggtgcggatggatgtagagagtcgagggatggcgtaagtttttatttaatatggatgagaaaagtggggtagaacgttattttgtggtggtggtggtggtggggtggggtttggatatttttaaaagtggttttaggtggggtatttttaggtattgttttatagcgtatttggtatttttatataagggatgttttagaatttttgttaagtataggttttaatcgtttttaattttttgatggggaaatttaagttgcgagggagttgaagggaggttagtaatatgattttttttaaggttttagtgttagtaagtagggaagtatagtttgaatttagttttttaggtttttcgtttttatttttattatttgtatttatgtttttggtatatgataattttatagcgattggtagattaatgggtagaatgggtgatagttttaggttgataaagaggagtttaagaaacgtatttggttagatggatgtgaggtagtggagagggattgaaatttttaattttatttgggataggtttaatagttggaggatatcgtgtaattgtaaagataatattatgtttttttatacgttttggagagatttttataagattgtggtttaaagaagtttatattgtatgtagaaagaatagaagatgggatttgggggttagatttaaggagaatttttttagttagggtatgaagtataaatgtatatgtttttaggaatagttaggggaatataaaagaaagatttttttagtttttttgtttataagttttattgagtttgttttgaggttgttgagtttggtgagtttttttagtacgttgttagtaaggtcgaggttttgtttaggttttgaggtagagggtagatggggttgggtgaaaagttttgggaaagtaggagtttagggtttgaatgttttagtttttgattttggagaattttttagaagttaaaagatgttttttgtagtattagttaaaatagtgaaaatttggtggtaagaaatatttagtattagggataggggttaattaattttgaaaaatgtaattgttgggacggtgttagttgagtttgtgtagttaatagaaaaattttataagatagtgttaggtgaaaaacggtaaataaaattgtgttttttatgattatagtcgtacgaaatatgtatatttgtatgaagtttgtagggaaaggttagatttggaaatttggtaaggcggtgtttagtatgtattggttgtcgtcgttgtgtttatttttattttttttttttaaaaatgagataattgaggtttagagagatgagatgataggtttatggttatttagtaagatttttttttttagtttgttttttttgtttttaaggttttttttttttatattttttgtaatgttgttatttttttttgtagttataattttagtttttttatatttttagtaatgttatttttttttttagtagtaataatatatttatttttaaagaatagggtttttagttttggttttattattattagttgtgtgatttgggggtaggttattattttgtattttagtttttttatttttaaatggaaaagataataatatggaatttagaagattaagatgagattatgggtatgaatgtgttttgtaagttggggagatagtttaagttattttattttatgggtgattatatacggtagttttttgattaattagggttatttaatggttttttttttattttatattgtttggtgtaatttttatatttgtttattttgggttatttgaaataaataaaaagtttggtgttaagggagtattaattgggattaagagagtgttaagtttggagttttggggattcgtgtttgttatttttagtataaatttattgtgtgattgtggataaattttatttttttttgtatttaggtttatattgaggatatgtattatattgtttattatgtgggtgggagaattattttgaaaaagtgtggagttaggtgcgtacggaggtatgaaaggattttttttgtagtatatgggttgtatttttggaattaatttaaatgtttattagtatggggttggtttaaatagataaaatttaaatagataaaaaatagatattgtttgtattgtgggatattgtggagtaagcgtagagaatagagttatgtttattggtaggggaagatgtttaagatatagacgtagagcggtgtgtggtatataaaattatttatgtttgtaatagggttacgtttgtttttgtcggggagatgttgggtttttggtgtttttttatttttagttatgttttttgttttttttgttaggggttggaagaaggttagattttgagagtttgttttgagtaagggtatttcgttttgagaatttttagttatttttttggtaaaatgaaaattagggttggattttcgggattggatttttatatttatcggttattgggtgggtgtggttttaggtagggtgtagtaaaggggttggtgtagagttttagaaaagttttttttagattttttgagttagggaggttaaggttgtcgtgagttatgatcgggttattgtattttagtttgggcgatagagagagattttgttttaaaataaaataaaataaaataaataaataaaaagttttttttagttttgatgttgttttggttttagtgtttttgtttttatttggttgattaggagtgttagtgttttagtgattatggtagagggggttattataatgataatggtgacgtaatggagtggggttatagttgaagaaataaatttttttaataattataattaatagcggtttggttaaaaatagataaaagtaaaatttatggtgtgatttatattatggaatagtggagaataagtatagagtttaagttcgggtgatttttattgattgggaaaggtgtgtttttttttgttttttttaggtgtttaaagtttgtatttataggggaatttggaagattgtagaattagtgaaagagaggattgatgtagagataaaatgttttaattggaatttgggagggagaagtgattttttgttttatttttattttgttttatgttaggaggagggaagtagagagagaagtttttttgagagggagtttgtgtttagtttttttgtttgtttgttgtagaggtggttgggggatagttatttagaaagggtaggttgtgtgtagattgtgttagaaaatttatataagggttttttaggtttttaagattatttttttttttttgtagagatggaggtattattgttttgtttaggttggttataaatttttggcgttaagggatttttttcgttttttaattttggtttttgaaagtgttgggattataggtgtgagttattgtgtttggtttatatataagggttgttttgaagaaaggtgtttttgttttagggtagggtttttagataatagaggtaggggatttttagttatatttgaatggcgagggtgaggtaggaataagacgaatttttttcggttttttggtattacgtaattggagaggtggggaaggaaatttaagaaggtttaaggttaatgttttttgttagtttagtgggatggggatttgatatagaaattaaataatatttttgtttttgtttatttaagttttggtttaagattttttttacgatagtaatataatgtagaagggtaatttttacggatggtttggttgttttatatttttgaggttatttaaggttaaatttagtatttttttgtattttttaaaatagttaatatttagtttattggtttaaaaaaatgaaagttttattgagttttttatagagagttagaaaagttgtaatttatataatttatagtagaaatttagtaaattttcgtattttttttgtatttttagtggtttttttttttgtgtgtattttatatttttttttttttttttttatacggtgttttttttaaaaaatatgtttattgtgatttagagtaagttaatatttgtttttagtttgtttatttatttaggatttttttagtaagttttgttttttttttaagttgttggttatttttaaatttgttttttttttgggaagattattgaggataagatttttttttttttgttttattaatagttgttgagtgtttagtatatgttaattattttacgtgttttaaattttatagtaattttgtttagtagttataattatcggagaattgagatttagagaggttaagttttattttttagtgatatagttggaggagttggtgaagaaaagatttaaatttagtgaggtttggttttaaagtttgtgttgttaattattttttaaagggattttgggggtatcgaggatttttttgtttttgagattttggtttttgaggaaggagcgtaaggtttaaagaatagatttttggggaaatttgtgtatttgtgttttttgttttttttttgtgttagaattcgaaagaaaggtttagttttgttattgttattagtcgggggttagatgggaagattcgagggtgatggggttttgttttttggggttttatattcg

SEQ ID NO: 1739 - DNA, 5155 bp, Artificial Sequence
  chemically treated genomic DNA (Homo sapiens)
tgtatgtagtgtgattttatagcgttgtttagtttgaatggggttttttttaggatgttagtgagcgaggttatttttttaggtttttttgaagattatttagaagttatgtttagagagaattagttttttagagtttttgttgttttttgggtgtgggggatagatttttttagttttgttttagagggtagtagatgttatgagataaggataagtgggtagagaagatattggggatagtcgattatttagaggatatacggtttgattaggagcgggggaaatatttgaaggttttttcgaaattttacggtatgtgtttttattaatttggttgtttataggagttgaagtttttgggtttgcggtgatgatttttgaattttttttttaacgagtttaattgtttttgtgggataaataaaattttgattattgagtttttttgattttatggagaaggggttttggagtgtagggttttttttatttatatagttttagaggtgtcggttaaatatttatagaggttttttttattttcgtttttttaatagttgtaggattagatttcgtttagtagggttttagaggagtatagtgtaatgttatatatttattaggattttgtttttttttggttttggttttgtttatttattaaaggcggggaagtttttatttttgttttgatggtaaaggtaaaggtggtggttagtaattaggtttttgtgtttaggggtaaggataaatacgttatagtttatagtttgaggtaggagggtgtttttataaattagtggttttgatcgtggtttatagagtttggtttttataaggggttggttgggaagtaatggtaggtatttacggtttttcgttagttagcggtttcggtttttatggtttttgtgtgttgttggtttgggattttatttgtgaaaaaggtttagttttttttttttaaataaatggaaaattattattaggggaagttattgttatattaatagaggaggtgatagtttattttttcgcgtttttggattagttttcggtatacggtcgttttttttttgtttttattagtggtttttttttttgggggttttgtttttttattttttttgtttgttaaaaagttattagtgttatttttatttttcgtgtttttaaggttttttttggtgaatagtttagttgggaggaatatagggattggttgatagttattttaggttgagttcgttgttatttttgtaggggaggtagtattatagtttgttttttgttgatagtagagggttagggagaagtagggttcgttttgtttacgtgggtataggtttgttatgttgttattatttgtagttttttttttattattggatgtgggtttttagaaggtttttcgcgggcgaggttcgttatcgtttatttggttttttttttttttttttcggtgtattaggtaggtaggtacgtattttattttttgtttttgatattttttatttgggagataagttagtacgtgttgggtatttttatattttttacggttttttgggttatagttaatttatgaggattgtattcggttagggttttatagttttatcgttttggataaaaattagagtagttgttgggtgttttagttttgtttttattaggtgtgtagggagggtggtgggttagggttgtagttaggaggtaagaagatggtagaggtttacggggtttttattatttattttcgatttagttaggtttaggaagttacggttaggagggtattgattaggtttaaggttaattgtgttttagtgagtttggtatggttttttaaaggtaattcgggttggtagtgatgttattttttttttagtagtttgaagtttttttttagtatatgggagatttcgtttcggagggcggggtttagtggaggttggttgtttggtttttgttgttttttagtgggtgagaagggagttgggataaggtttttatggaaagattttattggagttattatcgttgtttttttgtatattggagggtttgttggggtttgttttttagtttagcgtagttattattattattttttatgggttgtatgagttttgttgggttttggttattgatgtggcggtttatttttagggttgtttttttttttgtttttgttatttatttttatggttatgtagtagttttgttattattagaacgtgaaggtagagtttttttatagttacgtttggatttttttggattattgttttgtagtgatttcggcgttttagttttattttagttttatagtttattattataattattttttatgggaatttcgtggttttttgtatttagagtttttttgtttatttttgagtagttaatatattggttggaaaaagtttaagttttaggttggtagtttttgtgtttgtaaggtttttgtaaggtgttcgttttttatttgagaaattttggttttgtttttttaatttatatttatgtttcgggagggttggattgttttttcgtatttattagaagttcgtagacgtatttttttattcgtaaattaatttgaatttgttcgttttagtttttgtttatttttttttttagttggattttagaaaggttttttggtgatttagtatttgtttaaggtcggatattgtttttatgggttgtagtttacgttttattttagttaggtgtttttgttaagttttaggtgttttattaaggttgttaggggtttttgtgttattaaatttattatttttttgtttttattttttttttagtattacgggaggatttttagtttttttttggggtttaggattaggttttttttttttttttaaattttcgtcgggtgtttatttagatttacggtgtaattattttttttatttagtacgggtgtttttgttttaaaagttcgatatttttttaatatatattttttttaatatagtttaagtttaaaatttttaaagggattttgaattttttttttaaaatttatcgtttttttttggatgatcgtagttaaggagttttttttttttaattatgtatattgtttatgtagtttttatttaattttttttatatatttattgtagtgtttttggtttggtttttgggttattcgggttgtgtatattagtttagttagttttttggagtttattttagttaatatatttttgttttagatttttatggattttggtttttttttggggtgttgttttttcgattttattgttattatatttttttagttttagtttcgagcgaattttttagcgagtttttttagtttttttgttttcgtaagtttattttatatttttcgtttagttttttttatatttcgtattgttacgtatatttatttattttcgagtttgtttttggttttgtgtttgtttgtattaaaagttgtggggttaggggttattatttttttttttattgtgttaaaaaataggtttgatgtattaatacggatcgttgaaggacgatttgtttttaagtacgttttatttggggtaaggcgggtatgtatttagatggcgatgtattgatgggggtttattgggatttatatttatatagagttcgttggtatcgtcggttttgggtgtgttttagtacgtgttttgggtatttgttgatgtgtcgtagggtgagtttgtagaataattggtgtttatagagtagagagattaaatttgtagggatagtttatagtaaggatttagattggtggttgtgttttggatttatttttggatagtttattatgcggtttggatatcgggtttttaaaggttttcggagtaattttattttgaagttgggtggggaatcgtttgatttaggtcgattgtagttttttaatgtttatcggaaaagtacgtatggtagttttattgattgttttaggatgagtttatgtaagaggatggttttatttggagtaagggtttaatgaatggaaatattttatttttgttttgacgattattataaagtttagtttttagttaaattaaagattttttttggggttaagggaagaatttaacgttgtttataattttaggtgataaattataagtttttatttatttgggaagtagttatattttataggataaattttaggtgagtaaacgagtttattaagaggtttcgtcgttgggatcgtaggtgattttagtattcgggcgtttatttgggttttagggtttttaattttgaaagagtaggggttgtagtattggcggagtttagcggaggggttgttttaattgttttgggttttttcgcgtcgtcgcggattatttacgggtttttggtgttgggtacgatgtgcggttcgaattttgtatagtcgaaggtcggggaggcgcggattagtcgttggtattttttgtcgcgggtgtagatttggagtttcggtaggcggtagggtagttcgtgatttgttaggatgtattttatttgcggacgcgtgggcgggtaggacgttaggagggttagggtttcgttttttggtgtttttttttgtcgcgtttttttttttttttttttttgatttcgtcgcgtttttttttttgttttttttttttttttgtttttttttttttttttttttttgttttttttttttttttgttttttttttagttttttattttaattgcgttttttttcgttatttcgtttttttttcgcgttgcgaattttgcgggcgttcgtttggagtcgtaggttcgggtgttttcgtagaaacgttcgtacgtcgttcggtaattcgtttatggtcgacgcgttcgcggagtagttcggcggaagtcgttcgtagaatttggagtcgggggcggggttttgggcgggatttagcggcgtttcggatgtagatgttttttgcgtttcggaagcgttcgcggggtcgggtgcgatggcggcggtggttgcgttgtagttggggttgcgggcggcggggttgggacgggtgagcgtcgggtgcggggtgcggggtgcggggtgcggggcgcggggaggggtttcggagtttagttcgttcgttcgtgttcgtagg

SEQ ID NO: 1740 - DNA, 5155 bp, Artificial Sequence
  chemically treated genomic DNA (Homo sapiens)
tttgcggatacggacgggcgggttgagtttcgggattttttttcgcgtttcgtatttcgtatttcgtatttcgtattcggcgtttattcgttttagtttcgtcgttcgtagttttagttgtaacgtagttatcgtcgttatcgtattcggtttcgcgggcgttttcgggacgtaggaagtatttgtattcggggcgtcgttgagtttcgtttagagtttcgttttcggttttaggttttgcgagcggttttcgtcgggttgtttcgcgggcgcgtcggttatgagcgagttgtcgggcgacgtgcgggcgtttttgcgggagtattcgagtttgcggttttagacggacgttcgtaaggttcgtagcgcgggaggggaacggagtggcggagaagggcgtagttgggatgaggggttgaggggagggtaggggagaggagaggataggggagaggggagaggggagagtaggagagaggggagggtaggggagagggcgcggcgggattaggggaggagagggaagggggcgcggtaggagggggtattagggagcggagttttggtttttttgacgttttgttcgtttacgcgttcgtaggtgaggtgtattttgataggttacgagttgttttgtcgtttgtcggagttttaggtttatattcgcggtaaaaagtattagcggttggttcgcgttttttcggttttcgattatgtagagttcgagtcgtatatcgtgtttagtattaagaattcgtaggtggttcgcggcggcgcggggaggtttagggtaattaggatagttttttcgttggatttcgttagtgttgtagtttttatttttttagagttgggagttttgggatttaggtgggcgttcgggtgttggaattatttgcggttttagcggcgaggttttttggtgagttcgtttgtttatttgaggtttgttttgtggggtgtggttgttttttagatgagtagaggtttgtgatttgttatttgaggttgtgaatagcgttgggttttttttttaattttagaaggggtttttgatttagttgggagttaggttttgtaataatcgttaaaatagagataggatgtttttatttattgagtttttgttttaggtggagttatttttttgtatgaatttattttggagtagttagtgaggttgttatgcgtgttttttcggtaaatattaagaggttgtagtcggtttgggttagacggttttttatttagttttagagtggaattgtttcgggagtttttaaaagttcgatgtttaagtcgtatggtagattgtttagggatgagtttaagatatagttattagtttgaatttttgttgtgaattgtttttataaatttggtttttttgttttgtaggtattagttgttttgtaaatttattttgcggtatattaataagtgtttagaatacgtgttgaggtatatttagggtcggcggtattagcgagttttgtgtaaatgtaagttttagtggatttttattagtgtatcgttatttgagtgtatgttcgttttgttttagatggagcgtgtttgaaggtaggtcgttttttagcgattcgtgttgatgtattaggtttgttttttggtatagtgaagagagggatgatggtttttgattttatagtttttagtgtaggtaggtatagagttagaagtaggttcgggagtgagtgagtgtgcgtggtaatgcgaggtgtgaaagaaattgggcgagggatgtggggtgggtttgcggagataggagggttggggagattcgttgagggattcgttcgaggttgaggttggagggatgtggtggtagtggggtcgggggaatagtattttagggagaagttagggtttatggaagtttgaggtaaaaatgtgttggttgaggtaggttttaaaggattggttgggttagtgtgtatagttcggatgatttagagattaggttaggagtattgtagtgggtgtgtggagagggttgggtgggggttgtatggatagtgtgtatggttgagaagggaggattttttgattgcggttatttaggaaaagacggtgggttttggggggagaatttagagtttttttgaaggttttaagtttgagttgtattaggaaaggtgtgtattagggaagtatcgggtttttgaaatagggatattcgtgttggatgaaggagatggttgtatcgtggatttgggtgagtattcggcgagagtttagagaagggagagaggtttggttttgagttttaggaagaggttggaagttttttcgtggtattgaagggaagatgaggatagaaaaatgatagatttgataatatagaggtttttggtaattttggtgaggtatttgaagtttggtagggatatttggttagagtggagcgtaggttgtagtttatgagggtagtgttcggttttaggtaggtgttgggttattagaaagtttttttggagtttagttaaggagggaaatggatagaggttggagcggatagatttaggttggtttgcggatgggaagatgcgtttacgggtttttgatgagtgcggagaggtagtttagttttttcgaagtatgagtgtggattgagaaggtaggattagggttttttaagtagaaggcgggtattttgtagaggttttgtaggtataagggttgttagtttgaggtttggattttttttagttagtgtgttagttgtttaggggtgggtaggaaggttttaagtgtagggggttacggggtttttatgaagaatggttatgatggtggattgtggagttgagatgggattggggcgtcgaggttattgtaaggtagtggtttagggaagtttaaacgtggttgtaagggggttttgtttttacgttttggtggtgataaggttgttgtatggttatgggggtgggtggtagagataaggagggaaatagttttggagatgggtcgttatattaatggttagggtttagtagggtttatgtagtttatgagggatgatgatggtagttgcgttgggttggagggtaagttttagtagattttttaatatataaggggataacggtggtgattttagtgaggtttttttatggaagttttgttttaattttttttttatttattaaggggtagtaaaggttaggtagttaatttttattgagtttcgtttttcgggacggggttttttatgtgttgagggaggattttaggttgttggggagagggtggtattattgttagttcgagttgtttttgagaggttatgttaagtttattggggtatagttggttttgggtttggttagtgtttttttagtcgtggttttttaggtttggttagatcggggatgagtggtaaaggtttcgtagatttttattatttttttgttttttggttgtagttttggtttattattttttttgtatatttggtaggaatagagttgaggtatttagtagttgttttggtttttgtttagggcggtggggttgtggggttttggtcgagtgtagtttttataagttagttgtggtttagaggatcgtggggggtgtgaaagtatttagtacgtgttggtttattttttagatgaagaatgttagaagtaaggggtggagtacgtgtttgtttgtttggtgtatcggaggaggaggagggaggattagatggacggtgacgggtttcgttcgcgggaagttttttgggagtttatatttagtgatgaggggggagttgtaagtgatgatagtatgatagatttgtatttacgtaagtagaacgggttttgtttttttttgattttttattgttagtagggagtagattgtggtgttgttttttttgtaaaggtggtagcgaatttagtttaaaataattgttagttaatttttgtgttttttttagttgagttatttattagaaaggattttggaagtacggaggatggggatggtattgatgattttttgatagataaagaggatgagaaggtaaagtttttaagagagaaggttattgatgagggtaggagagagacgatcgtgtatcgagggttggtttagaagcgcgggaaggtgagttgttattttttttgttagtgtggtagtggttttttttagtgatggttttttatttgtttaaaaaaagaaaattgaattttttttataagtgaaattttaagttaataatatataagaattatagaagtcgaggtcgttggttggcggaaggtcgtgagtgtttattattgttttttagttagttttttgtggaagttaggttttgtggattacggttaagattattggtttgtgaggatatttttttattttagattatgagttgtggcgtgtttgtttttatttttgggtatagggatttgattattagttattatttttgtttttgttattagggtaggagtggagattttttcgtttttggtagataagtaggattaaggttaaaagaggataaggttttaatgagtgtgtggtattgtattgtatttttttgaggttttgttgagcggggtttaattttgtagttgttaaggaaacgggggtggagaaagtttttgtgggtatttgatcgatatttttgaggttgtgtgggtggggagagttttgtattttagggttttttttttatgggattagaaaggtttagtaattagaattttgtttattttatagaagtagttgggttcgttgaaaaagaagtttaagagttattatcgtaaatttaagagttttagtttttgtaaatagttaggttaataaaagtatatgtcgtgaagtttcgagaaagtttttagatatttttttcgtttttgattaaatcgtgtgttttttgaatgatcggttgtttttagtgttttttttatttatttatttttgttttatgatatttgttgttttttaaggtagggttgagggagtttgttttttatatttaggaagtagtagggattttgagggattaattttttttggatatggtttttgagtggtttttagagaagtttagagaagtaatttcgtttattggtattttgaggggagttttatttaggttgggtaacgttataggattatattgtatata

SEQ ID NO: 1741 - DNA, 5795 bp, Artificial Sequence
  chemically treated genomic DNA (Homo sapiens)
ttttatgtttagatatttatttaagagaaatgaaaattttattatatagaaatattggtatataaatgtttaaaaaggttttgttatagttataattgaaaatagtttaaatgttttttagtaggtaaatgggtaagtattttttggtatatttatataatggaatattgtttagtaataaaaagaaataaattattgatatatgttattatattgaataattttataataattatgttaagtataagaagttagataataaaaagtatagtgtattattataattatataaaagtatgtaaaatataaattaatatttagttaagaatttacgtttgtagttatttgtaggatgagaggttgggagggagagatgtattgaggggtaagaggaaatgttaggtgtgatgggtgtgtttattttttggatttgtgatgataattttataggagtacgtatatattaaattaaaattgtgtaatttaaatatatttattttgtgttgttatttatattataataaagtttttattaaaaattttttaaaaagttttattaaaaatttattaaaaagtatttattatatatatatatatataaatttatttatatatgtatatatgtataatatatattgatatatttatatatatatatttacgatttatatatatattatatatatttaagtatatatgtttatatatatttttaatttttattataattttgttaagggttttttaaattattttgttaatgaggaaaatattttttttagaatttgtttattagagaggtataattaatattaattggtagattattaatatttgttattttgattttttatttttataagtttagagtttttttttagaagatattgatgtagtagcgtgtttgagcgttttggcgatataagggtttggtttttgagtttttaggagtgtagtttggtatagttttttatgttggtagattttggagatttacgaaggtttttttttgaagggtttttgaggttgagagttcggtttgttttttggttgttttgttttgtggttttttttttttttttttagatttggtaggtgttacgttttatttatttttagttaggatttagttgtttgatttttagttttgtgttttttggtgttttttggaattttggggaaaattttgtcggtttatgttatgttttttttttgtaatatttttttttttatagatagtttaaggagttgttttatggagatattatgtaaataaatttttatgttttatttttaaatggtttatttttttttatttttattagaaatatgagggattagatatgaagttatgagaagattgatttgatttagttgttttaggaaggtgttattttttttatagttgtgattttggtaggattttttatttaaggggaggaggtggaaagtggatggaagtaattagagaagtaattgtagtatgggttcggaggtttgttgttttgagtaaagtattggatgtgttgagtttagggataatataggtttatggtttttggaatttttatttgttttaggaattgtttttggtttttttagtagttttcgggtatgaagttttttgtattttttattgtaaatgtgtaaatgtttcgtagtttaggggtagttatttttttttagttttagttatttttgttgttatagtgatttggaggtatcgttgttatggaggtagttgtagttttttgttttttttggtaaggtgatattggcggttttatttttaattgaattttttgtttaggatgtttatttttatatatattgtgggtgattgtgttatatatatatgaaaatatatatatatataatatttttatacggagtatatatataattagaaaagaaatttatttgttttttttgtataaagagagggattattagtgtggggtaagagatacgcgaggttgttttttatttttttttgagtttgtgatatatttattgttgtttgtttttaaagataaatggttttgtttttttagaagggatagggtttacgaaaattgtttttttgggagtcgagtggggtgtgtgtgtgtgtttttttataaaatgttttaagtatgttttcggtgggatagttgtattttgaggtttagttataaggttttgttttgtttttttttgaatggttgggtttgttaaggagagatagattttgtgagcgaaatatttggcggtgttttagtttttttttttttttaaggaagcgtattgttattaattgggaattttttatagtcgggttggaggaagttttggttgtaaattgttatgtattgtagttttcgttgaaaaggcggagggagtgggtttggttttgggaatcgaggaataaagattagaaaattagttatagaaaggggaggaaaaataaacgttagaaagtgaagataggtgatattatataagtgttggttaaagtcggtgatttttaatttttatttttttcgacgtgggtggtttaatttttgggtcgtattttttaatgttttagatattttttttggagagtagaaattttattacgcgtgttagaaacggaatatttttttttgttgaagttgtatttttatttggtcgtgttttttttgttcggaatagttttagagcgatttgttaaattttttagttttttttggcgtttttcgattgtgggaaaagcggtcgcgacgtcgttcgagcggaggggagggatttagttttcgggatttttttgttttgaagtcgtaggagaggtttcgttttcgtgtttagggtttcgaggtttttaattgtttgggatttattttcgttttttttttattttttttttattttttttttttattttattttcgggaggttttgggttaaagcgatgattttttagatattttaatattcggagtaaggagagtaatacgtattacgtttttttttaaagtttaggattcgatgagttagtgaaggcgtgttaggagggttcggcgttaggagtaaatgaggtttttttggtgtttttttttagaaggaaatttttttatttcgggttagttttttgggaatatttatgtattttagatattaaaagatattgagaaatgcggatagggattagacgtttcggttttttgattcgtcggtgtaagttggagaagggagagaaggagttttgttttttacgggcggtaggtattttttttcgggattggtttttggtagtttttcgtatatcgcgaggcgggtcgatttttcgagtttcgggcggggatttttttttcggtttttttagtaattttcgatttcggagcgagttcggttgggcgaggggcgaggggtagggggtagggggtaggggagatttagcgcggggcgtagatattatgttcgcgggaaagtttttttgttagggcgtaagatttttttgaattcgttgttttattcgatgcgtaggttttttttagaggggttggggttggggtgttcgtttaggagatcgggaaatagaggttgttattcgaggtaggttttcgtttagcgaatgggcgaggtgtgtagaagcgtaaagttaggttttgaaagggggagtttgtgtttttttttttttttcgtgggttttcgttttaggaggaatgttattgtttaaagagattttattgaattatttcgtgtttagtgttatttttttttcgtttttttcgcgtaagtttttatcgaaaggtaataaaataatcgttgtcgatatcgtttggcgttgggtcgggcggggaaagcgtttcgagttttattagttcggattattcggttagtttcgatttttttttatttttcgtgaaagtaatgatatagtagaaattacgtatacgtttggtatattcgatgcgcgcgttgatttcggtaataagttttgtttttataagagagcgaggaggatattttttagaaggggttgttgtgtttgtgtatattttcgtttatttttttttgtgcgcgcgtattttttttttttagatggtgagagtcgcggggatattcgacgtcggggtaggttgatttacgattttgggtgtgcgtaacgtcgtttggggtttcgtgggcgagggacgtgtggggataggtgtatcggaaattgttagattggagagttgaggtatcggaggcgcgagaatagtattattattgcggcgagacgagcgcggcgtattttaaagttcggttaaatgcgttcgtttttgggaggggagggaggcgcgtttggagcggggataggtgaggtcgcgcgaacgttttagtttggcgcggttgcgggattcgggcgcgttgggaaagcgagtaggatttcgcgcgggaattagggagtatcgtaggttgtcgggtagtttttcgcggaagtgcgggttggggcgggttggggcgggttggggtaggtcggggcgtttagtttattttttttcggggtttgtttcgtcgttttgatggaggtgtaaatatttggagaagggcgggggtgtaggggttgggtcggggttcgtagggttggggtttcggatttatatgaaataggcgtgcgggagtttattgttggttttcggttttttagattcgttcggttgggtttgatatggtcgttttcggttaatgggaggttgttcggtattttaaagcgtgcgcggtttaattcgtcgagtattttagcgttgtcgtcgcggttttatttatggggagggtattgaatttcggtttttagagatttatattagtagagttttggggagtttaagtggaataatttttttttatttttttgttttcgttttttttttttaagttttggttcgcgtttttttttcgggtttgtgtcgggattcgggattcgggagtcgtcgtaggtttcggtttaaggggttttttttttcggaagggcggcggttaagagcggggaaggtggattttaggtagcgagtttgggtttcggggacggcggggaggggagtcggacgggaggatgagtttttttggtatcgagagcgcgggaaagagtttgtagtatcgagtggattatttgttgagcgtcgtggagaatgagttgtaggcgggtagcgagaagggcgattttatagagcgcgaattgcgcgtgggtttggaggagagcgagttgtggttgcgttttaaggagtttattaatgagatgatcgtgattaagaacggtaggtgggtgcgcgttcggagttcgcgcgcgtcgcgttttttagcgtttgggtagtttgggggatttggtaagttttcggaggtcgaatttttttttttttggaggagggttttgtgtttgttttcgttttggttaattttttcgagtgtatttttataagttttttttttggggtttttttcgcggaagtttggggaggaggaacgcgtatttcggtgtttcgatttcggaggtatttcgggattcgcgaggcgcgttttggttttcgtttgttttcgcgggatgtggttttttgtattgaaatttttcgttaggttttttttttttttttttttcgaggtcgtggagatggtgaggaggttatttggatttggtagggttcggggaagggggagtttgggagttattttttgacgttttttagggggtttttttgtgtttcgaaataattgaggtttttgtgtttagtttttgttttcggtttatttgggtagagtgggggtttttttgcgttcgtttcgtgttttttagg

SEQ ID NO: 1742 - DNA, 5795 bp, Artificial Sequence
  chemically treated genomic DNA (Homo sapiens)
tttggaaaatacggggcgggcgtaggaggatttttattttgtttaggtaggtcggaggtagaagttgggtatagaggttttagttatttcggggtatagaggagttttttggggaacgttagagggtgatttttaagttttttttttttcgagttttgttaggtttaggtggtttttttattatttttacggtttcgggagggaggggaggagaggatttggcgaagggttttagtgtaggaggttatatttcgcggggataggcggggattagggcgcgtttcgcgggtttcgggatgttttcgaggtcgggatatcgaagtgcgcgttttttttttttaagttttcgcggagaaagttttagaagaggggtttgtagaaatgtattcgagggagttaattagagcgggaataaatataaagtttttttttaggagaaaaagggttcgattttcgggaatttgttaggttttttaggttgtttaggcgttggagagcgcggcgcgcgcgggtttcggacgcgtatttatttgtcgtttttggttacgattattttattggtgagttttttgaagcgtagttatagttcgtttttttttaggtttacgcgtagttcgcgttttgtggggtcgtttttttcgttgttcgtttgtagtttattttttacggcgtttagtaggtggtttattcggtattgtaggttttttttcgcgttttcggtgttaggggagtttattttttcgttcggttttttttttcgtcgttttcgaagtttagattcgttatttgagatttatttttttcgtttttggtcgtcgttttttcgagaaaaggggttttttggatcgagatttgcgacggttttcgggtttcgggtttcggtatagattcgggaggagggcgcggattaagatttggggggaggggacgggggtagaggggtggggagaagttattttatttgaattttttaaggttttattagtgtaggtttttggggatcgaaatttagtgttttttttataaatagagtcgcggcggtagcgttggggtgttcggcggattgggtcgcgtacgttttgaagtgtcgggtagttttttattggtcgagagcggttatattagatttagtcgggcgggtttgggaggtcgggggttaataatgggttttcgtacgtttgttttatgtaaattcggggttttagttttgcgagtttcggtttagtttttatattttcgtttttttttaaatgtttgtatttttattaaagcggcggggtaagtttcggaggaaggtaagttggacgtttcggtttgttttagttcgttttagttcgttttagttcgtattttcgcgaggggttgttcggtagtttgcgatgttttttgattttcgcgcggggttttgttcgtttttttagcgcgttcggatttcgtagtcgcgttaggttggaacgttcgcgcggttttatttgttttcgttttaggcgcgtttttttttttttttagggacgagcgtatttggtcgggttttgggatgcgtcgcgttcgtttcgtcgtagtagtagtgttgttttcgcgttttcgatgttttaattttttagtttggtagttttcggtgtatttgtttttatacgtttttcgtttacggagttttaggcggcgttacgtatatttaggatcgtggattagtttgtttcggcgtcgggtgttttcgcggtttttattatttggaaaaggaaggtgcgcgcgtatagagggaaatggacggaaatatgtataagtataataattttttttgagaagtgtttttttcgtttttttataaaaataggatttgttgtcgaggttagcgcgcgtatcgagtgtgttaggcgtgtgcgtggtttttgttgtgttattgtttttacggaaggtgggagaaggtcggggttggtcgggtggttcggattagtgggattcggggcgtttttttcgttcggtttagcgttaagcggtgtcggtagcggttgttttattatttttcggtgagaatttacgcgaggagagcgaaggagaggtgatattgagtacgaaatagtttagtggggtttttttaaatagtaatattttttttaaaacgggagtttacgaaggggggaaggaggtataaatttttttttttaaggtttggttttgcgtttttgtatatttcgtttattcgttggacgagggtttgtttcgggtagtagtttttgtttttcggttttttgagcgggtattttagttttaatttttttagagaaagtttgcgtatcgggtggggtagcgagtttagaggagttttgcgttttagtaagggggttttttcgcggatatggtatttgcgtttcgcgttaagttttttttgttttttgttttttgtttttcgtttttcgtttagtcgggttcgtttcggggtcgggaattgttggggaagtcgaaggagggattttcgttcgggattcgagggatcgattcgtttcgcggtatgcggagggttgttaggagttagtttcggggaagggtgtttgtcgttcgtgggggatagggtttttttttttttttttttaatttatatcgacgagttaggaagtcggagcgtttagtttttgttcgtattttttagtgttttttgatgtttgggatgtatggatatttttagggggttgattcgaggtggggaagtttttttttagaaagaggtattaaaaggattttatttgtttttgacgtcggatttttttgatacgtttttattggtttatcgggttttgggttttgggggagagcgtggtgcgtgttattttttttatttcgggtattaaaatgtttaagaggttatcgttttggtttaaggtttttcgaggataagataaaagggaaaagtggaggggaggtgaaggaggaacgagggtgggttttaggtaattgagggtttcggaattttaggtacgggagcgaaattttttttgcggttttagggtaaaggagtttcgaaggttggatttttttttttcgttcggacggcgtcgcggtcgttttttttatagtcgggaagcgttaaagaagattggagggtttaatagatcgttttaaaattgtttcgaataggaggggtacggttaaataagaatataattttagtaggaaagaatatttcgtttttaatacgcgtaataaaatttttattttttagagagaatgtttgaagtattgaagagtacgatttaggaattgaattatttacgtcggaggaggtagaggttggaagttatcgattttggttagtatttgtgtagtgttatttgtttttattttttaacgtttatttttttttttttttttgtggttgattttttgatttttgtttttcggtttttaggattaggtttatttttttcgtttttttagcgaaggttgtagtgtatgatagtttatagttaaaattttttttagttcggttataaagaatttttagttaataataatgcgtttttttgggaggaaagaggggttgaggtatcgttaggtgtttcgtttatagggtttatttttttttggtaagtttagttatttagagaaaaataagataaagttttatggttgggttttaggatgtaattgttttatcgaaaatatgtttgaaatattttataagaaaatatatatatatattttattcgatttttagagaggtagttttcgtgggttttattttttttgaaaaagtaaagttatttatttttagaagtaggtaataatgaatgtgttataggtttaaggaggggtggaggatagtttcgcgtgttttttattttatattagtagtttttttttttgtgtaagaaaaataaatgaattttttttttgattatatatgtatttcgtgtagaaatattatatatgtatgtgtttttatatatatgtaatatagttatttatagtatgtgtgggggtgagtattttgaataaagagtttagttggagatgggatcgttaatgttattttattaaggagaatagagagttgtagttgtttttatggtagcgatatttttaggttattgtggtagtaggagtgattggggttggagagaaatgattgtttttgggttgcgggatatttgtatatttgtagtaggaagtgtagagggttttatgttcgagagttgttgagggagttaggggtaatttttggggtaagtggggattttaggagttatggatttgtgttgtttttgagtttagtatatttagtgttttgtttaaggtagtaggttttcgagtttatgttgtagttgtttttttaattatttttatttattttttattttttttttttaggtaggaagttttgttagagttatagttgtgagaaaagtggtatttttttgaaatagttgagttaagttagtttttttatgattttatgtttaattttttatgtttttaataggaatgaaggagggtaaattatttagaaataaaatataaagatttatttgtatgatgtttttatgaaatagttttttggattgtttgtgggaggaagaatgttgtaggaagaggatatggtatgaatcggtaaggttttttttaaaattttaagggatattagggggtatagaattggaagttaggtagttgagttttggttaggaatgagtgggacgtgatatttgttaagtttgaagggagagaaaggaggttatagggtagggtagttaaggagtaggtcggatttttagttttaggagttttttaggagggggttttcgtgggtttttagggtttgttagtatgaggggttgtgttaggttgtatttttaggggtttaggaattaagtttttgtgtcgttagaacgtttagatacgttgttatattaatattttttgaaggggagttttagatttatagaagtgggagattaggatggtagatattaatgatttgttaattaatattaattatgtttttttagtgagtaaattttgagaaaggtgttttttttattggtaaaatggtttaggaagtttttgataaggttgtaataggagttaaaaatatgtgtgaatatatgtatttgaatatgtatagtatgtatgtgaatcgtgggtatatatatataaatatgttaatgtatattgtgtatgtatatatatataaatgagtttatgtatatatgtatataataaatattttttaataaatttttaataaaattttttaagaaatttttaataaaagttttattgtggtgtaagtaatagtataaagtgaatatatttaaattgtataattttagtttgatgtatgcgtatttttgtgaagttgttattataaatttagaaaatgaatatatttattatatttagtatttttttttattttttaatgtattttttttttttaattttttattttgtaagtgattgtagacgtgggtttttaattgaatattagtttgtattttatatatttttatataattataataatatattgtattttttattgtttggttttttatatttagtataattattgtgagattatttaatatggtgatatgtattaatagtttgtttttttttattattgagtagtattttattgtgtggatatattaaaagatatttatttatttatttgttgagaaatatttgggttatttttagttgtggttatgataaagtttttttgaatatttgtgtgttaatatttttgtgtaataaaatttttattttttttgagtaaatatttaggtatggaa

SEQ ID NO: 1743 - DNA, 6345 bp, Artificial Sequence
  chemically treated genomic DNA (Homo sapiens)
ttaggttggttttaaatttttgggtttaagtaatttttttgttttagttttttaaattgttggtattataggtgtgagttattgtgtttagtatattattggtttttatagtgattgtgtatttttatttgatttatttagaatagttttggtttattcgtattgtttaagaattttattgagttttgtatttgttttgtttttttttatttttaaaagtgtattaggttcggtattaatttaaatggttatttttgtatttttttttttgttttttataatttattttttttttatgttttaaagttttttttaggtatttttttatttggttggttatcgtttgtggtgaagcgtttgtatttttcgggagatatgtttggtttatatgttgtatttatataattatagataaaggtgttgtcggagttattaatggtaaaaggttgtcgagttagtattttttttagggttttatatatttgggaaagggatttttaggttaaagaattattaagttttttttttttattgagatattaagtggtttttgtattttgtaatgaagttttggtattttatatttttaaagtattatgtttttagaggtagtgtttttggaatttattgttagaatgatataggatttttatttttttttgtaggagagtggggaagtttagaggagagagtgttttgggagaaatttatttgattttttttacgttggttttagttagttattatgagatgtgtagataagttttttcgatatttatagttgatattttttattatatttgtagtagttaaaataagtggaggtttttttagttttattttgagggaaatattaggaataaaggttgatagaattttaagttttatttttttatattgttattattatttttgttaaacgatttttgaaaattgtaattgtaatagtttaaattgtagttttttttttatatgtataggggaattagagttttatattattaattggtaagaagtttttaattgtttatttttttgtttagttttatttatataatttttttttggttgtaaggattttgtttttatggggaaaagtagataaggttattttcgttttaacgattttgatttttcgtatggtaattgtttgatattatggtgggttataatattattttttttttgattatttatattaggatagtgatttatagtttttaaattgtgtttatatatagaatgtggtttttaaaataatcgttttatgaggtattatattatttttattttatagatgtagaaattgatagatttaagtgttagtaagagtcgaaataagatttttttattttttagtgtttagtttttggaatagtatattgtatagggatttatgtaggttgggggagttttagtgggtggggagttagaattttagagttttatatttatggagttttagttggtaggcggttatgtcggttacggtttgggtattagtagttgaattagagagtgtatagtagatgcgttcgtgtagcggggatagtttgttaaatattcggtttattatcgtttcgttgttaggagggagttaatagttattaagttaaaatttaggttttttttttttttttttttttttgagatagttttattttgttatttaggttggagtgtagtggattaattttgggtttattgtaaatttcgtttttttggtttaagtgatttttttgttttagtttttcgaatagttgggattataggtatttattattaagtttagttaatgtttgtatttttagtagagataaggttttaatatgttggttaggttggttttaaatttttgattttaaatatttgtttatttcggtattttaaagtgttgagattatagatgtgagttattgtatttaattagaatttaggaatttttgagggtgattatttaatgttttttaaatttttttgataagagaatagtatgaagtttaatgtttggattaaagtaggaggtaaataattattttagatattattaattattgtagatgttaattaaaattaggtttattttttaggtttagattttataataaagtaaaaaatgttaaggtaagaaaaatatgttttattaattttttttgttattaataattttgagagagttatgttttatggaatataatgttagtaatattgatttaattttatatatttattttgtatgtgaggaaattggttaggagtgggagaagagataaaatagtttaatatatggtaaatgagaaattaggtatttgtttgatagaattatttttttgatttttaagtatagatggaaagaagatttttaaaaatttattttttgttttttttttagattttatttttttatttatttttgtatattattgggataggttatatatatatttagattttagatttttttttataaatttagagatttaagtatttattaaatagtttattatagtggtttttggggaaggttaattttatttttttaaggttttagtttgttagtttttttatgaatgggtaaggaaagtgtgtatttgaggttattagtttttttttaaatgtatatatttttatttttatttattttgtagatattcgggaattagaatttattataacgttttcgttaaattttattgttatgatggtggtttgtagagatatagaatatggaatgttagggtaagaatagttttgatgtttttatgttagagaagaagaaatatttttagagaggcgaagtgattggtttaaagattatatagtaataggttagagttgattgttagtataggttttttttttttttatttttttattttttttattgttttattcggttgtaggggaatgttatagtttagttgtgatataatatagaaagaattgtgtttttaagttttaatttgtttagtggaattttttttattgtagagaggtggagatgaggtttttataggtagaagtgaagtagtttcgtaagtgaaaattatttttaacggaagggtttatagtatgtgtagatgtggtgtagatttaatatagagtaattgattatgattttgggaaataaggttagtttatttttttttttttggtttataattttttatttttattttttattttattagaagtgagtttttttaatttattgaatattggaaaaaatcgaggagggtagtggttagtatggttaggggtaaggtaggagagaagtagtaaggaatatatatagatggttgaaaataaaagttttagttatggaattttcgattaagaggtaaatatatattttagtagttagggaggtaaatttgtattaagagataatttgattgagaagtttaagttgatttttttaggttaagaaaagaattaagaagaagtgagggaagataaagttatatttattttattattgagttggaaggagttttaaagattttcggtttaaatgaggaaattaagttatagaaaatgtaaacgatttatgtaaagttatatagagttaatagtagatttgggattaaaatttaggtttaatttttattttttgtttttatttttattttttatttgttattgtttatttggtagtgaggggagattttttaaattataagtggttttattgtgttttttttattaggtcgtaagttattttggttttaaaggacgtttttttgagtatgtttttcgacggatcgatttattatgaatagagggttaaagaatagggttaattttaagttagaggttatttttttttaataaagtcgtttttaagttacgagtggtggtagtagtttagagtagaagttagttagttagttttggggttgttatttgttttaggcgtttattttaagtaaagtttttttagtgggtatatgggagtgggtagggaagatatagggaagggagtaaggtagtatttgggttaaggagaggtttttttgggttaagttagggaagggtattattagttaatatagaacgtttattattagtgtttgggttaagagttgtttagtggtaagtttattaaaagtttgtgtgatgagttggttttttttaataagtgtttatattttttttttttaagtgttgttttattttatttagggtattatttttttatttttttgtattatttttaatttttttttttgatttaattagtttttattgttcgggattagagtgaaagcgaaagcgttttagagtagtttttcgttgacgtttttagttaagagttaaagtattcgttttttttattagtttcgcgtgtttgttttttttacggatattttagacgattttttttagaaaagaaatattttatgtttattgcgggttgtaagcgttggttgttataggcgatttttttgcgttttcgttggtttttgtatttattttttcgcgcgcgtttttagggttttttggtcgttgtattttttttatttttttgttaatttttaagtttagatttattatttcggtgtggatttttttcgttcggggtaagttttcggttggtgttttcgttcgtagtatttttgtaaggtatcgtttttttcgtcgtttggggtattggtttttaatttgggatagcgtataacgcgtagtcgatagtttcgttttttcgcggcgtcgttaggaggcgtttgggtgttgcggggttgttttgcgcgcggcgttaacgtgtgtagggtagatttgtttcgagataagtgacgaggtagtttcgttttgaggttggggtgggaaaattggtgtaagtggaaaggtaggaggtagggagaggcgagaagggtgtgcgtgatggagaaaattgggtattagggttgttttcgagatttttagatttgatttttacgtttgttattaaaatagtttgggtaggttatttttggaagtaggcgttatttagtgagtaggcggtcgttttcgatttcgtttttttttaaatggttgagtttttcgttagcgtaggattagtttgtttttgggatttttcgagagtttcgttttcgtttttttttttagtcgttagtaggggaggattcggcggtattcggagttttaggttttatcggggcgcggagagttttaggttcggtcgggatcgggacggcgttcgagtgttaatggttagttttaggtgtttcgtttttcgcgggtgtcgttgttttttcggagtttttttcgtatggttggggatagtattgttatttttcgtcgattgggtgttgtttcggatcgcgttgtttcgtatattttttttgttggtgtttatcgcgttgttattgtttcgggtttgggcggtgggtttgagtcgttgggtcgtgttttggttgggggtttgcggggtttttagggtaacggttggttttaagagcgaaaacgtaggtgtttagggttggttggttgttttgaagttattagttgcggtattgggtttggttttgtcgggatttgttttgtttcgagagttgattttatggggagttttcgggttcgcggatagtattaggttattgtattggggaagttattttatcgttttcgttgttagttatgtagcggtattgttcgtagtagttttgtggtataaattcgggagtttttgggtgttcggcggttagggcggttttggaaattttgtgcgtcggtttttaggttgtttgggttcggagacgcgtcgtttttcgttgtttttggttttggtggttttttttttttttggtaaggggaacgtagggtaagaggggaggatataaggggattgggataggaattaaaggtaattgttagtaaggtagagtagcgtgggttttgggaaatgtggagcgggagaaggatttttagcgtgggttttggaatattatttcggtgtagaagaaacggtattggattggcgggggttagaggttttgggttttattgttgatcgggttttgattttttgggttacgtcggaagcggggaaattttttgttttggggtcgaagggcggggtatttttatttttaataggaggtttttttattttatgatttttagtttttttaataaaattttgaaagttttggtagagtaattatagggtagtgagttttagggtagtttatttaggttcgggattgagacgttagtgttttttttttgttgatgttttttaggataatggtgagggggaggaggcgtggtggggttagtttgattggaattgatttatttagatttaatatttgtgcgtgattttttttttttttttttagg

SEQ ID NO: 1744 - DNA, 6345 bp, Artificial Sequence
  chemically treated genomic DNA (Homo sapiens)
tttggagaaagagaagagaggttacgtataaatattaagtttaagtaggttagttttagttagattggttttattacgtttttttttttttattattattttggagggtattagtagaaaggaaatattgacgttttaatttcgaatttaaataggttgttttggaatttattattttgtggttgttttattagaatttttaggattttattaggaaggttggagattatgaagtagaaaagttttttgttagagatgaggatgtttcgtttttcggttttagagtaaaggattttttcgttttcggcgtggtttaaagaattaagattcggttagtaatggagtttagaatttttggttttcgttagtttagtgtcgttttttttatatcgaagtggtgttttaagatttacgttaggagtttttttttcgttttatattttttagaatttacgttattttattttattgataattatttttgatttttgttttagtttttttgtgttttttttttttgttttgcgttttttttattaagagaggagaggattattaggattaggaatagcgagaggcggcgcgttttcgagtttaggtagtttagaagtcgacgtatagggtttttagagtcgttttgatcgtcgggtatttagaggttttcgagtttgtgttatagggttgttgcgggtagtgtcgttgtataattgataacgaaggcggtagggtgatttttttagtgtagtagtttggtgttattcgcggattcgggggttttttatgagattagttttcggaataaggtaagtttcggtagggttaagtttagtgtcgtagttaatggttttaaagtagttagttagttttgggtatttgcgttttcgtttttggagttaatcgttgttttgaggatttcgtaggtttttagttagagtacggtttagcggtttaggtttatcgtttagattcggagtagtggtagcgcggtgggtattagtagggagaatatgcggggtagcgcggttcggagtagtatttagtcggcgagaagtagtagtattgtttttagttatgcgagagaagtttcggggaggtagcggtattcgcggggagcgggatatttagagttagttattggtattcggacgtcgtttcggtttcggtcgggtttgggatttttcgcgtttcggtggggtttgaagtttcgggtatcgtcgagtttttttttattggcggttgggggagggaacgagggcggggttttcggaaagttttaggaataggttgattttgcgttggcgagaagtttagttatttaggggaaagcgaaatcgaaagcggtcgtttgtttattagataacgtttatttttaaaagtggtttgtttagattattttggtagtaagcgtggaaattagatttgagaatttcgggagtagttttggtgtttaattttttttattacgtatatttttttcgtttttttttgttttttgtttttttatttgtattagtttttttattttagttttagggcggggttgtttcgttatttgtttcggggtagatttgttttatatacgttagcgtcgcgcgtaaagtagtttcgtagtatttaggcgttttttggcggcgtcgcgaaggggcggggttgtcggttgcgcgttgtgcgttgttttaggttggaaattagtgttttaggcggcgaggagagcggtgttttgtagggatgttgcgggcgggagtattaatcggggatttatttcgggcgggagaagtttatatcggggtaatgggtttgggtttgagggttggtagaggggtggaggagatgtagcggttaggggattttggaagcgcgcgcggagaagtgaatgtagagattaacgggagcgtagggaggtcgtttgtagtagttagcgtttgtaattcgtaatgagtatagagtattttttttttgaggggggtcgtttagagtgttcgtgaagggaataggtacgcgaggttggtggaaaaagcgggtgttttgatttttagttggaagcgttaacgggaagttattttaaagcgttttcgtttttattttggtttcggatagtgggggttggttaaattaagaaagggggttggggatggtgtaaagagatgaggaaatggtgttttgggtgaagtagaatagtatttgggagaaggaaatataggtatttattgagaaggattaatttattatatagatttttgataaatttgttattgggtaatttttagtttaagtattgataatgggcgttttgtgttaattagtgatgtttttttttagtttgatttaggaaggtttttttttggtttagatgttgttttatttttttttttgtgttttttttgtttatttttatgtgtttattggggggattttgtttaggatgggcgtttggggtagatggtagttttaagattggttggttggtttttgttttggattattgttattattcgtggtttgggggcggttttgttagagaggaatagtttttaatttgaagttaattttgttttttgattttttatttatgataagtcggttcgtcggaaagtatatttagaggagcgttttttggggttagagtaatttacggtttggtaagaaagatatagtgaaattatttataatttgggaaatttttttttattgttaaatgagtagtggtaagtaggaagtagaagtggaaataagggataagagttagatttgaattttagttttaggtttattattaattttgtgtgattttgtataagtcgtttgtattttttgtgatttggtttttttatttgaatcgaggatttttaaggttttttttaatttaatagtagaataaatgtagttttatttttttttatttttttttgattttttttttgatttggaaaagttagtttaaattttttagttaaattattttttggtataaatttatttttttggttgttgagatatgtatttattttttgatcggaaattttataattgaaatttttatttttaattatttgtatgtgttttttgttgttttttttttgttttgtttttggttatgttaattattgtttttttcgattttttttaatgtttagtaaattggaagagtttatttttgatgaaatggggggtgagagtggaggattgtggattaaaaaaaaaaaaatagattgattttgttttttaagattatagttaattattttgtgttgggtttatattatatttgtatatattatgagttttttcgttggagataatttttatttgcggagttgttttatttttatttgtaggagttttatttttatttttttatagtggagaggattttattaggtaagttggaatttagggatatagttttttttgtgttgtattatagttgggttgtggtatttttttgtagtcggatgaagtaatagagaaagtggaaagatgaagggaaaaaaagtttgtattgatagttagttttggtttgttattgtgtaatttttgagttagttatttcgtttttttgggaatgtttttttttttttaatatgagggtattaaggttgtttttgttttgatattttatattttgtgtttttgtagattattattatggtagtggagtttgacgggggcgttgtgatgggttttgattttcgagtgtttgtagggtgagtaaaagtgaagatgtatgtatttggaaagaagttaatggttttaaatatatattttttttatttatttatgaaaagattggtaaattggagttttggaggaatggagttgattttttttaaaagttattatgataagttatttggtgggtgtttgggtttttgaatttgtggaggaggatttggggtttgaatgtgtatgtgatttgttttagtagtgtatagggatgagtaaaggaatagggtttgagagggggataggagatagatttttgagggttttttttttatttgtgtttagggattaaaaagatgattttgttaagtagatatttggttttttatttattatatattgaattattttgtttttttttttatttttaattaatttttttatatgtaaaatgagtatatggggttaggttaatattattgatattatgttttatagaatataatttttttaagattgttaatagtaaagaaaattgatgaggtatattttttttattttagtattttttgttttgttataaaatttaagtttgaaaaataagtttaattttgattaatatttgtagtgattaataatatttgagatgattatttgttttttgttttaatttaagtattaaattttatgttatttttttgttaaagaaatttgagagatattgaatgattatttttaaaaatttttgagttttggttgggtgtagtggtttatatttataattttagtattttgggatgtcgaggtgggtagatatttgaggttaggagtttgagattagtttggttaatatgttgggattttgtttttattgaaaatataaatattagttgggtttggtggtgggtgtttgtaattttagttattcgggaggttgaggtaggagaattatttgaattagggaggcgaagtttgtagtgagtttaagattgatttattgtattttagtttgggtgatagagtgagattgttttaaaaaaaaaaaaaaaaaaaaaaaatttgagttttaatttggtgattgttgatttttttttgatagcgaggcggtggtgaatcgagtgtttgataagttgttttcgttgtacgagcgtatttattgtgtattttttggtttagttgttgatgtttaagtcgtggtcgatatggtcgtttattagttggagttttatgggtatgaagttttggagttttgattttttatttattagagtttttttaatttgtatgaatttttgtatagtgtgttgttttaggagttggatattgggaaatggaaaagttttgtttcggtttttgttggtatttgaatttgttagtttttgtatttgtaaagtggagataatatagtattttatgagacggttattttgagaattatattttatatgtgaatatagtttaaaagttgtaaattattattttgatataaataattaggaagaaggtgatattgtgatttattataatattaggtagttattatacgagaaattaaggtcgttgggacggaagtaattttatttgtttttttttataagagtagggtttttgtagttaaaagaaagttatgtgggtggggttgagtaaaagagtgagtaattgaaagttttttattagttggtggtgtgggattttggtttttttgtatatgtgggagggaggttgtagtttgagttattgtagttatagtttttaggggtcgtttagtagggatgatggtaatagtataggagaatgagatttaaaattttattaatttttatttttaatattttttttaggatagaattggaggaatttttatttgttttggttgttgtaaatgtggtgagaaatattagttataaatatcgagaggatttgtttgtatattttatggtagttggttgggattaacgtgaaggaggttaggtgagttttttttaaagtatttttttttttgggtttttttatttttttgtagaggaagatggaagttttatgttattttagtaatgagttttaaggatattatttttgaaagtatagtattttggggatatgagatattagggttttattgtagggtgtagagattatttaatgttttagtgggaaggaagggtttgatgattttttaatttgaggattttttttttaggtatatggaattttgggaggaatgttgattcgatagttttttgttattggtggtttcggtagtatttttatttatggttatgtggatgtagtatataagttaggtatgtttttcgaggagtgtaggcgttttattatagacggtaattagttaagtggaagggtatttggggagggttttgaaatatgggaaggaagtagattatgaggaataggaagagaaatataggggtggttatttaagttaatgtcgggtttggtatatttttaagagtgaaaaggggtaggataaatgtaaagtttaatggggtttttgggtaatacggataaattagggttgttttgagtaaattaaatgaggatatatagttattgtgagaattagtggtgtgttaagtatagtggtttatatttgtaatgttaataatttgggaggttgaggtaggaggattatttgagtttaggagtttgaggttagtttag

SEQ ID NO: 1745 - DNA, 5666 bp, Artificial Sequence
  chemically treated genomic DNA (Homo sapiens)
tttggttttttttgtttgttttttatcgagggaaaatatagttatagaagagcgtatgattaaaatttgtttgttttgtttgtttttttttttgatttaggtttcgttgttaattgttaaagtcgaggcgagggtgtgtttatggtgatgattttttggtatagtagtttttgtttttattatatattttttggtttgtagattttgcgttagcggtattatttgtaggataattcgttaaaattttgtgttgtttgttgttttttgatttgtaaatttgagttttagttagttaggttgatatagaggagattgggttagtgattttaaagtagttgttttgttgttttgtagtggttttttaggttaaagttttatttacgagaaagatgagtttttttgtagatagacgggtgagggatatgaatagataatttataaaatgggaagagtaaagaaatatgaaatatgattattttcgttaaaatagaggggatagagttaatagaaataatagtagtatttggatattattttttttttattaattagtttggtaaagatttttttaagaaaataatttttagggtttgtagataattattgatagaaaggtaaatggttttttttaaagtaatgtggttgtgtgtataaaaaattgtaagaatgtttattttggaatagtatatgttagaaagagagttaagaagatataggaatttagtataaagtgatattttaagtaaggaagaagatagatttttttttttggttgtattgaggataggataatttagaaaattttttattataaaaatatttagatatatttgataaaatataataaaatgtttgagtttttaagataaaaagggaagattttaggggttataatttataagggaataatttaagttttttggtttaatgtttagttggagataggatattaattttataggttgtgtaaatgtgggagggggagttggattcgtgtttttttgaaaatttgaattttgaggttaggtgtagtggtttacgtttgtaattttagtattttgggaggtcgaggcgggaggattatttgatgttaggagtttaagattagtttggttaatatggtgaaatttcgtttttattaaaaatataaaaattagtcggatgtggtagtgtgtgtttgtagttttagttattcgggaggttgaggtaggagaatggtatgaattcgggaggcggaggttgtcgtgaattgagatagcgtcgttgtattttagtttgggtgaggagggtgagatttcgttttaaaaaaaagaaaagaaaatttgaattttgagtgatagaaattagttatagtagtttttttatattgagaaaaatttgatttttatttgattttttttaaagattagtggttttaatttttgataaagattttttgattgattagatttttgttaggtttttggatttttttttaagtttatttgtatttttttgtaagatttagttttagtaaagaattttgagttattttggtaagattttttattttgtatatttgattaggttttttattttttgtcgttttttagggaatgtttggttattatggtttgtttttagtaggatgatattgatattggttttttaggttagtttagtagaattttttttatttttgatgattttttttattttttttatttttggttataaatttatatttgttattattatatttggagttgaatttaattttttttttttattggaaaatttattgtagtgggtcgtttagttattggaatggttttgaataaagtttgttttattatgttttaataagtgttattgaataattttttttaatatttttgagtttttgtttatttggagaattattatagtaatatttagtgaggtatttgtgttattttttaagtatagtatattgttatgataggtagtttgaattttaagaggttgtttaaattaaatatatttgtattgttttcgtttttgtatagttcgtaattgaaattattttttaaataataggatatgtataaaagttttttattaattatgaatgtataaggatattcgatatgttttattttttattttatttatttatttattgagatagagtttggttttgtcgtttaggttggagtgtagtggcgcgattttagtttattgtaagttttatttttcggatttatgttattttttttttttagtttttcgagtagttgggattataggtattcgttattaggttgggttaatttttgtatttttagcggagatggggttttacggtgttagttaggatggtttttattttttgatttcgtgattcgtttgttttagtaattttaaagtgttgggattataggcgtgagttattatattaggttatttatttttattttttattttttgagacggagttttattttgtcgtttagattggagtgtagtggtacgatttcggtttattataatttttattttttgggtttaagcgatttttttgttttagttttttgagttgttgggattataggtgtgtattattgtgtttggttaattgttgtatttttagtagagatggggttttgttatgttggttaggttggttttgaatttttgattttagatgatttgtttgttttggtttttaaagtgttggggttataggtatgagttgttacgtttagtttatatattattaagattttaaaaaaagtaagttatagaatagttttgtttaatagatagaatgtaagttatatagtgattttaaattttttaatagaaatattttaagatataaaaataaataggtgaaattaattttaagaatgtattttattttatttagtatattatgtattttattattatatattttattatatattttattatatatatacggtgtattgagtaaaataaaatatattttatatatatatatatatatatatatatatatatatatttttttttttttttttttttgaggtaaggttttattttgttatttaggttggagtgtaatggtatgattatagttttttgtagttttgattttttgggtttaggtgatttttttattttagttttttaagtagttgggattataggtttatgttattatgtttggttagtttttgtatttttttgtatagacggggttttattatgttgtttaagttggttttgaattttttagtttaagtgatttatttattttggtttttcgaaaggttgggattattaaaggtgtgagttattatgtttagttttaaaatattttttaaatatgtaattatataaaattatatgagatattaatattttttttttatattaagtttttaaaatttgatgtgtattttataatatattttaatttagattagttatattttaagtatttaacggttatttatgattagtagttataatattagatagtgtaattatagattacgtttattttttatttttttagtaatttttaaattagttttatacgtattgtaataaatatagaaaatatttggaagggtatataagaaatgattaaaaatgatttttttatataaaatgagaatgtagggagggaaggtgattagggtttaatttacgtatatttttatttgaatttattatataaggatatattatatttattaaaaatgtaaaagagaaatgtttattttttgtaatatagtttttgtatagaaatttgttttaaggaaataattaaatatgtaaattaatatttatgataaggatgtttttggtttaagacgtgaataattttttttagtgtatttatgttatagacgttatttgttattattgtataagaaaaaatatagtgtatttagggtttagtattatttatggttttagatatttataattttaggtatttattggaggttttggagtgtgttttttgtggataaggggggattattgtatttaattttattggaggtttgattttttgaaaagtgaatggagaagaataaattgatgtgaaaaatttttgttttttaataaataaatagataggatttgagttttggggagattattgaggttttttttaattttttagtgggtggtattttttatttgtttataggaatgttgagattttggttgtggattttgtgttttgtttagtaaagttgttttgtgtggatcgtatttgatattttaaatttttttaataattataggaggtaaatgaagaatttatgtatagtgtaaggataaaattgtataggttttagttgttttggatattttgtgttttttagttatttgttgaatggaatttaagtgtttaatttgttttgattggagtaaaattttgtggattgataaggatgggcgtttaagatgtaggaagttaaaaaaaaaatgttgttaaataaggtgtagagtacgattttatttgtgttttgaaatttatgaaattatgtatttatgtatttatatgtaatgtatttatttttgaatggagggaaagagtttgattattattattttttatttttgggagtgagaatgaagtgtatagggagtaggtgtaaggaagaatgtttattttttattttatatatttttgtattgttaaaattttaataggttgttttgtaaaaaaaatttaataaaagttattaattgtaattagaagtattttttgatagtagatgtttttaaattattttattaagtgtttagaaagagttaatataggagaattttagatgtttgaagtgaggataaatttttgttttgagggtgggaggtgggtttagggatgagaggtaatgacgggggagaggaggaaagaagttgaggggagagttggttgttgagttgttattttaattaatggtatgaaagttttaagtttaacgtttatttgtggagattattttaggagttaggatttgtatgagtttattgtttttgtaatttgttaaagaagagttaagggagttttcggggttggttttttggaggttgtttttttttttatttggaaggtaaaaattttaagtttaagttgattaggtagtggtgattgattgagttgttaatttttttttttttggtgtattgatttttttttttagttagggttgtaatatgtttatgggataaggttttatttttattaataatgatatttatatggaatttttaataagatggagtggttttttttggttttttgtagatgataagaagtattaggtagatttttttggataggttcgtatggaaaggaaggagaatttatgttttgattgatgaataatttttattttatttttttttggttttatatagagtatggttaagttttgataggaattgtagatgcgtgtagtaaattttatttaagtagaatgggtttttgttttattttttattttagtaaaaatttttaaaatttttttatttatagtaaagttattttataatagaaagtagaaaaaaaaataaagagagagtttggaaagatatttttagtgaagttatttaatgtttaggtttaaatgtagtttttttgttttttagcgttatgttattaatattatagggaattttttttttttcgtagg

SEQ ID NO: 1746 - DNA, 5666 bp, Artificial Sequence
  chemically treated genomic DNA (Homo sapiens)
tttgcgaggggaaagaagttttttgtgatgttgataatatagcgttgggggatagaggagttatatttggatttaaatattgggtgattttattaaaagtgtttttttaaattttttttttatttttttttttattttttgttgtaaagtagttttattatgaatgggggagttttaagagtttttattgagatggaaaataaagtaagaatttattttatttaagtaggatttgttatacgtatttgtaatttttgttaaagtttaattatgttttatgtgaaattaagaaggaataagatgaaaattgtttattagttaaagtataggtttttttttttttttatgcgagtttatttaagaaaatttatttaatgttttttgttatttgtagaggattaggaagaattattttattttgttagaagttttatgtaaatattattgttagtaaaagtaaaattttattttataagtatgttatagttttagttggaaaaagaaattaatatattaaaaagaaaaaaattaatagtttaattagttattattgtttgattagtttgggtttgagatttttattttttaagtaaaggagaaagtagtttttaagaagttaatttcgaaagtttttttagtttttttttgataggttataggggtaatgaatttatgtaaattttaatttttgaaatagtttttataaatgggcgttgggtttgaaatttttatgttattggttggaatgataatttagtagttagttttttttttagtttttttttttttttttttcgttattgttttttatttttaagtttattttttatttttaaagtaggaatttgtttttattttaaatatttggaatttttttgtgttaattttttttgggtatttggtgagatggtttgagaatatttattgttagaaagtatttttggttatagttgatagtttttattaaattttttttataaaatagtttgttaaaattttaatagtatagaaatatataaagtaagaagtgagtatttttttttgtatttgttttttgtatattttatttttatttttaggggtagagggtggtaatggttaggttttttttttttatttagagatagatatattatatataggtgtatagatatataattttatagattttaaaatatagataggatcgtgttttatattttgtttggtaatattttttttttaattttttatattttggacgtttatttttgttagtttataaagttttgttttaattagaataaattgggtatttaagttttatttaataaatagttgaaaagtatagggtgtttaaggtagttgaaatttgtgtagttttatttttgtattgtgtatgaattttttatttattttttatggttgttggaagaatttaaaatgttaggtgcgatttatataaaataattttgttaagtaaaatataaggtttatagttaaaattttaatatttttgtgagtagatggaaaatattatttattgaagggttaagagaagttttagtgatttttttagggtttagattttgtttgtttatttgttggaagataaagattttttatattagtttgtttttttttatttattttttagggagttaagtttttagtggggttgaatatagtagtttttttttatttatagggagtatattttaagatttttagtggatgtttgaaattatggatgtttgaaattatgggtagtattgagttttaggtatattatgtttttttttatatagtaatggtaggtaacgtttatagtatggatatattagaaaaaattatttacgttttgggttaagggtatttttgttataaatgttagtttatatatttgattatttttttaagatagatttttatataaggattgtgttgtaaagaataagtattttttttttatatttttagtaaatatgatatatttttatataataaatttaaatagagatgtacgtgaattaaattttgattattttttttttttgtatttttattttatataaaaaaattatttttagttattttttgtgtatttttttaaatgttttttatgtttattataatacgtataaagttggtttgggagttgttaaaaaaatggagagtaaacgtggtttatagttgtattgtttaatattgtagttattagttataagtggtcgttgaatatttgaaatgtgattggtttgaattaagatgtgttgtaaaatatatattaggttttgaagatttagtataaaaaaagaatgttaatattttatataattttgtatgattatatgtttaaagaatattttggggttgggtatggtggtttatatttttggtaattttagtttttcgggaggttaaggtggatggattatttgagttaaggaatttaagattagtttgggtaatatagtgaaatttcgtttatataaaaagatataaaaattagttaggtatggtggtatgagtttatagttttagttatttgggaggttgaggtaggaagattatttgaatttaggaggttaaggttgtagagagttgtgattatgttattgtattttagtttgggtgatagaatgagattttgttttagaaaaaaaaaaaaaaaaaaatatatatatatatatatatatgtatatatatatataaaatgtattttattttatttagtatatcgtatatatataataaaatatataataaaatatatgataataaaatatatggtgtgttgagtaaaataaaatatatttttaaaattaattttatttatttgtttttatattttaaaatatttttattaggaaatttgaagttattatgtggtttgtattttgtttattggatagggttgttttgtagtttgttttttttaaaattttaataatgtgtgggttgggcgtggtagtttatgtttgtaattttagtattttggaggttaaggtaggtagattatttgagattaggagtttaagattaatttggttaatatggtaaaattttatttttattaaaaatataataattagttaggtatagtggtgtatatttgtaattttagtaatttaggaggttgaggtaggagaatcgtttgaatttaggaggtggaggttgtggtgagtcgagatcgtgttattgtattttagtttgggcgatagagtgagatttcgttttaaaaaataaaaaataaaaataaatagtttggtgtggtggtttacgtttataattttagtattttggggttgttgaggtaggcggattacgaggttaggagatggagattattttggttaatatcgtgaaattttattttcgttaaaaatataaaagttagtttagtttggtggcgggtgtttgtagttttagttattcgggaggttgagggaggagaatggtatgaattcgggaggtggagtttgtagtgaattgaggtcgcgttattgtattttagtttgggcgatagagttagattttgttttaataaataaataaataaaataaaaaataaagtatatcgaatgtttttgtatatttatgattgatagagaatttttatgtatattttgttatttgagggatagttttaattacggattatataaagacgaaagtaatgtaaatatgtttaatttgaataattttttggagtttagattatttgttatgataatatattgtgtttgagagatgatataggtattttattgagtgttattgtagtggttttttaggtggatagagatttagaggtgttaaaaaaaattatttaataatatttgttaaagtatggtaaggtagattttatttaggattattttaatagttagacggtttattgtaatggattttttagtggggaagagaaattggatttaattttaaatatggtgatggtaagtgtggatttatagttaaggatggaaaaagtaagaggaattattaggagtaagggggattttgttaaattgatttagaaggttagtgttagtgttattttgttgaagataggttatggtgattaaatattttttgggggacggtaaagaatgaggaatttggttagatatgtagggtgggaaattttgttaaaatgatttagggttttttgttaaaattggattttgtaaggaagtgtagatgggtttagaagaagatttagaagtttgataaaagtttggttaattagagaatttttgttagaggttgagattattggtttttaaaagagattaagtaagaattagattttttttaatgtgagaaggttattatgattgatttttgttatttaaggtttagattttttttttttttttttgagacggagttttattttttttatttaagttggagtgtaacgacgttattttagtttacggtaattttcgtttttcgggtttatgttatttttttgttttagtttttcgagtagttgggattataggtatatattattatattcggttaatttttgtatttttagtagagacggggttttattatattggttaggttggttttgaatttttgatattaagtgattttttcgtttcggttttttaaagtgttgggattataggcgtgagttattgtatttggttttaaggtttagatttttaaggagatacggatttaatttttttttttatatttatatagtttgtaagattggtgttttgtttttaattggatattaaattaggagatttagattatttttttataggttgtgatttttggggttttttttttttattttgggagtttaggtattttgttatattttattaagtatgtttaaatatttttgtaatggaagattttttaggttattttgtttttaatatagttagaaaaggaaatttgtttttttttttatttaaaatgttattttgtattaaatttttgtatttttttgattttttttttggtatatgttattttagaatgaatatttttatagttttttatatatatagttatattgttttaaaaaaggttatttatttttttattagtaattgtttgtaaattttgggaattatttttttaaaaaaatttttgttaaattgattgatggaggaaaaatggtatttaagtgttgttgttatttttgttaattttgttttttttattttagcgagggtggttatgttttatgtttttttgttttttttattttgtgaattgtttgtttatgttttttattcgtttgtttataaggggatttatttttttcgtaggtaggattttggtttaggaagttattgtaaagtaataagatagttgttttgagattattggtttagttttttttgtgttaatttgattggttgagatttaggtttatagattaaaaaatagtaagtagtataaaattttggcgggttgttttgtaaatagtgtcgttgacgtagaatttgtaggttaaggggtgtgtgatggggataagagttgttgtattagaaggttattattatggatatattttcgtttcggttttggtagttgataacgaaatttaaattagaaggaaaaatagataaggtaaataagttttggttatgcgtttttttgtagttatgttttttttcggtagaaagtagatagagagggttagg

SEQ ID NO: 1747 - DNA, 7503 bp, Artificial Sequence
  chemically treated genomic DNA (Homo sapiens)
atatattaaatatttattcgcgtaaggtattattaatatagaataattaaatattatatttgtgtttttgaggattaggtatagatagtggtattataacgtaagttttatgagtttagagaagatgagattttttttttttgttttatttttttatatttaagtttttatataacgtttatataatgtttatttttttatatttaattttttatataatgataaatagatggataaatagtaaatttttttttttgtggttgtataatttgatagtttattaaagagatttatagtagaattttaaaagtagatcgtttgggttttaattttggttttttcgtttcgtagatatgagattgtgggtaagttattttttaaagcgttaattttattatatatataatagagattattgtagttgttattttattagggtgtttaaaggattaaatatgtaagtttttatagtagtttttgatatgtaattggttttttagtaagtgttagttataagtgttatggtattggagtatgattaagtatttgggttttggaattatatgagatagagatttatttttgttatttattaggtatgtgattttggataaattttttaaatgtaagttgatgataatagtatttgtgttataaggtgtgtatatatatttgggtgtgtatattttaatgtataaggtttgattgataattataattattgttttaatgtaatagtggaaattaaaggtatggtgttttatagacgtaagtatttaggaaatttaagttattatttttattgaggagggatttgtgttaaagtttttaagaagaaaaggatggtattttaggtaatataaatagtaagtaatggtaaataggtaattatttaaatagtatatatatttaagtaatttatttaggtagttttttttgtataagtatatgtagtgacgttaaggtttatgtgatggatagggtttttattgtagaaaattttaaatgttaagttaaagattttggaattttagtaagaaattatgaaggtattttgagtaagaatgatttgtagttgtaattatttaagaggttgaggtgggaggattgtttgagtttaggtgtttaaggttgtagtgagttatgatcgtgtttgggtattagagtgagatttggtttttaaaaaaggaatgtaagagagagaaaagttttatttataaagtggggttttaggaagattgttttgataataatatagtatgtgaaatgggatagaaatattgttttaatattattaatgtaatagtaaggtagtagggtgaatagtaaatttaaaattattataaatatataaaatagataaatttttatatttacgtaaatgttttaggaattgggaaaattaattatgatatttaagatttagaatttagatgaatagaatgatggtataattataagtattttaaaggagaggaggtcgggtacggtggtttatatttgtaattttaatattttgggaggttgagggggggggggggggttaattgtttgagattaggagttcgagattagtttggttaatatggtgaaatttatttttattaaaaatataaaaattagttaggcgtggtggtaggtatttgtaattttagttattcgggaggttgaggtagaaatgcgtgaatttaggagttggaggttgtagtgagttgagatcgtatcgttgtatttcggtttgggtgatagagtgagattttgttttaaaaaataagaagaaaggagaagaggagatgaaggggaataattagtttgttttttgttttgttagttgttttgagttgttttgagagtagaaaaattagttaaaaatgttttattgaagaagtcgaatcgagggatttatgagaggtagaattggaaaattagatttgggagtaatttttttagtaatgagatatgaaagagtgttgagcgataaataaggcggttaatgatttaattatatttaaagatagagtaggaaaagagaatgaggttttattttgcggaagcgaaggttgtttgagagttagttgtagtaaatattaaagaaaaagaataatgattgagaaaaagtaattagaaagatttaagtaatttttagggtagtaatggtttaaattggattataagggattaaaaagtgagtaacgagtagggtatattgaatattgaaaatttttatttatagagaatagttttacgaaacgggtttaataattttttttataatatataatttaattagttattataggaagtgttaaggtgtataatggaaaagtatttataaatttagtggtgaaatagttatgaattaagttttggtttaattttatattagttttttgattttgatagtttaacgtttaatataattttaggatgttaatattatttaatatttattttttatgaggattaaataagatgatagtttgtaatttataaaatgtattttttttgatttttattaaaaattatgaagttattaaggaagataaggaaatttaggtttaagaagtttagaagtatttaaagtgttttttagtggtagaattaaggttaaaattagattttcgttatttttttaatatatttttaaaatgtgtatttatattttaaatttatgaggaattaattaatatttttgttttgtttttaaaatttatttttgtagagatggggttttgttatgttgcgtaggttggtttttaatttttggttttaagcgatgatttttttgttttggttttttaaagttttgggattataggtgcgagttatattgtttagttaatattttttgttttaagaattatcggttcgtttaaattgcgtgtgtatattttaatgtataaggtttgattggtaattataattattgttttaatttatagtttttttttgttaagagttttaaatagagtatttttttataattttaaatttttggcgtgttattacggaaaattatattatttaagataaagttggtaattaaaataaaaattaaaatttgaatataatatataagaatatatatattaaaaggtttattttttgagtattttgtttttttgaatttaagttaaacgttaaaaaaaaaaagtatttatttatgaaattaagtttgtttagttaattttattttttatttgaaataaaataaaatgattaaattgttataattagaaataatagaaattaggcggttataattagatatttcggttattaatttagttatgtatttaataatatagattaaataattttaatttttaagttttagacgttaattttttattttcgtcggttggtataagaaacgtgtatatgaggtttagttttaatggttttttatagagtagaggttatgttttaatttttattttattgttttatagtagtaaggagtacggagtggcggtttatataaaaatttaaatgatatgattgtaatgggaaattttaaaaattaaggttgtatcgtaattattaagtaaatttgagtaaagcgagtttgaagagggaaatatagggtatgagaggacggtagggagatcggttttgtgcggatttttttagtttagggttttgaggtttgtaggagttcggggtagcgttattacggcggtgatttttaaataggttttagtagatgggggaagggcgaaagtgaaagtcgtagttttttggggtttttatttttcgttgaaaacgtagggcgaaaatcgtagttgtaaagggttcgcggttttgtgcggttttatttttaagtttttgttaggagtcgaatatatggttgtagaggataatatcgtacggttgcgtttgcggattcgatatttgttgttttacggcgagatggttgttttgatcggacgttacgttattttcggttttttttgaagttcgttttcggtttttttattttacgttagtcgttgtttttggagggttgtacggcggtttgtttttttggtagttgaatttcgtttattttaaaaagcgttgatagggatgtaaagggttttttttgtttgttttttgtttttttttttttcgaagaaaatattggaatttattttaatggataaaaatttaagtttgattatataaaaaaattgttagaattatggcgtaacggtaattcgaataacggtgggaacgttaattgttttggttaataaaaaatgtatataatattttttatttttaaagagtttataattttattgataataaaaagtataaagaaaataagtagtataatatatgattacgttataatgaattatagaagggaaaattaaggcgtgttgaagttttattaagaaataattgcggaaagagttatgtgataatagtgtatgaattgggagtggtagaattgaatataaatgtatgtgtaaatataagttgtttgttttgtttagtgttttttgttattttatacgtttgaagattagttagcgtttttgttgataggtaaggaggacgcgtttattgagtgttaagtattgtttaggtattgattttgttaatttttgttaatttttcgatagtttaagggtaagtattgttattattatttaattttatagaaaaaaaatgcgggggagaggttaggtaatttgtcgaaggtaacgtcgttagttgttttaaataataataataataataataaaatatatttatatatatatatatatacgttatttaaaaatcgattttttttacgtttagtaagggttaattagagatggttgtggtacggcggtttcgtttcggaattttttaagagtttcgtttttttttatttatggaaatataggaagtgatttatgtttatattttttatggtttcggttttagtgggagtaattcgttgaagtcgagggtagaattggcggaagtgatattattaacgcgcgttaggggtttagtgaggtcgggtaggttcgttgtggcgggcgtttgggtcgtcggttgtttaatttcgttttcgttggtttatagtgatttttgtagtgatttaggtaatagattgtatttttttttgacggttcgggcgaaggttattattgtattgaggtttgggggtaatggtggggaagagattaggaattggcgcgcgtgtaggtttttcgggggacgtttttttttttcgtgttgtcgtcgtttcggtttgtaacggttattcggtcgttattttcgtttggtgttttattttgttgtgtttcgtaggtagttttttatcgtacgattgtggggtttagggtattattggttggttgggcggcggtaggcgggataggatagttttttgtatcgaagattttaagtttattttgttttgttttgttattcgttttttttttatgttagaagtagatttatttagatttgtgttcgtttgttttgttgttaatattgagatttaaatattttgttagaagtttgagatagcgggtacggtagcgtttaagatataatatatattattttatttgtagggtttttcgtttttcggtttaggttattatggttttttaaatttttaggtagatttttttgtgaaaagattgtgttttatttagttatatagatattagaaggttatgtagaattaatttgattgtttttaaaaaatatcggatttgatgttttaatttttaggagatgaagatatttagtaaataatttttttttgaggataaattagtgtagtaattattgtgcggttttttttgtagatttatttgtaaaaagtggtttgaagttatcgaaggttttggataaatttttaattatatttataatggttttaaattttgtcgttattattttttgttttaattttagatttttgaaacgaaattttcgttttttagttttattttttttaaatttatttagttttgttaaattagatttgtttatattgtattttcgaaattttataattgttattattgtttatgtaataatattgaaaatttttgatagtatgagtttattaatatgtgttgttttatttgttgtagtgattttttatatagttatattaagtttgttgtttgtatattgtatgtttttttaatttgtttttttttgtttgattttttttttgtttgaagttttgatgtgtaaatttttatttattttgtgagatttaagttagatggtttttgttttgtgaaaatattgcgttttttttatagtgattggttgttagtttatattgtttttttttttaggggtgtatatgggtttatttatgattatatattgtattttaggtatagtgttagatgtagagattataaagatatgtaggttggtttttgtatttaaggaatttagtttagattatatttgttgttataatattatgttttatagtagttatttgtatattttttatattgaatattttgatgttaaggattatatttttttatttttatatttttatttgtaggatttttgttattgttattataggataattgttaaaaaaaaagtatattttaaaaaatatttttgatatatttatttttagaagtagagtttgtttttttttttggtttgttttttagtgatgagtatgtaggatagatagtttttgggggtttttgtttttttaaagtgatcgttagagttttttatatatttagtaaatatttgagtgtttgttttgtattagtatatgtttgaagtgtatatgtttgaaggatttttggatatataatttgtaattttgagatttttaagttttatgtgagaatatgttgttataaatttattttagatgtgtagtgagtaaagcgatgatgatttaagaaaagttagataataggtatagtttgtattaatgtgttttaaagaggtaaggttattatatttataaaaatttagggttttatttttgtgcggtttttttttttttaatagttttattatagtaggagtttgataaatgattattttgaagtatattggattgaatttgatatttatttaattttttgtttaagatattgtagaggatgtaaaattggaatatttaaagatttaaattttgtttaatagtgttgtgtatatagtgtttagtgaatattttgttttgatattatattttgtttaggaattatttttttttaggtgtttttttttaaaagtttttaatgttggttatgatagttcgattttgagtatttttcgattatttaaatatgtaataaaatgatttttgttttgttggcgattttatatgtaatcgtcggaaatatggaaggaataaaattttaggattataaggtaaaaataaatgtattttaaaatagttttattggtttttatgtttgtgttttgtatagttatagaattggtttataggattgtataggttatttggatttttaaattaaattttagatttttttttaaagt

SEQ ID NO: 1748 - DNA, 7503 bp, Artificial Sequence
  chemically treated genomic DNA (Homo sapiens)
gttttggaaaaaagtttaaagtttaatttaaggatttaggtaatttgtatagttttataagttagttttatggttatataaaatataaatatgaaaattaatgaagttattttggaatatatttgtttttattttataattttaaagttttattttttttatgttttcggcgattgtatgtaaaatcgttaataaaataaaaattattttgttatatgtttaaataatcggaaaatgtttaaaatcgagttgttataattagtattaaaaatttttgaggaaaaatatttagagaaaaataatttttaagtaaaatgtaatattagagtagaatatttattaagtattgtatatatagtattgttaggtaaagtttagatttttaaatattttaattttatattttttataatgttttgggtaaaaaattaagtaaatattaaatttaatttaatatattttagagtgattatttattaagtttttattgtaatgaaattgttaaaaaaaaaaaagtcgtataaagataaagttttgaatttttataaatgtaataattttatttttttagaatatattaatgtaaattgtgtttgttatttgattttttttaaattattatcgttttatttattatatatttgaaatgagtttataataatatatttttatatagaatttagaggttttaaagttataaattatatgtttaaagattttttaggtatatgtattttaagtatgtgttggtatagaatagatatttagatatttgttgaatgtatgaaagattttgacgattattttgaaagggtaaaggtttttaaagattatttattttatatatttattattgaaaaatagattaaaaaagaaagtaagttttgtttttggaaataaatatattagagatattttttaaaatatattttttttttgatagttattttataataataataatagaagttttgtagatgaggatataaagataggaggatatagtttttggtattaaagtgtttaatatgaagggtatgtaaataattattgtaaaatatagtattataatagtaggtatggtttaagttaagttttttgaatgtagaaattagtttatatgtttttgtgatttttgtatttagtattatgtttggaatatagtatgtgattatgaatgagtttatatatatttttggaagagaagataatatagattaatagttaattattgtgaagagagcgtagtgtttttataaagtagggattatttaatttgggttttataaggtgagtaggaatttatatattagggttttagataaaagagaaattaagtagaaagagatagattgaaaaagtatgtagtatgtaggtaataagtttagtatgattgtatagaaggttattgtagtagatgagatagtatatattggtgggtttatattattaggagtttttaatgttattgtataggtaataataatagttatggaatttcggaagtgtagtatgaatagatttaatttggtaagattagatgaatttgagaggagtaaaattggaggacggaagtttcgttttaggaatttaaggttgaggtaagagataatgacggtaggatttaaagttattataagtatgattagagatttatttaggattttcggtggttttaggttattttttgtaagtaagtttatagaagaaatcgtatagtgattattgtattaatttatttttagaaaagagttgtttgttgggtatttttattttttggaaattgaaatattaaattcgatattttttggaggtaattaaattaattttgtatagttttttagtgtttgtataattaaatgaagtatagtttttttatagaaaagtttatttagagatttggaaaattatgatggtttgaatcgagagacgggagattttgtaaataaagtggtgtgtattatattttaagcgttatcgtgttcgttgttttaggtttttgataaaatatttaagttttaatgttggtagtaaaataggcgggtatagatttgggtgaatttgtttttaatatggagaagaagcggatggtaggatagggtagggtaaatttagggttttcgatgtaagggattgttttgtttcgtttgtcgtcgtttagttagttagtagtattttgagttttataatcgtacgatgggaagttgtttgcgaaatatagtagagtagggtattaggcgggagtggcggtcgagtggtcgttataggtcggaacggcggtagtacgaaagggaggaacgtttttcgaggggtttgtacgcgcgttaatttttagttttttttttattattgtttttaggttttagtgtagtggtggttttcgttcgaatcgttagaaaagagtataatttgttatttgggttattgtaaagattattatgggttagcggaagcgaagttaaatagtcggcggtttaggcgttcgttatagcgaatttgttcgattttattgaatttttggcgcgcgttgataatgttattttcgttagttttgttttcggttttagcgagttgtttttattagggtcgaggttatgagaagtgtgagtataggttattttttgtgtttttataggtaaggaggggcgaagtttttgaggagtttcggggcggggtcgtcgtgttatagttatttttaattggtttttgttggacgtaggaaagatcgatttttaaatggcgtgtgtgtgtatatgtgtgagtgtgttttgttgttgttgttgttgttgtttaaagtaattagcggcgttattttcgataagttatttgatttttttttcgtattttttttttgtaaaattgaataatgataatagtgtttatttttgggttgtcgggagattgatagagattgatagaattagtgtttgagtagtgtttggtatttagtaagcgcgttttttttatttgttagtaagaacgttagttgatttttaagcgtgtagaatgataaggaatattaagtaaaataaatagtttgtgtttatatatgtatttatatttagttttgttatttttagtttatgtattgttgttatatggtttttttcgtagttgttttttagtgggattttagtacgttttgatttttttttttgtagtttattgtggcgtaattatatgttatattgtttgttttttttgtattttttattattagtgaggttgtgagttttttaaggataggaaatgttatatatattttttattagttaggataattaacgtttttatcgttattcgagttgtcgttgcgttatagttttgataatttttttgtatggttagatttaaatttttgtttattggggtgaattttaatgtttttttcgagggggaaaaaaataaaaaataaataaaaaaaattttttatatttttgttagcgttttttggaatgggcgggatttaattattaaagggataagtcgtcgtgtagttttttaggagtaacgattagcgtgagatagagaggtcgggagcgaattttaggagaagtcggaagtggcgtaacgttcggttaaggtagttatttcgtcgtgagatagtaagtgtcggattcgtaggcgtagtcgtgcgatgttgttttttatagttatgtattcggtttttggtagagatttggggatggaatcgtatagagtcgcgggttttttgtagttgcgattttcgttttacgtttttaacggagggtaaaaattttagagagttgcggtttttattttcgttttttttttatttgttgaagtttatttaggagttatcgtcgtgatggcgttgtttcgggtttttgtaggttttagaattttgagttgagggggttcgtataaggtcggtttttttgtcgtttttttatgttttgtgtttttttttttaggttcgttttgtttaagtttatttggtgattgcgatatagttttggtttttagggttttttattatagttatgttatttgagtttttatgtggatcgttatttcgtgttttttgttgttgtaagatagtaaagtagaaattgaaatatagtttttgttttgtggaagattattaaaattggattttatgtatacgttttttatgttagtcggcgagggtagagggttagcgtttgaaatttaaaagttagggttgtttggtttgtgttgttagatgtatagttgggttggtagtcgagatgtttaattgtagtcgtttgatttttgttatttttaattgtagtagtttaattattttgttttattttaaatagaaggtgggattggttgagtaaatttagttttatagataagtgttttttttttttaacgtttagtttaagtttaggaaaataaaatatttagaagatggattttttagtatgtgtgtttttgtatgttatgtttaagttttggtttttattttaattattagttttattttgagtagtataatttttcgtggtggtacgttagagatttagggttatagaaagatgttttgtttaagatttttgatagggaagagttgtaaattgaaatagtggttatagttattaattaagttttgtatattaaaatatatatacgtaatttgaacgaatcgatggtttttaaaatagaaaatattggttgggtagtgtggttcgtatttgtaattttaggattttgggaagttaaggtaggaggattatcgtttgaggttaggagttgaagattagtttgcgtagtatagtaagattttatttttataaaaataaattttaaaaataaagtaaaaatgttaattggttttttataaatttgaaatataaatgtatattttgggagtgtgttagaaagataacgaaagtttgattttagttttggttttgttattaaaggatattttgggtatttttgaattttttgaatttaaatttttttattttttttagtagttttatagtttttggtgagaattaagagagatgtattttgtaaattgtaagttgttattttatttaatttttatgaaaagtgaatgttagatgatattagtattttagggttatattagacgttaaattgttagggttagagagttggtgtgaagttgagttaggatttaatttatagttattttattattgagtttatggatgtttttttattatatattttaatattttttgtgatgattaattaagttgtatattgtagggagggttattggattcgtttcgtaaggttattttttataaataagaatttttagtgtttagtatgttttattcgttatttattttttaattttttgtaatttagtttaagttattattgttttaaaaattatttagatttttttgattatttttttttagttattgttttttttttttagtgtttattgtagttggtttttaggtagttttcgttttcgtaaaatgaggttttattttttttttttattttgtttttaaatgtagttaagttattagtcgttttgtttatcgtttagtatttttttatgttttattgttgggaggattatttttaaatttggttttttagttttgttttttatgagtttttcgattcggtttttttagtaaaatatttttaattggtttttttgtttttagggtaatttaagatagttagtaaaataaaaagtaagttaattatttttttttattttttttttttttttttttttattttttgagatagagttttattttgttatttaggtcggagtgtagcggtgcgattttagtttattgtaatttttaatttttgggtttacgtatttttgttttagtttttcgagtagttgggattataggtgtttgttattacgtttggttaatttttgtatttttagtagagatgggttttattatgttggttaggttggtttcgaatttttgattttaggtaattgatttttttttttttttttagttttttaaagtgttgggattataggtgtgagttatcgtgttcggtttttttttttttaaaatatttataattatgttattattttgtttatttaagttttaaattttggatgttataattggtttttttagtttttaaaatatttgcgtagatataaaaatttgtttattttgtgtgtttgtgatgattttggatttattgtttattttgttattttattattgtattagtagtattagaatagtgtttttgttttattttatatattatgttattgttagagtagtttttttaaaattttattttgtaaatggaattttttttttttttgtattttttttttaaagattaggttttattttaatgtttaggtacgattatagtttattgtagttttgaatatttgggtttaagtagtttttttattttagttttttgagtagttataattatagattatttttgtttagaatatttttatgattttttgttaaaattttaaaatttttagtttggtatttgggattttttatagtaggaattttgtttattatataaattttaacgttattatatgtgtttatgtaaaaagggttgtttgaatgagttgtttgaatgtatgtattatttgaataattatttgtttgttattgtttgttgtttatattatttggaatgttatttttttttttttgagagttttagtataaatttttttttagtaaaaatagtggtttaagttttttgagtgtttacgtttgtgaggtattatgtttttaatttttattattgtattgaagtagtggttatagttattagttaagttttgtatattaaaatatatatatttaaatatatatatatattttgtgatataggtattgttattattaatttgtatttggaggatttgtttaagattatatatttagtaagtagtaagagtgggtttttgttttatgtaattttagagtttaggtgtttagttatattttagtgttatagtatttatagttaatatttattagaggattagttatatgttagggattgttataagggtttatatatttgattttttgaatattttaatgaggtagtaattgtagtgatttttgttgtatatatgatgaaattgacgttttgagaagtaatttatttatagttttatatttgcgaaacgggaaagttagaattagaatttaggcggtttgtttttggaattttattgtaagtttttttgataagttgttaaattgtatagttatagagggaaaaatttattgtttgtttatttatttgttattatataagggattgggtataaagaaataagtattatataggcgttatataaggatttggatataaagaaatgaagtaagaaaaaaaaattttattttttttaaatttatagagtttgcgttgtagtattattgtttatatttgatttttaagggtatagatgtggtatttagttgttttgtattagtagtattttgcgcgagtaagtatttaatgtgt

SEQ ID NO: 1749 - DNA, 6239 bp, Artificial Sequence
  chemically treated genomic DNA (Homo sapiens)
ttatagtttttttagaagaatagaaatagtaagttttgagttacgattgtatttgaatgttattttatttgaagtttgaattagggataatttgattttagaagaataaaatgaggtttttaatatttgttttaaattgtaaggaaatgagggtatttttttttttttttttttttttgagatggagtttcgttttatcgtttaggttggagtgtagtggcgcgatttcggtttattgtaagttttatttttcgggtttacgttatttttttgttttagttttttgagtagttgggattataggcgttcgttattacgtttagttaattttttgtatttttagtagagacggggttttatcgtgttagttaggatggtttcgattttttgatttcgtgattcgttcgtttcggttttttaaagtgttgggattataggcgtgagttatcgcgtttagttgaaatgagggtattttttaagaggtagatgatagaatttattgtaatgaatttgttaagtttaaggttaaggatatagtttttttataaggtagtttttattttaaatgttaggtgtaattggggatttttgggttatttttatttttgatcgtttggttgtattgagggtttttattattttttgtggtttaataatttattagaatgatttatggaatttaggaaagtgtttcgttttataacgatagtttttatgatagtaaatagatatagattagaattagttataagaaaggatatagagggtgaggtgcggaaggggtttaagtgtaaagtttttagttattttttttttagatagttatttttttttagttatgatgcgtgatgatatttagagaatattgttaattagagaagtttttgaggttttggtgtttagcgtttttgggggttttgtttttgttgttgttgtttttgagatggagtttcgttttcgtcgtttaggttggagtgttgttgcgtgattttagtttattgtaatttttattttttgggtttaagcgattttttcgttttagtttttagagtacgagtagttgggattataggtatgtattatgtttagttgattttgtatttttagtagagatagggttttattatgttggttaggttgattttaaatttttgatatttggtgattcgttttttttagttttttgaagtgttgggattataggtatgagttattgttagttagtgtttagcgttttttagtggggtttgattttttattgttagtgtggttgattttttatttttagttttttttgagttaatttttgtgtatttagtttatttggaggttggaattgatataggatgttttaaagtttttattatagattatattgttagattatttggtggttaaaggttttaggtaaatatagatatttttattagataggacgttaaggggtttagagattattttttagtaattgaaggtaaagataatttttttattgtatattttttttttttttttttttttttttaagagatagggttttattttgtcgtttaggttggagtatagtgatatatttatggtttgttgtagtttcgattttttgggtttaagtaatttttttgtagttgggattataggttgtatgatgattattgttaattataaataaatattaataaaatgaataaaagaataatttttaaatttaaaaaaaaataataagatatataataatatataatatataaaataataaataagttattatttattatatttaataaaagaaatattaaaaaaattaataaattataaaaacgttaattaaaaataaaaaaatatataataaaatatatatttttaataatatttaatacggttagattttaatttattttttaagatttatattatatttattcgatttacgatatttaggtatttattaaaataaataaaaaaaaaataaatattaaaatgaaatataaaataaaaattttaaaaataagataataaatataaaaatatataattttaataaaattgaaaattgagatgaggaggaattttagaatataggaatttaagattagtttgggtaatatggtgaaatttcgtttttattaaaaatataaaaaaaaaaaaaaaaaaaattagttgggtgtagtggtgtatatttgtagttttagttattcgggaggttgaggtagaaggatgatttgagtttaggaggcggaggttgtagtgagtttagattatgttattgtattttagtttgggtaatagagttaaattttgttttaaaaaataaaaataaataaaaatgaaaaaaaaaattagaattgtatatatgaaatgggtgaattgtatggtaagtatattttaataaagttataataatatttttattgatttatatattattaaattcgtttttttaaaatgtgtaatttattgggttttaataaagttatagagttgttcgatattattataattaattgtagaatatttttattattttaaagaaatttagtattatggagtggttattttttattttttttttttatttaggttttgataattataaatttattttttgtttttatggatttgtttgttttggatattttagataaatggatttatatattatgtagtttttagtgattatttttttatttagtattatgtttttaaggtttatgtatgttgtggtatgtattggaattttatttttttatatgattaaataatatattattgtattggttggatgcggtggtttatgtttgtaattttagtattttggggggttaaggcgagggtattatttaaggttaggagttcgagattagtttggttaatatggtaaaattttatttttattaaaaatataaaaattagttgggcgtggtggtatatatttgtagttttagatattcgggaggtttaggtaggagaattgtttgaattcgggaggcggaggttgtagtgagttaagattgtattattgtattttagtttgggtaatagagcgagatttttattttaaaaaaaaaaaaaaagaaagaaaaaaatatatatgtttatattattgtatggttaagttatattttgtttatatatttattaggtgatgaatatttatgttttttttattttttggtttttgtgaataatgttgttatgagtatttacgtataagtttttgtatagatatttgtttttaattttttggggttttgtatttattttaattttaaaaatatattgtataaaaatgttatttattttgatgattgggttttttggtatttttttaaaatttgtatttgggttgttaggtatggtggcgtacgtttgtaattttaatattttgggaggttgaggtgggcggatggtttgagtttaggagtttgagattaatttgggtagtatggtaagattttgtttttataaaaaatatatatataaggtcgggtatagtggtttatatttgtaattttagtattttgggaggtcgaggcggacgaattatttgaggttaagagtttaagattagtttggttaatatggtgaaattttaatttaataaagaatataaaaaaattagtcgggtgtagtggtatgtgtttgtaattttagttatttcggaggttgaggtaggggaatcgtttgaatttgggaggcggaggttgtagtgagttaagattgttttattgtattttaagtttgggtgatagagtgagattttgttttaaaaatatatatatatataatttaaatatatataatatatatatataaaattagttgggtgtcgtggtgcgtgtttgtagtgttagttatttgggtatttgggtggttgaggcgggaggattatttgaatttaggaagttaaggttgtagtaagttatgatcgcgttatagtattttagtttgggtgataaagtgagaatatagtttaaaaaataaaaaaataaatttgtatttgaggtaagtgttatatttattttaatttagttttattttgtatgttttttgttttgttggttgtatgattttggataagttatttaatcgtttagagtttcgatttttttttttataaaatggggataatttttgtaattgtttatagttggtagtagaatgtaatgaagtgaattcgtttttatagagttagtattgtttttggtatatggtaattttaatatatttttttttatagggaggtttggtgttaggtcgggagtggggtggaagggttttaaaatggatggaagggttttaaaatggtcgtgagtattttttgtttttgagaagagttagtttagttgtttagagttttttgttgttgtcgttttcgtaagtagtaagtatttttggtttttttgttttagtatgatgtttttataaggttttttcgggggtgggatttaacgttgtttttttgatggtttttttggtttttagtattttttattttagttgtttagggttttttatttgcgttttttttatttttttttttgtttatttttatcgtaggttatagttttttgttttttttcgttgttatgaggtttgtattttgtagggttgaagtttaaagtttagttttttcgttaagtatacggataaatatgaattttggagaatttttttagttttaatgtaaatagaataggtaggggttttgatttacgggtcgttggggttagggttgggggttgggggtgtttatagggtttggttagtggggttttgggggggtagtgggtgtaaggagtttggtttgtgtttgtcggtcggtaggtaaacgtaatttacgcggtgggggaggcggttagcgtggtggattcgggtcgcgtggttttgtggtagtcgagttatggtttttaaattgagttagttgtagacggagtttttggcggttttgttcgagttagggttgagtaaagaggtattgatttaggtattgggtgagtcggggttttattttttggttggagaaggttttttggataagggggagttttgcggcggcggtcgaggggagttggttgagttgtttaatgggttgggggagattcggggtttcgaggacgagacggacgacgatggggaagattttacgttatttatttttaaagagttggagaattttagttttgaggaggcggtttattagaaagtcgtggtggagatttttttgtagtaaggagttttgtttcgttttcgtttttaggagagtttagaggggttttttttagtttttaacgagttttttttttgagttgagtttttatgatttttagtttttagtttagttgttgggaagggggatagggtttatgagagtttaggggtttttgtttggaggtttgagtttttagtttttgaattgtttttttgtagagttttaaattttatgagtttaggtttttagtttagtttttgggtaagggggatattttttaggggggtttaagatgggagaaaaagtaggtgagtttataatttaaatgtttggagaattgggaggtggtggaaatttttagttattttgattatttatattttttagattttaatttttgtattgagtttttagtgggtaggtttcggggtttaggaagtattgttagggaggagggttcgaagttggggtttgggggtttttttggttttttagggatttatgcgtttagttagggaagtttaggttttttttatttgaggtagatagagtttcgaggtgggagttgttttttttttttgtatggttataggtattttattttattagtaggcgttattagaggttgttcgttttatatttttattcgttggcggatttttcgttttttggagaattgggtgggttttgagttcgatgttttttttttttttagtagagttgatttagttattaattatttatgtgttttattattttttttttgttttataaatttataaatggtaaaaggttttgataaggtttgtgattattaatttgtaggaatggtggtttggaaagatttgggttaatttattttttatttagtgggggtgggggatgggggtgtgggggagaaggaaggatggtttgggggttataggggttatttttttttagcggttttttgatttttattttatagcgtttgtttgaggaggtttattattttttgggcgttgtgttgaggttttataggaataatttt

SEQ ID NO: 1750 - DNA, 6239 bp, Artificial Sequence
  chemically treated genomic DNA (Homo sapiens)
gaaattatttttgtgaaattttagtatagcgtttaggaagtagtgaatttttttaagtaggcgttgtagggtggaggttagggagtcgttggggaggggtggtttttgtagtttttaggttattttttttttttttttatatttttattttttatttttattaggtgggaggtgggttggtttagatttttttaggttattatttttataagttaatgattatagattttattagagttttttgttatttataaatttataaaataaaagagaaataataaagtatatgggtaattagtaattaggttagttttgttgaggagaggggaggtatcgagtttaggatttatttagttttttaggagacggggagttcgttagcggatggggatgtagaacgggtagtttttaatggcgtttgttggtgaggtggggtgtttgtggttatataggaaaggggagtagtttttatttcgaggttttgtttgttttaggtaagaaagatttgggtttttttggttaaacgtatgagtttttaggaggttaggaaagtttttaaattttagtttcgggtttttttttttggtagtgttttttgggtttcggagtttatttattgaggatttagtgtaggagttagggtttggagagtataaatgattagagtggttaaaaatttttattattttttagttttttaggtatttgagttgtgaatttatttgtttttttttttattttggatttttttgggaaatgttttttttgtttaaggattgggttaaaggtttgggtttatgggatttgggattttgtagaggagtagtttaggggttggaggtttaaatttttaagtaaggatttttgggtttttatgggttttgtttttttttttagtaattaggttaaaggttgaaggttatggggatttaatttagaaggggggttcgttaggagttgaggggggtttttttaggtttttttgggagcggggacggggtagggttttttattgtagaagggtttttattacggttttttggtgggtcgtttttttagggttgaggttttttagttttttgaggatgggtggcgtgaagttttttttatcgtcgttcgtttcgttttcggagtttcgagttttttttagtttattgggtagtttagttagtttttttcgatcgtcgtcgtaggatttttttttgtttagggggttttttttagttaggaggtagggtttcggtttatttagtgtttggattagtgtttttttgtttagttttgattcgagtagggtcgttaggagtttcgtttgtagttggtttagtttagaaattatggttcggttgttatagggttacgcggttcgggtttattacgttagtcgttttttttatcgcgtgggttgcgtttgtttgtcggtcggtagatataaattaaattttttgtatttattgtttttttaaaattttattagttaagttttgtgggtatttttaatttttaattttggttttagcggttcgtgaattagggtttttgtttgttttgtttatattggagttggggaaattttttaaggtttatatttattcgtgtgtttagcgaagggattgaattttggattttagttttgtaaagtgtaggttttatggtagcggagagggatagggagttatggtttgcgatgggagtgggtagaggggagggtgggggaggcgtaggtgaggggttttgagtagttgggatggaaggtgttgggagttagggaggttattaggagagtagcgttgggttttattttcgaaagaattttgtaggggtattatgttgagataggagagttaaaaatgtttgttgtttacgagagcggtagtagtagggagttttagatagttgggttagttttttttaagggtagaggatgtttacggttattttggggtttttttatttattttgggatttttttattttattttcggtttgatattaggtttttttgtaggaaaaaatatgttaagattattatgtgttaagaatagtgttggttttgtgagggcgaatttattttattgtattttgttattaattgtgagtagttatagagattatttttattttatagaggaggaaatcgaggttttgagcggttaagtaatttgtttagggttatatagttagtaaggtagaaaatatgtaaggtgagattgagttgggatgagtgtgatatttgttttaggtgtaaatttatttttttattttttgagttatgtttttattttgttatttaggttggagtgttgtggcgcgattatggtttattgtagttttgattttttgggtttaggtgattttttcgttttagttatttaagtatttaagtagttggtattataggtacgtattacgatatttagttgattttgtgtgtgtgtgttgtgtgtgtttgggttgtgtgtgtgtgtgtttttgagatagagttttattttgttatttaggtttggagtgtagtggagtaattttggtttattgtaattttcgttttttaggtttaagcgatttttttgttttagttttcggagtagttgggattataggtatatattattatattcggttaatttttttgtattttttattgagttggggttttattatgttggttaggttggttttgaatttttgattttaagtgattcgttcgtttcggttttttaaagtgttgggattataggtgtgagttattgtgttcggttttgtgtgtgtattttttgtggagatagggttttgttatgttgtttaggttggttttaaatttttggatttaagttattcgtttattttagttttttaaagtgttaggattataggcgtgcgttattatgtttggtagtttaggtgtaaattttaagggaatgttaaaaaatttagttattaaggtaaataatatttttatgtaatatgtttttaaaattaaaatgaatgtaaaattttaaagaattaaaaatagatgtttatataaaaatttgtgcgtgaatgtttatagtagtattatttataagagttaaaaagtggaaaaaatataaatatttattatttgatgaatatataaataaaatatggtttgattatgtaatggtatagatatatatatttttttttttttttttttttttttttgagatgggggtttcgttttgttgtttaggttggagtgtagtggtgtaattttggtttattgtaattttcgtttttcgggtttaagtaatttttttgtttgagtttttcgagtatttggaattataggtatgtattattacgtttagttaatttttgtatttttggtagagatggggttttattatgttggttagattagtttcgaatttttgattttaggtgatgttttcgttttggttttttaaagtgttgggattataggtatgagttatcgtatttagttaatgtaatggtatattatttggttatataaaggaatggagttttagtatatgttataatatgtatgagttttgaaaatatgatgttaagtgaaaaagtggttattaaagattatatagtgtgtgagtttatttatttgaaatgtttagaataggtaaatttatagagataggaagtggatttgtggttgttagggtttgggtgggagaagggaatggggagtggttattttatggtgttgggtttttttaggatgataaaaatgttttataattgattgtggtgatatcggataattttgtgattttattaaaatttaatgaattgtatattttaaaagggcgagtttgatggtatgtaaattaataaaaatattgttgtagttttattgagatatatttattatataatttatttattttatgtgtgtaattttgatttttttttttatttttatttatttttattttttgagatagggtttggttttgttgtttaagttagagtgtaatggtatgatttgggtttattgtaattttcgttttttgggtttaaattatttttttattttagtttttcgagtagttgggattataggtgtgtattattgtatttagttaattttttttttttttttttttgtatttttggtagagacggagttttattatgttgtttaggttggttttaaatttttgtgttttagagtttttttttattttagtttttagttttgttgggattatatgtttttgtatttgttgttttgtttttgggatttttattttgtattttattttggtatttgttttttttttgtttgttttgataaatgtttgagtgtcgtgggtcgagtaggtgtgatgtaaattttgggaagtaggttggggtttggtcgtgttgggtgttgttgagggtgtgtgttttgttatgtgtttttttgtttttagttgacgtttttgtagtttgttggtttttttggtgttttttttgttaagtatagtgagtggtggtttgtttgttgttttgtgtgttatgtgttgttgtgtgttttgttgtttttttttgggtttgagggttgtttttttgtttattttgttagtgtttgtttgtggttaatagtagttattatgtaatttgtagttttagttataggaggattgtttgagtttaggaggtcgaggttgtagtaagttatgagtgtgttattgtattttagtttgggcgatagaatgaaattttgttttttaaaaaaaaaaaaagaaaaaaaaaggatgtatagtaggaggattatttttgtttttagttgttgggaggtgatttttaggttttttaacgttttgtttgatggaagtgtttgtgtttgtttggggtttttggttattagatagtttaataatgtgatttgtaatgaaggttttggaatattttgtattagttttaatttttagatgagttggatatataagagttagtttaggagagattggagatgaaaggttagttatattggtagtaagggattaagttttattaaaaaacgttggatattggttggtagtggtttatgtttgtaattttagtattttaggaggttgaggggggcgggttattagatgttaggagtttgagattagtttggttaatatggtgaaattttgtttttattaaaaatataaaattagttgggtatggtgtatgtttgtaattttagttattcgtattttggaggttgaggcgggagaatcgtttgaatttaggaggtggaggttgtagtgaattgagattacgtaatagtattttagtttgggcgacgagagcgagattttattttagaaataataataataaaaataaaatttttaaaaacgttggatattaaagttttaggagtttttttggttagtagtattttttgagtgttattacgtattatagttggggggaggtgattgtttggagagaaggtaattaggagttttgtatttgaatttttttcgtattttattttttatgtttttttttgtggttggttttgatttgtgtttgtttgttattataaaaattgtcgttatgaggcggggtatttttttgagttttatgagttattttagtgaattattgaattatagggggtagtgggaatttttaatgtagttaagcggttagaagtgagggtggtttaggaatttttagttgtatttggtatttgaagtgaaggttgttttgtggagggattgtgtttttagttttgagtttgataaatttattgtagtaggttttgttatttgttttttagagaatatttttattttaattgggcgcggtggtttacgtttgtaattttagtattttgggaggtcgaggcgggcggattacgaggttaggagatcgagattattttggttaatacggtgaaatttcgtttttattaaaaatgtaaaaaattagttgggcgtggtggcgggcgtttgtagttttagttatttaggaggttgaggtaggagaatggcgtgaattcgggaggtggagtttgtagtgagtcgagatcgcgttattgtattttagtttgggcgatagagcgagattttattttagaaaaaaaaaaaaaaaagagaatatttttatttttttgtaatttgggataggtgttaggagttttattttatttttttgaaattaaattatttttgatttagattttaggtaaggtggtatttaaatgtagtcgtgatttagggtttattatttttatttttttaaaaagattatgg

SEQ ID NO: 1751 - DNA, 6973 bp, Artificial Sequence
  chemically treated genomic DNA (Homo sapiens)
tgtatttatttgtttttggtgtagtttttgaattttttttagttttcgttgtttttttttttttaagttttttcggataattttagttttagttaaagtagtacgtaggtttttagttttagttcggtcggtttttttcgttcgtgttagagtttttagttttatggtttgggtttttagttttattttttgttgtagcgaggtttttcgtaggagtcggatttttttttttagtcgtcgtagtttttgtagttgtcgaacgattattttagtttgttggtttagggtttgtgatttttttagtttttaggatttttaaagataggttagtgtaggtgagatttgtttttagtgttggaaggatagttgagggtataaatatagttaggagaaggaaaagaggatttttttgttttcgtgtggggaggtgaagggggtgttgaagttggggtatggggatgtttgtattgatattattattatttattaaagttttattgagtatgttgagtttagtgtttggatttataggatttaaagtttggttgagatcgtggaatatgatttttttagagagagttatatataggaggatttaatattaaatgtgtatattattaggttatatattttttttgttttttggtggtttttttgttttatttatttttttatttttaggttatatattttaagtggaaaggttggaagaatatatagggattttttaattttaatttaagggtaagaagtttgagggaggaatgggtatagagaggtcgtaagtttttagtattaatatggtgaggttaggtgttagttaaaaggtatttattggttgggcgcggtggtttatgtttgtaattttagtattttgggaggtcgaggcgggcggattacgaggttaggagatcgagattattttggttaatacggtgaaattttatttttattaaaaatataaaaaattagttgggcgtggtggtaggtgtttgtagttttagttgtttgggaggttgaggtaggagaatggcgttaatttgggaggcggagtttgtagtgagttaagatttttttagtgtattttagtttgggcgatagagtgagattttattttaaaaaaaaaaaaaaaaaaaaaggtatttattgagtgttaggtatattttatgaggagtttgagagaatagtatataaataatatagtgttagtttttagagaaatcgtttattaatgttacgtgaagtttaatttagtttggaatatggtttttgaggtagttttttgagatttaggattataagagattgttgttgttgtcgtttttagagatagggtattattgtgttatttaggttttaatgtagtggttggattataggttattgtagtttttaatttttgagtttaaggggttttattattttagttttttgagtagttaggattataaatgtatgttattatagttagttaattattttttgtggagacggagtttcgttttgttgtttacgttggttatgaatttttgggtttaagtgatttttttgttttagtttttaaagtgttaggattataggtgtgagtcgttatatttggttcgttttttttttttttttttagtagtagcgatttgtaggttagggaaattaagtgatttgttaaatgttttttagttggtagttaaattagaaatagagtttttgttttttgatatttagtttagtattttttttttattatgttgttttttttaatgtaattttattttggagtaaaatggtagaatgatattttagtatatttgggaaaagatatatgaaataagaataagaatgtttatagataatacgatagtatggttagtttttatagtatgttttttgtaaaggtttttttttattagaatgaatttatattgttatagtgttgggtttttatttttagtttgtatttttttattttgttttatattatgttttattattagttggtggttaatttatttttttttttaggattttagattttttattaattataaatttaagttaggatttgttttatttattattgttatttttatttttagtatttagtatattgttttattatttatgtattgtaggaattaattgtttatataaaaatgagtacgttttggaaattagggtcgaaatagggtaaggagtttattttagtgaggaagggttattagtaagtaagtttgagaaaacggcgtggatggatttttatttgttttttcgttttggtttttgtttgttattggaaatatttcgtttttatatggttatttgaggtttttgggtgtttagtcgtttttttgagatattttgatggtttgggggttggattaggggaatgtttgagagttaggtgggagttatttttggtagagttgaaaggggtcgagtttgaaagtgggaggggggaattagtttagtggaatttgaagaattataaaaataaagatggttagttttttaggtagagataattattattttttttgtttggttttattgatttgaaggtggaaatatttttatattatttgaaggttttagattttgtttttagttatttatgtttttttggataagaggagaaataaagatattttaatttaatttttaggttattttttaaagagaaagtttttataataataaagttataatttttgaattatagttaggtttattcgatgtttagttttttttttatttttttaaagtaggagatattttaaatttatttgtttgttttaatttggttttttatggaatttaagtaattaattattaagtggagagaatttattgaaagagatagattgagaggggttttgaggttttatttatatttttaggattttgggtagtgtttttatttttttttttaagtttttatggtttttgttgtttttggttagaggtgagaaaggaggtatatagtgtaggggttttgagcgttatttttagagttttttttatggtttagtaaggtttgagggaagtttatttagatattagtaggttatgatttttgggtttttttttgttaaagtgttggtttaaggtttggttttagttgaatgtggttatatgtagggttagattttttttaagattttgggaatttaggtcgtttagatttttaggtagaaaagttagcgttttgatattttatttaaattttttttgcggttgtttttttagtttttttttattatttttttagtttttatgtttgttgttcgttttttttttttcgagttttaatatatagtgggtatttgaagattttttttttatttttttatttttattaatttattttttattcgaatttgggatttttattttcgtttttttttataatttaatttatttttttttgaaggaattattttggttttgatttttatttttatgttttaatagtttgttttcgttttttgtacgttagtcggttttatttttttattattgtttttttagatattagaggttttatttagttagttcgtgagttttaaggttgttttgatttttttatttgtttttttatttggtttttgtattttttttttttttggattttttgaatttttttaggattttcgtttagttttttttcgtttttaatcgatttttttcgaacgttttttattaatcgcgagagttttttattgcgttttggttatattttttacgtttcgttttcggtttcgtttttgtttttgatcgcgtttgcgtaaggcgggcgttttaaagttttattttattttgttgggaggagggggaaaggtgtacgtaggcgtagtggcgtttaaatttgggtttattaaatgcgtcggagtattttcgcgtttaggcggtttttttttattgcggtaattcgggaaaatttgtgaattaattagaaaaagtggaaggcgggagattttggggcgttgtttaatggcgcggaagagaataaatgagttggttaatcgggaacggtacgggggcgggttcgttcggcgcgaagttcgggttcgggaatttcgaaggaggggtaggcgttgttcgcgcgtagaggtcgcgttttttttggtttcggttttttggttgttaaatagatgtagtaacgtcggtttttgtcgaggagtttaaggggtttcgggattcgtcgtataggttggtattgtttgaagaggaggttattcggagattgcgtcgcgcgggtagattcgaaacggggttggggcggagtgggaaaaggtcgggtatgttttgtatgatcgcggggagtttttttttgtttttattttatttagagaagtcgggaagtaggggtttaggtttaatttgttggagtatttaaggattcgtttgtatttttttttgggggatgatagtggatttattgttttcggaggtttaattagttatgagtgagggattggttagaagatcggggcgtaggtaagtaggagtgttttattaggataagtaagtttgataggaagaagttgttttttttcgaattatatagaggtgatgtgttcgtattgtacgtagacgtgtgtataataggattttttttttcgcgtttcgttatttcgatatatataggagttgtttaaagtatttttgttttgtagattggaggttttttaaatattttgtgatttgaggatttagtttaagtgaggtgttataggacgtgtttttgagtttgtattgtacggagatttttttggaattttttatttgtaagtcggtttaattaattttgtattgagttttaggttgtttgtattttgaatttgggttatttaggtagtgtgtttaaagttgaaatcgtatatagtataatttaagtttgtattagattgggaagcgaatttaagttagcggtgcgtggtttaggagtgggaaaggaaatggatgtttgaagtggaagaggtggtgtagagggggtatcgtttatgttgttttgtttttaattgttgcgtatagggggcggtaggggcggtgatttttatattttttattttttcgtcggggttggttgtatttatcgtttgggttatagggtcgatttgtgtgatgtggttttgcggttttagtaggagtttggttttatttttgggatttacgtcgaattgtatgtcgagtttcggggtgatgattggagggttagtttggaagattatagtagttaaggtgagtattaagtagggtagttttgtttttgggtggttgaagcgttaggttggaatgagtaaggtttttataagattttgttgtttgttttttatatttttattagattggatggatagtcgtggtttagatttttatttttttattagaagtgtgtatagttagaagttttttgttagattgattttttttggtttcgtttagtttatataggatttgggatattattagaaagatattatagtggggatgttttgaggttattagaggttaagtttagatttgatttagtttttagttttgttgaggtattttgtttttgggttagggtagttttatgttgaataatgtttttaataatttgggtatgttttttttcgtgatttgaggtagttagttttagaaagtttagatttatatttgagttttgttattgttttttggtaaagttagttgtaggagtgttatggttattagattatagtagttaatatttatttagtgtttattgttatgagttaggttttattttaagtgtattgaatgtaggtggtattaatattatttttatttatagtaaaggaaaatgaggtataaagaggttaaggaatttgtttagggttgggtatggtggtttatatttataatttagtattttgggaggttaaggtagggtggattatttgagtttaggagttcgagattagtttgggtaatatggtgaaaatttgtttttattaaaaaattaattaattttttaaaaaaagtttgggcgcggtggtttacgtttgtaattttagtattttgggaggtcgagatgggtagattacgaggttaggagttcgagattattttgattaatatgttgaaattttatttgtgttgaaaaaaaaatataaaaattagttaggtgtggtggcgtgtatttgtaattttagttatttaggaggttgaagtagtagaattatttgaattcgggaggcggaggttgtagtgagttgagatcgtattattgtattttagtttgggcgatagagcgagattttattttaaataaataaataaattaaaagtttgtttagggttatataattggtaagtggtagagttaggatttgaacgagttggagttgggggagagtgagtatgtttgaaaattggattttagggcggggtacggtggtttacgtttgtaattttagtattttgggaggttgaggcgggtagattaggaggttaggagtatgagattagtttggttaatatggtaaaattttgtttttgttaaaaataaaaaaattagttagacgtggtggtatatgtttgtaattttagttatttaggaggttgaggtaggagaattgtttgaatttgggaggcggagtgtagtgagttgagattgtattattgtattttagtttgggtaatagagtaaaattttattttaaaaaaaaaaaaaagaaagaaaaaaaaagaagaaagaaagaaaattggattttaggatagtgagggtagggattttttgtaggaaagtataagaaatatagatttgtttttagttgataaggagtgtattgtttggtatttgttatttgttgaggggtttaggatgtgagggagaatttgattatagttttatatttttttttagaaattatatagatttttttatttttgattttggttatttttgtttttgttttttatatttgtttggtgttttattattaatagg

SEQ ID NO: 1752 - DNA, 6973 bp, Artificial Sequence
  chemically treated genomic DNA (Homo sapiens)
tttgttgatggtggggtattaggtaaatatggaggataaaaatagaaatgattagagttaggagtggagaaatttgtatgatttttggggaagaatatgaaattgtagttagatttttttttatattttaagttttttagtaggtgataggtattaggtagtatattttttgttagttaggaataagtttgtgttttttgtgtttttttataaaggatttttgtttttattgttttaaggtttaattttttttttttttttttttttttttttttttttttttttttttgagatggagttttgttttattgtttaagttggagtgtagtagtgtaattttagtttattgtatttcgttttttaggtttaagtaatttttttgttttagttttttgagtagttgggattataggtatgtgttattacgtttggttaatttttttatttttagtagagatagggttttattatgttggttaggttggttttatatttttgattttttgatttgttcgttttagttttttaaagtgttgggattataggcgtgagttatcgtgtttcgttttaaggtttagtttttaaatatgtttatttttttttagttttagttcgtttagattttagttttattatttattagttatgtgattttgggtaagtttttggtttgtttgtttgtttgagatggagtttcgttttgtcgtttaagttggagtgtagtggtgcgattttagtttattgtaattttcgtttttcgggtttaagtgattttgttgttttagttttttgagtagttggggttataggtgtacgttattatatttggttaatttttgtattttttttttagtatagatggggttttaatatgttggttaggatggtttcgaatttttgatttcgtgatttgtttatttcggttttttaaagtgttgggattataggcgtgagttatcgcgtttaggttttttttaaaaaattaattaattttttggtagagataggtttttattatgttgtttaggttggtttcgaatttttgagtttaagtgatttattttgttttagttttttaaagtgttggattataggtgtaaattattatgtttagttttggataagttttttaatttttttgtgttttatttttttttattgtaaatgaggataatattagtattatttatatttaatatatttaaaatagggtttggtttataatagtaagtattagatgaatgttggttattatagtttaataattataatatttttatagttgattttattaagaggtagtggtaaaatttaaatgtgaatttaggttttttgaggttaattgttttaagttacggagaaagatatgtttagattattaaaaatattatttaatatagaattgttttaatttaggaatagagtgttttagtaaagttggaaattgaattaagtttaaatttggtttttagtggttttagaatatttttattgtgatatttttttgatgatattttaggttttgtatgagttaaacgggattaaaaagggttagtttggtagagagtttttgattgtgtatatttttggtgggaagatgaaggtttggattacgattatttatttaatttgatgggagtatgggaggtaggtagtaaggttttgtggagattttatttattttagtttggcgttttaattatttaggggtaaagttgttttgtttaatgtttattttggttgttgtggttttttaggttgattttttagttattatttcggggttcggtatgtagttcggcgtggattttagagatgaggttaggtttttgttggggtcgtagggttatattatataggtcggttttgtggtttaagcgataggtgtagttagtttcggcgggggggtggaaggtgtagagattatcgtttttgtcgttttttatgcgtagtagttggaagtagggtagtatgggcggtgttttttttgtattattttttttattttaggtatttatttttttttttatttttgggttacgtatcgttggtttaagttcgttttttagtttgatgtaaatttgagttgtgttgtatgcggttttaattttgagtatattatttgaatagtttaaatttagagtgtaagtagtttaggatttaatgtaaaattggttaagtcgatttgtaaatgaaaaattttaggaaggttttcgtgtaatgtaaatttaggaatacgttttatggtattttatttgagttggatttttagattataaaatatttggggagtttttaatttgtaaggtaaggatattttaggtagtttttgtgtgtgtcggggtggcggggcgcggggaaggaggttttgttatatatacgtttacgtgtaatacgaatatattatttttgtgtaattcggagaagagtagtttttttttgttaaatttgtttattttaatagagtatttttgtttgtttgcgtttcgattttttggttaattttttatttataattggttgaattttcgagggtaatgaatttattgttattttttaaaagaaagtgtaaacgagtttttaagtattttaataaattggatttaaatttttatttttcggtttttttaggtgggataaaaataggaaggagtttttcgcgattatgtaaggtatattcggtttttttttatttcgttttagtttcgtttcggatttattcgcgcggcgtagttttcgagtagttttttttttaagtagtgttagtttgtgcggcggatttcgggattttttgggtttttcggtaggagtcgacgttgttgtatttgtttgatagttaagaagtcggggttaggaggggcgcggtttttgcgcgcgggtagcgtttatttttttttcggaattttcgggttcgaatttcgcgtcgagcgagttcgttttcgtgtcgttttcgattggttagtttatttgttttttttcgcgttattggatagcgttttaagatttttcgttttttattttttttgattagtttataagttttttcgggttgtcgtagtgaggaggagtcgtttgggcgcggagatgtttcgacgtatttagtgggtttaaatttagacgttattgcgtttgcgtatatttttttttttttttttaatagagtgaaataggattttagggcgttcgttttgcgtaggcgcggttaggggtagaggcggggtcgggagcgaggcgtagggggtgtggttaaagcgtagtagggggttttcgcggttggtaagggacgttcgggaagagtcggttgggggcgggaaggggttgagcgggggttttgggagggtttaaggggtttaaaggggaagggggtataggggttaggtgaagggatagatgaagagattagaatagttttagagtttacgggttaattgggtgaagtttttggtatttaggggagtagtggtgggagagtagagtcggttagcgtatagggggcgagggtaggttattgagatatgggggtgagggttaggattagaataatttttttagaaaaaggtagattaggttgtaaaaagggacgggagtagggattttagattcgggtaaaaaatagattaatgagggtgggagggtgggaggaagatttttaagtgtttattatgtgttaggattcgagaaagaggaggcgggtagtaggtatggaagttaaggggatagtagagagaagttgagagaatagtcgtaggaaagatttgaataagatgttaggacgttggtttttttgtttggggatttaggcggtttggatttttaaggttttggggagggtttagttttgtatgtggttatatttagttggggttaggttttgggttagtattttaatagggaaggatttaagagttatggtttgttggtgtttggatgggttttttttaggttttgttgagttatggagagaattttggagatggcgtttaagatttttgtattgtgtatttttttttttatttttggttaggagtagtagggattatagaaatttaaggaggagggtaaaggtattgtttagaattttgaaagtatgagtaaagttttagagttttttttagtttgttttttttagtaaattttttttatttgatagttagttgtttgggttttatgaggaattaggttgagataagtaagtgaatttggggtattttttattttggggaagtaggaaaagagttaagtatcgggtggatttggttataatttaaggattatgattttgttattgtaggggttttttttttggaaggtggtttgaaaattgaattggagtgtttttgtttttttttttgtttaggggaatatagatggttgaagatagaatttagagtttttaaataatgtggagatgtttttatttttaggttagtgggattagataaggggagtggtggttgtttttgtttgggaaattgattatttttgtttttgtaattttttaggttttattgggttgattttttttttttatttttaagttcggttttttttaattttgttaagaatggtttttatttggtttttagatatttttttggtttaatttttaggttattaagatgttttagagaggcggttagatatttagagattttaagtgattatgtgggaacgggatgtttttagtgataggtaggagttagggcggagaggtaggtagggatttatttacgtcgtttttttaggtttgtttgttagtgatttttttttattggaataaattttttattttatttcggttttagtttttagaacgtatttatttttatgtaagtaattagtttttatagtgtataaataataaagtagtgtgttaagtgttagggatgaggataataatagtgaataagataaattttgatttaaatttgtaattaataaggaatttaaaattttaagaggggagatagattgattattagttgatggtaaagtatggtatgaggtaagatgaagaagtgtaaattagaggtagagatttagtattgtggtagtgtgggtttattttgatggaagaaagtttttatagaggatatgttgtgggagttggttatgttgtcgtattatttgtaaatatttttatttttgttttatgtgtttttttttagatgtattgggatattattttgttattttgttttagaataggattatattagaagaagtagtatgatgaagaaggaatattagattgggtgttaggagatagagattttatttttagtttggttattagttagaggatatttggtaagttatttaatttttttagtttatagatcgttgttattaaagaaagaaagaaagagcgagttagatatggcggtttatatttataattttagtattttgggagttgaggtaggaggattatttgagtttaggagtttatgattagcgtgggtaataaagcgagatttcgtttttatagaaaataattagttggttgtggtggtatgtatttgtagttttagttatttaggaggttaaggtggtaggattttttgagtttagaagttgaagattgtagtgatttatgatttagttattgtattgaggtttgggtgatatagtgatattttgtttttaaaaacgataataataataattttttatagttttgggttttagagagttgttttaggagttatgttttaagttggattaaattttacgtgatattggtagacgatttttttaaaggttggtattgtgttatttatgtattgtttttttagattttttataaagtatatttaatatttaataaatgtttttttttttttttttttttttgagatggagttttattttgtcgtttaggttggagtgtattggggagattttggtttattgtaagtttcgttttttaggttgacgttatttttttgttttagttttttaagtagttgggattataggtatttgttattacgtttagttagttttttatatttttagtagagatggggttttatcgtgttaattaggatgatttcgattttttgatttcgtgattcgttcgtttcggttttttaaagtgttgggattataggtatgagttatcgcgtttagttaataaatgttttttaattagtatttggttttattatattgatattggaagtttacgatttttttatgtttattttttttttaaattttttgtttttaaattagaattgagaagtttttgtgtgtttttttaatttttttatttaaaatgtgtggtttaaaaataaaaaaataaataagataaaaaaattattaaaaaataaaaagaatgtgtggtttaatgatatatatatttgatgttgaatttttttgtatgtagttttttttagggagattatgttttacgattttagttagattttaggttttgtgagtttaggtattggatttaatatgtttaatagggttttgatgaatgatgatgatgttaatgtagatatttttatattttagttttagtattttttttatttttttatacggaagtagaggggttttttttttttttttttggttatgtttatgtttttaattatttttttagtattggagataagttttatttgtattaatttgtttttgaaggttttgggggttggaggggttataggttttgagttagtaggttgaggtgatcgttcggtagttgtaagagttgcggcggttggaggaggaggttcggtttttgcgggagatttcgttgtagtagaagatgaggttagaggtttaggttatggagttagaggttttggtacgggcggagaaggtcggtcgagttgaggttgagggtttgcgtgttgttttggttggggttgaggttgttcggaagaatttggaagaggggaggtagcgggagttggaagaggtttagaggttgtattaagagtaggtgaatgta

SEQ ID NO: 1753 - DNA, 5285 bp, Artificial Sequence
  chemically treated genomic DNA (Homo sapiens)
gtcgagagttagtagtttagtttttcggcggttttgggtaagttttaataggatgttaggcgggttggtgagtaggaagagacgtcgtttataatttttttttgttgtaatttattaaatttatttggggtttttttgagacgttttttggaaatgttatattttaagggtttttttgttagaaaaggttagagtttacgtgggttttttatgttaaaggagtttgaaagaaaaggaaaggaaatgtatatttttagttttagttatgattaagtgggtttaggttatgagaatatttagatgatttatatgacgttatatgaagagttaattagtttaataattttcgaaaaatatttcgtttaagagtatttattagatatttggaatgtattaggttgttgttttaagttttttattagggtatagtggtttatttcgattgtattttaatagagtagggtaggtttgcgtatgatatttatttaatttatggggagattgaggtttagagagggttagtaatttgtttggggttttatagttagtaagtggtacggtagagatggaaatttaagattgtttaaatttaaagttggagtttatttgttttaataatttttaagttttgggagttttgatttagttttgtttttagtatttgattagtgtaagtttatttgcgtgaagatgaagttttattaaattattagttttggtttggtttggatgaatttagaagattttggggtttttttgtagttggttttggttttgaaatttttcggttatttttaggggggtaattatagtagattgtatttattattttgtggaagaattttagtgtttattatttgtgtatgtgatttgagttaatttttagaataggtggtttcgggtgggtttagtagagagatggtatatattgagatttgtttggtttaagggagagattttaggttttttttgttagtaaaggttttgggttttttatatagattattaagatgattttttaattttgttgatggttttttttatgtaatatgagttatttagaaagttagggttttatattagtgatagtttatttgttagtatttgtttgttaagattataaggtagataaggattttttttggaattttataatggaatattagagtgtgatagttaggatgtgggtttaggagttagattgtttgggttttaaattttgatatttttatttttaagttgtgagaatttaggtgattttatttttttgagttttagtttttttattagttaaatggggatacgagtttttatgttatagggttggtgtgatgattaaatgagataatgtgtgtgaagtttttgataggatgtttggtatatagtaattatttagtatatgaggttggtcgttgtgtagacgatggtgaaggaattagtgttgattagattagggatttttgtggggtcgtattaatttttggggaataaattagagtttttgtttttttttagttttttaaatttttttaagttatttaggtttatatgaaatttattttttttaggaagttattttgattattttagtttatattgattttattatatttgagttttttttgtttattatttgtatagattattttagtatttaaatcggttttaataattttttagttttttaaagtagttaatggtttttggaagttagatatttttagtttttttttttttatagtttaagttagggttaggtatatagtagatgattttttagtaagtttttagattgattttagtgtggttgtggatgtttgtgatttagttttttttttttttacgtttttttatagttttattttttttatttatttatttttttttttggttttagttagtagggtggggagttggagttatgattttataggatagttgtttttagattataaaatgtttaaagaaatttgagggtgggggagttaatagatggggaaaaaaatgttttttatgtttttttattaaataaagatatgaaaaaaaatatttgttttattattattttagtaaagaaaggatgtttttatattaataaagtagtaagggtataatttttgattaaaggttaatacgaagttggaaagttttaattttattgagaaaataaaataaaataaaaagaattttattgttgttgtgattttttttttttttttaaggattggagaatattttagtttttattgatttgtgtcggtggaatttatgggtttggggatagttattttggaggacgtttttgttgaattagggttttttataaatatatgaggatttttaaagttattgggttgggtagattcggatttttttttagttgttttagaggaggtttattttatgttagattttatttataattttaggagttgaggtggcggaggttttgaattttcgtttttgtatttttttttttcgggtagggtcgagttttttttttttcgttaattcggagtagatgaggcgagattgagcggtaagtttattttgggaagaggttggggagatttaatgggtagggttttttttatttttattattaagttgagtattcgtgtttatgttattttttagttttagtttggggaaaggaggaaaagtgggtattttagttcggaggtggcgggggaggggggtgtgggggttggtgttcgagatattcggttgggcgggtatagataggatttgaatatagggaagtatggtttagttttttgatttatagttagttacgttgggtttggattcggagggaggtacggttgtttttcggttcggttttgtatcgttgttaggggttttgtggggtttttagagggagaggcgtttaatattcggtttttttttaaatattttttattttaattgtttttagaagaggcgtgagcgtttatagtgaatttagtatagaaatttgttaggggagttgttgttgattgtatcgcgatttaaaggatcggcgttttttgtagatgtaggggttgagttaggttaagcgcgtcgtggaggttcgcgtggacgtagattcgggtgttatatagatgcgttggaatttaggtattttttcgcgtttcgtaaatttagatgttttagtttggatcgagcgagggttagagggttagttaggttagggttaattttagagttatgggttttttaaatgcgatttttagggttgagttgttgtggacgagcgatttatgtcggaatttcgcgtttacgtggttgtttaaagtttcgagttttcgggttgtaggttttagttacggaatcgagttgggagagttataggggttgggatttggaggatcggttgaggttcggtgtttttggttgtgttcgcggttcggagtcgtcgtttgattgaggggttcgttatagatgtgtgatgtataagttttgtacgtaataggagtttaataaatgtgcgaaggggggtatatttatgatcgtattgtatgtaggcggtttagaaggaagtttttgattggtatagggatggaggatggggtaagagtcgtaatagcgtcgcggagttttaacgttgtcggttttttggggtacgagtatagttttaagtagttttaagttttaggaagtttttagtttaaagtatagggcgtattggagtttgggtacgatatagtttatattacggttgcgatggtaagttacgtttaagttttaagggtttaggggattttcgttttttatagtcggaggagaaatttgggcgtagaaagtagggggaatatttggttgtaggtgagtaagcggggttaggagttttcgttagagtttttgcgtttcgggagaagggtgattatttttaggtttgttcgacgttttttttagggtgcgtttcggaagagcgagttttttaaggttatgtcgagtgggcgcgtttcggtttttttcgggagaggagaggcggggcggatttgtgtttcgttttcggttcggttcgtttttagtgttcgtttcgttttcggtattcggtcggcggcgtttttgatgtttcgattcgttagttcgcggagtcgttttgtttcgcgttttagttcgcgtttgtagttcgtttaggcggagttagttcgcgtttcgttcgtcgcgattcgggttcggaggttcggatttcgggttcgtcgtttttcgggtcggtttcgcgtttcgtattttcggcgtttagcgtttcgcgtttcggcgggcggagcgtattatgtcgtagttggatttcggcgggggcggcgcgggcggcggcgacgatttcggcgcgtcggacgagttgttggttttttaggatgaaggcgaggagtaggacgataagagtcgcgatagcgtcgtcggtttcgagcgcgatttggtcgagtttaagtcgtcgttcgtgaacgagttcgagggcgcggtcggcggcgtagggatttcgggggtttcgggggtcggcgtcggggttcgcggcgaggtcgaggtgagttttcgtcggcgtcggtttttttttcgcggtcgtcgcgtcgcgtcgttttagttgcgcgcggttttcggggtttttagcgcgtagagcgtttttgtttcggcgtcggtttcgattttcgcggttttatcgttttttattttttttcggttttttttttaggttttcgggcgggaatacgttgcgtagagatttttttcggataaatttttagagtttttggaggacggtgagtttttgttcggttcggttttttttcgtcgcgtttaggttttggtttcggtgggacggggacgttaaggatcgcggggagtcgggtgttttttttatcgtagtttaggaggcggtagaatttaggggtggagagtggggggcgggtttttcgggcgtcgtcgggtcgagttattttcggtgttttgatttttataggagtaaatagattttcgttattttcgtttttttttttgtttaggtgattgattaattcgtcgtttttaggagatagaattggttaaggttttttggttggagggcggggggtgggaggttaagtaggggttatttcggggaggtttgttttttaggttttttttttaaaatttggtattgtcgatatttttagttcgtttttttttaagttaggaatttgtaggggattttttggtaatttttttttttttaagagtagatagtttttagttttagtcgttgttagggttggtgtgtttgatttagttgtggtttttttagg

SEQ ID NO: 1754 - DNA, 5285 bp, Artificial Sequence
  chemically treated genomic DNA (Homo sapiens)
tttggaaaaattatagttgggttagatatattagttttggtagcggttgggattgaaggttgtttgtttttgagagaaaaagaattgttaaggggttttttgtaagtttttgatttgggaaggaacgggttgggagtatcggtagtgttaagttttaggggaaggatttggagggtaggttttttcgaggtggtttttatttgattttttatttttcgttttttaattaagaaattttggttaattttgttttttgaaggcggcggattagttagttatttgggtaggaggggaggcggggatggcgggggtttgtttatttttataaaggttagggtatcggaagtgattcgattcggcggcgttcgggaagttcgttttttattttttatttttgggttttgtcgttttttgagttgcggtgggggaggtattcggtttttcgcggtttttggcgttttcgttttatcgaggttagggtttgagcgcgacgaagggaagtcgggtcgggtagaaatttatcgttttttaggggttttggaagtttgttcgggaagagtttttgcgtagcgtgttttcgttcgagagtttggagggagaatcggaggggagtgaggggcggtgggatcgcgggggtcggggtcgacgtcggggtagggacgttttgcgcgttggagatttcgagggtcgcgcgtaattggggcggcgcggcgcggcgatcgcgggggaggagtcggcgtcggcgggggtttatttcggtttcgtcgcgggtttcggcgtcggttttcgggattttcgggatttttgcgtcgtcggtcgcgttttcggattcgtttacgagcgacgatttgagttcggttaggtcgcgttcgggatcggcggcgttgtcgcggtttttgtcgttttgtttttcgtttttattttggaaggttagtagttcgttcggcgcgtcgaggtcgtcgtcgtcgttcgcgtcgttttcgtcggagtttagttgcggtatggtgcgtttcgttcgtcggggcgcggggcgttgggcgtcgggagtgcggggcgcggagtcggttcggggggcggcgagttcggagttcgaattttcgagttcggatcgcggcgggcggagcgcgggttgatttcgtttgggcgggttgtaggcgcgggttagggcgcggggtagagcggtttcgcgagttggcgggtcggaatattaaaggcgtcgtcggtcgagtgtcgggggcggggcgggtattgggggcgggtcgggtcgggggcgggatataggttcgtttcgttttttttttttcgggagaggtcgggacgcgtttattcggtatagttttaaagggttcgttttttcggagcgtattttgagagagacgtcggataagtttgggaatgattatttttttttcgaaacgtagagattttaacgggaatttttgatttcgtttatttatttataattagatattttttttgttttttgcgtttaggtttttttttcggttgtggagggcgggggttttttaggtttttgggatttgggcgtggtttattatcgtagtcgtggtgtgaattgtatcgtgtttaggttttaatgcgttttgtgttttgaattgggggttttttagggtttgaggttgtttgaggttgtgttcgtattttagggaatcggtagcgttggaatttcgcggcgttgttgcggtttttgttttattttttatttttgtgttaattagggatttttttttaggtcgtttgtatatagtgcgattataagtatattttttttcgtatatttattgagtttttgttgcgtgtagagtttatatattatatatttgtgacgggttttttagttaggcgacggtttcgagtcgcgaatatagttaagagtatcggattttagtcgattttttaagttttagtttttatgatttttttaattcggtttcgtgattagaatttgtagttcggagattcggaattttgggtagttacgtgggcgcgggatttcgatatgggtcgttcgtttatagtaatttaattttagaagtcgtatttagggagtttatgattttgaagttgattttggtttgattaattttttaattttcgttcgatttaggttgaaatatttagatttgcggagcgcgggaaagtgtttggattttagcgtatttgtatggtattcgggtttgcgtttacgcgggtttttacggcgcgtttggtttggtttagtttttgtatttataaaagacgtcggttttttggatcgcgatgtagttaatagtagtttttttagtaggtttttgtgttgggtttattgtagacgtttacgttttttttgagagtagttgggatagagggtatttgggggagggtcgggtattggacgtttttttttttgagggttttataggatttttggtagcggtgtaaagtcgggtcggaagatagtcgtgttttttttcgggtttaggtttagcgtggttggttgtggattaaagagttaggttatgtttttttgtgtttagattttatttgtgttcgtttagtcgggtgtttcggatattagtttttatatttttttttttcgttattttcgggttagggtgtttatttttttttttttttttaggttggggttggggggtggtatgggtacgagtgtttagtttggtgatggagatgagggggattttgtttattaggtttttttagtttttttttagggtgggtttgtcgtttagtttcgttttatttgtttcggattggcggggaagggggggttcggttttgttcggaggggagaggtatagggacgggagtttagagttttcgttattttaatttttgaggttataggtagggtttggtatagggtgagttttttttgggatagttgaaagggaattcggatttgtttaatttaatggttttaggggtttttatgtgtttgtagggaattttggtttagtaggaacgttttttagaatagttgtttttagatttatgagttttatcgatatagattagtggaggttgaagtgttttttagtttttggagaaaggagaaaagttataataatagtgaggttttttttgttttgttttgtttttttaataaggttaaaattttttagtttcgtattagtttttaattaaggattatgtttttattgttttattggtgtgaaaatattttttttttattaaaatggtggtgggataagtgtttttttttatgtttttatttggtgaaagaatataaggaatatttttttttttatttgttaatttttttatttttaagtttttttggatattttatagtttgggaataattgttttatggggttatagttttaattttttattttgttggttggaattagaggagagggtgggtgagtagggagagtgggattgtgaggaggcgtgagggagagaagggttgagttataggtatttatagttatattgaaattagtttgaaggtttgttaagggattatttattgtgtatttagttttggtttgggttgtggagagggaagggttagaggtgtttgatttttaggagttattggttgttttgagaagttgaagagttattagagtcgatttaggtgttagagtagtttatataggtaatggatagaaagagtttagatatggtgagattaatgtggattagagtagttagggtggttttttgaaggaggtagattttatgtgggtttggatggtttaggagggtttggaaagttggaaaggaataagagttttgatttgttttttagaagttggtgcggttttataggagtttttggtttagttagtattgatttttttattatcgtttatataacgattaattttatatattgagtgattattatgtgttaggtattttgttaagagttttatatatattattttatttaattattatattaattttgtgatatagggattcgtatttttatttgattaatgaggaaattgaagtttagagagatgaagttatttaagtttttatagtttgaaaatgaaggtgttagaatttgaaatttaggtagtttgatttttgagtttatattttaattattatattttagtgttttattataaaattttagagggagtttttatttgttttgtggttttggtagataaatgttgataaataagttgttattaatatggagttttgattttttgggtggtttatgttgtatgaagggggttattaataggattagggaattattttggtggtttgtatagggggtttaagatttttgttggtagagagggtttagaattttttttttgaattagatagattttagtgtgtattatttttttgttgagtttattcgaggttatttgttttgggaattggtttagattatatatatagatgatagatattggggtttttttatagggtagtgagtgtaatttgttgtggttgtttttttggaggtgatcggggagttttaggattaggattagttgtaaggaggttttaaagttttttggatttatttagattaggttagggttggtgatttaataaggttttatttttacgtaaatgagtttgtattagttagatgttggaaataggattaagttaggatttttaaggtttgagggttgttggagtagatgagttttagttttagatttgggtagttttaagtttttatttttgtcgtgttatttattagttgtgggattttaggtagattgttgattttttttgagttttagtttttttataggttaaatggatgttatacgtaggtttgttttgttttgttggagtgtagtcgagatgaattattgtattttagtgaagagtttagaatagtagtttggtgtattttaagtgtttaatgggtgtttttgaacgagatatttttcggaagttgttaggttaattggttttttatgtaacgttatgtaaattatttgaatgtttttatggtttgagtttatttaattatggttaaagttgaaaatatatatttttttttttttttttttaagtttttttaatatgaaaggtttacgtgaattttgattttttttgatagggagatttttgaaatgtggtatttttagaaaacgttttaaaggagttttagatggatttagtaaattatagtaaggagaggttgtgagcggcgtttttttttgtttattagttcgtttggtattttgttggggtttgtttaaagtcgtcgggaggttgggttgttggttttcggt

SEQ ID NO: 1755 - DNA, 6716 bp, Artificial Sequence
  chemically treated genomic DNA (Homo sapiens)
gttatattgaatagtaaaaagtttaaggttttttttttaagattaggaataagagaaggatgtttatttttattgtttttaattagtatagaattggaaattttaattagagtaataggtaaaagaaagaaaaggtatttaaatgaaaaggaagaagttaaattgtttcggtttgtagaggatatgattttgtatgtatagaaaatttttaaagattttatttaaaagttgttcgaattgataaatgaatttagtaaaattgtaggatataaaaattaatatataaaaattagtaatatttttatatattaataatgagttatgtgaaaaagaaattttaaaaattttatttataatagttataaaaaataataaaatatttaggaataaatgtaagtaatgaggtgaaagatttgaatacgtaaaattataaaatatttatgatagaaattgaagaagatataaacgaatggaataattttttatgtttatagattgaaggaattaaaattattaaaatgtttattttatttaaagtaatttatatatttaacgtaatttttattaaaattttaataatatttttatattaatagaaaaaataattttaaaatttatatggaattataaaaggtttgaatagttaaaatatttttgaataaaatagaaaaataaaaataaagttgtaggtattatagtattagtaggatagtaatatttaaggtgtggagtaattttaggattgagaaatgtttttagtataaatgtaggttaattttaatttgtttttggtaaatggtaattatagttgtagtttaaagtgtttagtgtaattttattatattttggttattcgttagtttggtagaattaattattcgttgtattttgagtaggggttgtgagttgtgttttttatttgtgttttgtgtgggtattaagggtagtatgggggttagtataggtttttgttatttagaggtgatttatagattattagtatttgtattaatttcgaggatatgaatatgttataaatttagaattttgagaatcgttttaattttattatattagaatttgtatttaaataaaatttttatatatattttaaagttggagaagttttaagttttttagaattgttaattttaaagagagagatgatagttatgtagtgggtagagtaggattagtttttaatttttatttgaaatatttttgttttagattttttattaatttagagatattattttattttttatgagtaaaggttataatattttttgtattttgaatttatttgattagtagttttaattattttaattatggtttagatttaggaattaaaaaaaaaaaaaaaaaaataaaaaaaaaaataggttgggtacggtggtttatgtttgtaattttagtattttggaaggtcgaggtgggaggattatttgaggttaggagtttaagattagtttgattaatatgaagaaattttatttttattaaaaatataaaattagataggcgtggtggcgtatatttgtaattttagttattcgggaggtagaagtaggagaatcgtttgaatttaggaggtggaggtcgtagtgagttaagattatattattgtattttagtttgggtaataagagggaaattttgttttaaaaaataaataaataaataaaatattttaggtatggatgttttaatagttatatatatattatagattttgtgttttatatattagtaagattttagatttttatgattttaataaatttagggttatggatttttgattacgaaggattggaagtagtaaagtagggtaaagggaaagaagtaaaatatggagttggggtgaagtttataatgagaattgatggtagaaagaatagttttgatattttcgtagttatttagatttataaatttgtgtatacgttaaaaatagttatttagattttagagaaattgtatttaattttgtttacgtgttagtattatttattttttttaagttttaatttcggagattttgatgtaattggtttggagtgggatttaggcgtaggtgttttattaaagttttttaggtgatttttagtggtttaggtttagttattatagggtttaaaggtttaaatatttaagtagtttttaaataggttttttttagtttgttataattattgataattaaggattttagggttggtgaggatgattttggttattaggatttttttttaagaggaaaatattttatatattagaggtgattttggtagaaaataagatagtttggaagtaaatgatatataaatatcgatataagttttgtgttatagttggagaaatttggagggtattggtgtgttgaattagatattttttattttttttttttgattttttttttatatagtttaatatttattatgttcgtgaattatttgggggttttgttttaatatagattttgatttagtagttttgggggaggttttagattttgttatttttacgagttttaggtgatgttattgtagttggtttagggataatattttgagttaaggttattttgatggttttgattattttttaattttttttttggaatttaaataagaagaatggtttttatgaattttattggggtttttgatttatagttattgtattaaaaattgtaggtatttttgaattaatattatatattttgtttatttttttttttaattattttttttttttattaggtaatgttataggaggattggggtttattgagttagaaataagtttagagagtaggtattttgttttatttattataaaattatggtattgaggttaagttgtaaaggatttgttaagtttataggtgatcgtggtaaaggtaaaattagatttaaattaggatatgaacgtatttattaaggattttgttaaaatgattgttttttgtagttttttgtgtgaaatatttatttgtttatttttagggaaattagattaataaagatttggaaaggaatataaaattttaaagttaggtttatggtttttataatttttagatggggtagataatatgttacggaggtttagagatagttttgagattatgtaatagttattgtttttttttttgtggaatgtttatttaaaaaagtttaagggttttataagttgtttaatgaattttatagatatttttaatttatttttatttattggaatttttttttaaataattttttaaattttacgtaataatgatgtatatttttgtttaatattaagaagtttttatgtaaaattgaagaaataaattgtttttataaaagaaggaaaaaggaattatatttttagaatattttgtttatttagatatatagatttgatttttgttttattgtttgtggtattttggattttagggttattgatgaggttgggttagtggttatattggtttttgggtattttttttttggttataaaagtttattttagtagtattatttaaattggatttattttttattttatagttttggtttgggttgagatttttttaatagagtttattagcgagtttgttattttgttttgtggttatttaggtttggagttaagagttatttataggaaaattagtatgaaatttttaagtttgtatattaaatattaatattattaagggttatagtggaaaagaggtttgttgagtttaagggtttttattttatttttaattttttttggttttttttttttatgttgtgtttttggtaaattttattatgtttcgattattttaggtttttttagtttttttttgggaattaggttttttggataggtaaagaggtagatatttagttgttaggtgaattagatgtttttattagattttttaatttttattttggtgatattttaaaggattataaattatgtttttagtgtttggttagagaattgggaaagagttggaagatgagatattaaattttattttatggtgatgtttgaattaggttggagttggttttatatgttttttattgtgtatgatttttttaattgttttagtgggaatgcgttattgtaaaataaagtgaaattgttttttttattgtttgtaatttatagaggggtggttttgattatataaattaggtattttttaaatttattgattttagggtggaaggagggatttttttttaagtatttatttcgaattatgtttttattagtaaatttaaagtttaagggtaaaaatttatgattttttattttgtaatagttattagatgtttatagtatattagatttgtggaaaacgtatgttttgtgtatggaagagggagagggagcgttaggagttgttttttgttaaaaaacgtattttgatatttaaaggtataggttggtggagatttagggaattcgggaaagtttaggtttaatttaggttcgcgcgggttttttttgattttataagatgaggagtgggttttggttttgggtattttggtgtcgattgtgagtttttagtagaggtttagagtttcggttcggtagtcgagggaagcgggggggttttttagaagaagaaagggttaaggttatttcggtgtttttttagtagtagtagagggcggcggtcggtgtcgttgttggtcggggtttcgaggaaggcgcgggttagttggggtcgggtttgcgtttttaggagttgttatcgttttagggagtaagttaggtcgggacgtagcgtttgcgcgggatttttatttgttattaagatttttataaatttcgttttattttgttttacgtttcgttttaaggtcgttttttcgattcggggtttcgttttaaggtcgttttttcgtttcgtcgtttggtggcggtcgtatgttgttcggatataaagggtcggttttatattttagggattagcgagcggttttgagaggttttggtttttgttttttaggcggttcgaggacgttatggtcgagtgttcgatattcggggaggtagttatcgattattcggatcgtttgtgggtttgggagaagttcgtgtatttggacgagaagtagtacgtttggttgtttttaattatcgaggtatagttagttttggagcggatggcgaggtagtaggggtagtttttgggagtttgggatgttttaggaagggcgaggatttaaggagtatttattatggggtagggaggatttttatagatgaagttattttgagtcgggttttggaggatgaataggagttttttaggtagggaagaagggtgggaaaatcgtaaaggaatgtcggttaaaggggtggatttagtgtttgtggagtgtgattataatgttgattatagtaggtattttttgggtttcggggttttaatttttaaaaatgggtatttttaagtgatttatttatatggtcgattatcggaattattttaggtgggttttagaaatttgtatttttaaaaagaatttttaatagtttagggttaattaggtatagtaaatattggtttagagtgtgaagtattttttattatttttgggttttatttagaaaataaatttaataagtgatgtcgtagtataagcgtcggtattgaattaatattgatttttttaatgtgtgatgttttaagatgggtttttaatttatgttaagtttttgttaaagaaatagataagttttttataagtatttggatttatttaatgaaaaagagttaaaaaatgtttaaattttttttaaatatatattgaagaaagtataaaaattaaaaaatatattagaatacgtatgtttagtagtaattaaaaattattgagtgttgattgtgtttttatagatgggaaattgaggtataaaaatgtatatttgttcgaggtaagaatgttagtaggtaatggggttggaattttaggtttttaattattataaaatttgtatttttattggtattttaattttttaaatatgtttttattttaaaaattaagttaaatatttatttttttaaaattaaaatttgaagaaataatttgaagatttagtggatttttttttttaaatttttgagaaattttttttttaacgtgatattaaaattacgaattagatagttttttataaaattatgatatatgttttataaaaaataatttattagtaaattgtgggatagattttgttttatattattgaaaaggttagtattttttttttttttttttttttttgttgtttttttttttttttgtagatatagggtttcgttttgtgatttaggttggttttaaatttttggttttaagcgatttttttgtttttgttttttaaagtattggaattataagtgtgagtcgttgtaattcgttagaaaaaagtgtgttttttatggttttgtttgggtggttagatacgtgtgtgtgttggtggttttggtttagttagagtttttgagaggagtatgtatggtttaaggaagtgagttttagggaatagtgatgattattattttatattcggatttttgtttagatgggtggatggttggtaggagggatttcggttttttgcgtttggagaagttttggtaagcggaatttgaaagtatgttttgttttttttttttttttaga

SEQ ID NO: 1756 - DNA, 6716 bp, Artificial Sequence
  chemically treated genomic DNA (Homo sapiens)
tttgaggagaagaaaaggatagggtatatttttaggtttcgtttgttagggtttttttaggcgtagaaaatcggaattttttttgttagttatttatttatttgggtaggggttcgagtgtgaaatgatggttattattgttttttgaagtttatttttttaggttatgtatgttttttttagggattttggttgggttaggattattagtatatatacgtgtttagttatttagatagggttatgaaaggtatatttttttttggcgggttgtagcggtttatatttgtaattttagtgttttggaaggtagaggtaggaggatcgtttgaggttaggagtttaagattagtttgggttatagagcgagattttgtatttataggaaaaaaaaaaaataataaagaaagaaagagagaaaaagaatattggtttttttaatgatgtgaggtaaaatttgttttatagtttgttagtgggttattttttgtggagtatgtattatgattttatgaaaaattgtttggttcgtggttttggtgttacgttgaagaagagattttttagagatttaaaaaaagaaatttattgaatttttaaattatttttttaaattttgattttaaaaaagtaagtatttaatttgatttttaaagtaaaaatatatttaaaaaattgaaatgttaataaaaatgtagattttgtggtggttaagagtttagaattttaattttattatttattagtatttttatttcggataaatgtatatttttgtgttttagttttttatttgtagagatatagttaatatttaataatttttgattgttattggatatacgtgttttaatatattttttaatttttatgttttttttagtgtatgtttggagagagtttgaatattttttgatttttttttattgagtaaatttaaatatttgtaaaagatttatttatttttttaataaaaatttaatatggattaaggatttattttaaggtattatatattaaaaaagttaatattgatttaatatcggcgtttatattacgatattatttgttaaatttgttttttaaataaagtttagaggtagtggaaaatattttatattttaggttagtgtttgttatgtttggttgattttaaattgttgagggttttttttaaaaatatagatttttgggatttatttgagatgatttcgataatcggttatatggatgagttatttagagatatttatttttaaggattaggatttcgaagtttagaaaatgtttgttgtagttaatattatagttatattttataggtattgggtttatttttttgatcgatatttttttgcggtttttttattttttttttttgtttggagaatttttatttattttttagagttcggtttaaagtggttttatttgtggggattttttttgttttatagtgagtgttttttgagttttcgttttttttagggtattttaagtttttaggggttgtttttgttgtttcgttattcgttttaaagttggttgtatttcgatggttaagggtagttaggcgtgttgtttttcgtttaaatatacgaattttttttaggtttataggcggttcgggtggtcggtgattgttttttcgagtgtcgggtattcggttatggcgttttcgggtcgtttaagaagtaagagttagagttttttaaggtcgttcgttggtttttgggatgtggggtcgattttttatattcgggtagtatgcggtcgttattaagcggcggggcgggaggacggttttggggcgggatttcgggtcgggagaacgattttggggcggggcgtaaggtaggatggggcggggtttgtgggggttttggtggtaagtgagggtttcgcgtaggcgttacgtttcggtttgatttgttttttggaacggtggtagtttttgggaacgtagattcggttttagttggttcgcgtttttttcgaggtttcggttagtagcgatatcgatcgtcgttttttgttgttgttggagaggtatcggggtgattttggttttttttttttttggaagattttttcgtttttttcggttgtcggatcgggattttgggtttttgttgggaatttatagtcgatattaggatgtttagagttaggatttattttttattttatgggattagaagagattcgcgcgggtttgagttaggtttgggttttttcgggttttttggatttttattagtttgtgtttttgagtgttagagtacgttttttggtaaaggataatttttgacgtttttttttttttttttatatataaagtatgcgttttttataggtttgatgtgttgtggatatttaatagttattataaaatggagaattatgggtttttgtttttgggttttgagtttattagtgaaagtatagttcgaaatgaatatttaaaaagaaatttttttttttattttaagattaatggatttgaaaagtgtttggtttatatgattaaaattatttttttgtaaattataagtaataaggaaaataattttattttattttgtagtaacgtatttttattaaggtaattaagaaagttatgtataatgaaaaatatgtgaaattagttttagtttggtttaaatattattatgggatggagtttggtgttttattttttagtttttttttagttttttgattaggtattaagaatataatttgtgattttttgaaatattattaaagtggaaattaagagatttgatgaggatatttgatttatttggtagttgggtatttgtttttttgtttatttagagagtttaatttttaagaaggggttgagagggtttaaggtagtcgagatataatgggatttattaggaatataatatagaagagaaaagttaagggaagttgggggtggagtgagggtttttgagtttagtaaattttttttttattgtagtttttagtggtgttaatatttaatatgtaaatttaaaggttttatgttgatttttttgtgaatggtttttgattttagatttagatagttatagagtaagatgataagttcgttaataagttttgttggggaggttttagtttaggttagagttgtgaagtgagaaataagtttagtttaaatagtgttgttgggatggatttttgtggttagggaaggggtatttaggagttagtgtggttattgatttagttttattaatggttttaggatttagaatgttataaataatggagtaagaattagatttgtgtgtttgggtaagtagaatgttttgagaatataattttttttttttttttttgtaagaataatttatttttttagttttgtatgagggttttttaatattgagtaagaatatatattattattgcgtgagatttagaaaattatttgagagagggttttaataaatgaaaatgaattaaggatgtttgtggagtttattgggtaatttatagagtttttgagtttttttaagtgaatattttataagaggggaaatagtagttattgtatagttttagagttgtttttgagttttcgtggtatgttatttgttttatttaagggttataaaggttataagtttagttttagaattttatgtttttttttaagtttttgttagtttgatttttttgaggataagtaaatggatgttttatatagaaagttataggaagtaattattttgatagaatttttaatggatgcgtttatgttttgatttagatttagttttgtttttattacgattatttgtgaatttgataaattttttgtaatttggttttagtgttatagttttgtaatgaatggggtaaaatatttgttttttaagtttgtttttaatttagtaggttttaatttttttataatattgtttagtgggaggagggaatagttaagaaaagagatggataaaatatatgatgttagtttaggaatgtttatagtttttggtatagtggttgtagattaaggattttagtggaatttatgggagttattttttttgtttgggttttaaagaaggggttgaggagtagttaaggttattaggatgattttgatttaaagtgttgtttttggattagttatagtagtattatttggagttcgtaagaatgatagaatttggagttttttttaagattattgagttagaatttgtattggaataagatttttaggtgatttacgggtatggtaaatgttgggttatatggagggagggttaagagggagagatagggggtgtttgatttaatatattagtgttttttagatttttttaattatgatataggatttatatcggtgtttgtgtattatttatttttaggttattttattttttgttaaaattatttttaatatatagagtgttttttttttaaaagaaaattttagtaattaaggttatttttattaattttggggtttttgattgttaatgattatagtaagttggaaagagtttatttagaggttatttaggtgtttaggtttttgggttttatgatgattgagtttaaattattaagaattatttgggaagttttaatgaaatatttgcgtttggattttattttaaattaattatattagaattttcgagattgaggtttgagaaaagtaggtgatgttaatacgtaggtagggttaagtataatttttttaagatttgagtgattgtttttgacgtgtgtatagatttataaatttaaataattacgaaaatgttaaagttattttttttattattaatttttattgtaaattttattttaattttatattttatttttttttttttgttttattttgttgtttttaatttttcgtggttagggatttatagttttaagtttattggaattataagggtttgagattttgttaatgtgtaaaatatagaatttgtgatatatatgtagttattaaggtatttatgtttggagtgttttgtttgtttgtttgttttttgagatagagttttttttttgttgtttaggttggaatgtaatggtgtgattttggtttattgcgatttttattttttgggtttaagcgatttttttgtttttgtttttcgagtagttgggattataggtatgcgttattacgtttgtttaattttgtatttttagtagaaatggggtttttttatgttggttaggttggttttgaatttttgattttaggtgatttttttatttcggttttttaaagtgttgggattataggtatgagttatcgtgtttagtttgtttttttttttgtttttttttttttttttttagtttttaggtttgggttatagttgaaataattaaggttgttgattaagtgagtttagggtataaaagatgttgtagtttttatttataagggatgaaatggtatttttaaattaatggagaatttgagataaggatattttaagtagaaattagggattgattttattttgtttattatatagttattatttttttttttaaaattaatagttttaaggaatttaaagtttttttaattttaaggtgtatatggagattttatttaaatatagattttaatatggtagggttgaggcgatttttaagattttgaatttgtaatatatttatattttcggagttgatataggtattaatggtttataaattatttttgggtggtaaggatttatattaatttttatgttatttttgatatttatataaaatataaatgaaaaatataatttataatttttatttaaaatgtagcgaatagttgattttgttaagttagcgagtgattaagatgtgatagaattgtattggatattttgagttataattgtggttgttatttgttagaggtaagttaaaattgatttatatttgtattggaaatattttttaattttgggattattttatattttgggtgttattgttttattgatgttatgatgtttatagttttgtttttgtttttttgttttgtttaaaaatgttttagttatttagattttttgtggttttatatgaattttaggattattttttttgttaatgtgaaagtgttgttggaattttggtagggattgcgttgaatatgtaggttgttttgagtgggatgaatattttaataattttaatttttttaatttatgaatatgagaaattgttttattcgtttgtgttttttttagtttttgttatgggtattttgtagttttgcgtgtttagattttttattttattgtttatatttatttttaagtattttattattttttgtagttattgtgaatgggatttttaaaattttttttttatatagtttattattagtgtatagaaatgttattgatttttgtatgttggtttttgtattttgtagttttattgaatttatttattagttcgaatagtttttggatggaatttttaggagttttttatatatataagattatgttttttataaatcgagataatttaatttttttttttttatttggatgtttttttttttttttatttgttgttttgattaggatttttagttttgtgttgattagaagtagtgagagtgagtattttttttttgtttttgattttagagaaaaagttttaaattttttattatttagtatgat

SEQ ID NO: 1757 - DNA, 7461 bp, Artificial Sequence
  chemically treated genomic DNA (Homo sapiens)
ataaaatggtaatggtaagttttaatttattaaaattatttgaaatttaaatggattaaattttttaattaaaagatagagtggttgtatgaataaaagataagatttttggttaggcgtggtgttttatgtttgtaatttttatattttgggaggtcgaggttataagagataaataaattgttataagagataaagaaaattattatataatgataaaggagttaatttattaaaaagatataaaaattataaatatttatgtatttaatattgggtgtttaaagtaaatattaatagaattaatgtgaaaaataaatagtaaaatagtaatagaggtgattttaatattttatatttaataatggatagataatttagatagaaaattaataaggaattattatatttgaataatatttagattaaatggatttaatagatatatatagaatattttatttaatagtaggggagtatatattttttttaagtatatataaaatattttttaggatagattatattaagttataaaataagtgttaataaatttaagaatattgaaattatattaagtattttttttgattttaatggtatgaaattggaaattaataatgtgagaaaaattggaatatttataaatatatggaaattagataatttatttttgaataattaaggagttaaagaggaaattaatgaggaagtaaaaagtattttgagataaatgaaaaggtaaatttaatatttgaaaatatataggatatagtaaaagtagtattgagaggaaaatttatagttataaatgtttagattaaggaaaaataaagattttaaatgaataaattaagtttaaatattaaggaattagaaaaagaataatttaaatttaaagttattagaaagaaggaaataataaagattaaagtagaaataaataaaatagagaatagaaaaataatggaaaagattaataaaattaaaagttggttttcggaaaagataaaaaaaaatcgataaatttttagttagattaattaagaaaaaagagagaaaatttaaataagtaaaattataaatgaaagaagtgaagatattataattgttattatagaaatataaagaattataagagattattatgaataattatatgttagtaaatgggataatttagaagaaatgtataaatttttagaaatatataatgtgttaataatgaattatgaagatatagaaaatttgaatagattaaaaatataaataaggggattgaattagtaattaaaaatttttttataaagaaaagtttaggattagatgttttattggtgaatttaattaaatatttaaagaagaattaatggtaattttttataaattgttttaaaatattgtagaaagaatatttttaaatttattttataagatgagtattattttaatattaaagttagataaggatattattaaaaaaaaaaaaaaaattataggttaatatttataataaatatagatgtaaaaatttttaataaaatattagtaaattaaatttaatagtatattaaaaaaaaagtaaaaaaaaaaaaattaattaaaaaaatttagtatttttttatgataaaaaaaaatttttaataaattgggtatagaagaattttattattgagttattaaaaggaatgaaataatgttaataataagtgagaaaatattttttttggttttttatttttgtgttgtttagaataattgtttttagttttatttaagttgttgtggaatatttgagaaaatatttgcgaatttatatttgaaaatagattaatatttaaaatatgtaagaattatgtaatttaatagtaaaatgaaaataaaaataaaataaataatttgattttaaaatgggttaaggattttaatattttttaaagaagatataaaaatggtaaataggtatgagaaaatatgtataatattattaattattagagaaatttaaattagaataattatattattttatatttgttagggtgattattattaaaaagataaaagataataaagtatggatgaggatgtagagaaaagagaattttttgtgtttgtagaatgtaaatttgtataattattatggaagatagtgtggtggttttttaaaaaattataaatggaattgtaatatgatttaataattttaattttgggtatatatttaaaggaagtaaaagtagtgttttaaagaaatatatgtattttcgaatgggtacggtggtttacgtttgtaatcgtagtattttgggaggttgaggtgggtggattatttgaggttaggagtttaagattagtttgattaatatgttgaaattttgtttttattaaaaaaaaatagaaaagttagtcggtgtggtggtagatatttgtaattttagttattttggaggttgaggtaggaaaattatttggattcgggaggtggagtttttagtgagttgagattgtattattgtattttagtttgggcgataagagagaaattttgttttaaaaataaataaataaataaataaataaataaaaatatatattatataaaatatgtatttttatgtttattgtagtattatttataatattaaagatatagaaataatttatatatttgttgatggatgaagggataaaaattgtgatttatatatatatatatatatatgtgtgtgtgtgtatatatatatttatatttatataatagaatagtatttagttataaaaaagaaggaaatagtgttttttgagatagtatggatgaatttgaagaatattatgttaaatgaaataagttatagataaatattatgattttatttatatgtagattttaaaaattattaaatatatggaaatagagagtagaatggtggtttttatataagttttatataaatatgtgagagagagaaagagatttattttaaggagttgatttatgtttttatggaggttaagaagttttatagtttattgtttgtatgtagtaaaagttagtggagtgatttaggttaaattgaaagtttaagaattaggggagtcgatggtgtaaattttagtttgagggttggagaagataagatgttttagtttaaataggttggtaggaagtaaaaaaagggtgaattttttttttttttattattttattttatttagggttttaatagattgattgatgtatatttatattggagacggtattttattttttagagtttattaattaaaatgttaattttatttggaaatatttttatagatatatcgagaaatagtgtttaatttgggtatttaggtgttagttaagttgatatagaaaattaattattatagaggtataatgtaaatagtggtttattaagttatgatatttttagttaggttgatagtattttttaatagtttttagaagaattgtgataggtaatattttttatatgtagtaattgttttggtagggtagaaatttatatttgatgtatagttttttggtttttttttttggttaggaaatttttatggaatttattttaggagaaaaattatagtttggaaattattatgttaaagatttttttatgtgttgggttttttaatattgtttgttttaattttagatttataatttttattttcgtttttaaatttttttattttaatttttgtaggtatatagtaggtgtatatatttatggggtttatgaaatgttttgatataggtatgtaatgcgtaataattatattatagagaagggggtatttattttgttaagtatttattttttacgttataaataatttagttatattattagttatttaaaatgtataattaaattattattgattatagttattttgttatgttattaatagtaggttttatttattttttttaatattttgtatttattaatttttcgtattttttttttattattagtttttttagtttttagtaattatttttttattttttatttttatgaatttaattgttttgatttttagattttataaataagtgagaatatgtaatgtatgtttttttgtgtttggtttattttatttaatataattatttttagttttatttattttgttataattgataggattttatttttttatatggttgaatagtattttattgtgtatatgtatatttgttgtgtttatttatttgttgatagatatttagtttgtttttaaattttggttattgtaaatagtgttgtaataaatatgggagtgtagatatttttttaatatattggtttttttttttttgggtatatagttagtagtgggattgttggattatatggtagttttatgtttagttttttgaggaagttttaaattgttttttatagtgattgtattaatttatatttttattaatagtgtataaggttttttttttttttatatttttgttagtatttgttattgtttgtgttttgaataaagttatttttagttgagatgagaggatattttattgtagttttgatttttatttatttgatgattaatgatgttaagtatttttttaagtatttttttatatgtttgttttttatttggatgtttttttttatttttatttttatatgttgtatgtgtttgtatgattaaatttattttattaggaaatataaaatataaagtgaaacggaaaaaaaaggaaagattataggaaatagttatttgtttaatatatttttattgtacggaaggtaaataatagatatgaaattcgaaggtttaggataggagataaaggaaagttattgttttattttttttaattatattttttaagtttttttttttatttattatattatatggataaatatatttgattatattttttgatattgtttaatatttgtttgagtgaaaagaggttgaggtaatttgaaggaggagtttttattattttttgtttattatttaataaatagttagttaatttattaatattttggtatattgttggagagatgagatagttatattagttgtttttagtggggtttttattgtttttttttattttaagttaattatgcgagatttgtggtgagtaaattttgagttaaaattattttagagtgatagtttattgaaaattgttgataagagattttatgtagagttatttgagaaaagattttattttagtttcgtatgtggttggattttatgaatgatgaaaagggtggtaggagatggtgaggaaagttttataatgtatgttgttgtaagaggaattatagattgtgtatttatttgtttaattgttttttttatgtttagattttttttagtatagtatttttattaagtaattttttatttatgtgattttttaatgatagaaaatttatgtttttagaaatttttttagattatggaaagttattttttggttttgatatgtaattttttttttttgaaatttaatgtatgatttttgggttaattttttgtaattatatagaaaaaaataataattttttttaaatagtgatgattgttgttttgttatgagtgagtttagatgttttaagttgtatgtttatttttttttaatttttttttaggatatatgggataaagttttattattttttgtatgggtgttgattttagagattgtgtggttttgtaaaagaattttaaagtaagagaagggaaaattaaatttaggtttagtttgattttttagttattgaatgatttaatatttttgaatttttttagttttatttataaataaaggataatgaggggagattattgaagtaaattattttatgaagtttggtgtagtttttaagtgtatgaatttttttttgtgagattttattttgaaattgagttttaaattagtttaaagattattaggtggtattatttgtgttttttaattagtaagaagagaatattatagaagataggtttgtatatatataggttaaagtatagatttttttgattttgatttttttttttggtttgatattttttttgttggattttaagaatagggaatggttatgtaggttttagtttttaatttattttaaataataatgataataattaaatttatttttgagatttaaggaagttgatttgagttgttgattaggaattaaaaagtttgttttagggttagaaaatttgttgagttggatggttttataaaattttagagaattgatttataattgttttattgtgtttgtaataaattatgatttttttataattattttatttagatttttttgatttatttttttaaagtaaagaaaattgggtaagagaaattatatttttttgatttttaagtatagtgataaaaattttagttgagttggaaataatagtatgtgtagtattttatagtttattcggtggttttttgtttaatatttgtaaggtaagtgttaatagttataatttttaaatgagaaaattaagagtaaaataagttatataagttattatttatagttataagttaaggagtataaaatgtggttaaaatttgaatttaaattttatgttttttttatttttttattaatttattagataatttggagatatgtaggatttggggttattttttaagattatggaaaaatatattgataaagtgttttgtgtttaaataaatagtaaatttttttatttttttttatttttttgggagttatggatttttttatttttatagtataatgtgatttttttttatttttggaattggggtatattgtaggttaaaattggagagttttttataggttgtataatgttaaataatgatttcgatgtttagttagttgggtaattagataatgaagttttggggttaattattagtataatatagaattattatttgtatttttttaatattaatttagttgatttagaagatggagaaggaaagaattgaatttaggaagtagaaagttttgtttattgagagttagaagatatgtagtttagttttagtttagtttttaattatggaagtttttttaaggataatttatttaagttttatatataaaattagggaatgatgttagattttttaggtaggagtttgtttagtatataatgataagtttgtattagttgttaaaatattaaaatatttttatgttggttgttaaaggagtaatgtttggtatgggggtgggtttaagatttatttttgtattattttattaatatagtttgtagttattggattggtttaggtttgtgttatatttgttattaaatatttttatataatttttgttgtaagttttattattttttgagtatgtgttttttatttttttttttttttgttataga

SEQ ID NO: 1758 - DNA, 7461 bp, Artificial Sequence
  chemically treated genomic DNA (Homo sapiens)
tttgtggtagagaaggaaggaaataagaaatatatatttagaaaatagtaagatttgtagtaggggttatataaaaatatttagtaatagatatggtatagatttagattaatttagtggttgtagattgtgttggtggaataatataaaggtgggttttgaatttatttttatgttagatattatttttttaataattaatatgaaaatgttttaatattttaataattggtgtagatttattattgtgtattgggtagatttttgtttgggaaatttagtattattttttaattttgtatatgaagtttagatagattgtttttaaagaaatttttataattggaggttgagttgaaattagattatatgttttttgatttttagtaagtaggattttttattttttggatttagttttttttttttttattttttaaattaattgggttaatgttgagaaaatgtaggtaataattttgtgttatattggtgattgattttaaaattttattgtttgattatttagttggttgggtatcgagattattatttagtattatgtagtttgtaaaaaattttttagttttagtttataatatgttttaattttagagatggagggaagttatattatattgtggaagtaggaaaatttatagtttttaaggaaatagaggagaataaaaagatttattatttatttaaatataggatattttgttaatgtatttttttataattttgaggagtagttttaaattttatatatttttagattatttaatggattagtgggagagtgagaagaatatgaggtttggatttagattttggttatattttgtgttttttaatttatgattgtggataataatttatgtaatttgttttatttttagtttttttatttaaaaattgtggttgttaatatttattttatagatattggataagaaattatcgaataaattgtaaaatgttgtatatattattatttttagtttaattggagtttttattattatatttgagaattaaggaaatgtaattttttttgtttagttttttttattttaaaagaatgagttaagaagatttgaatagagtgattgtagaaaggttatggtttgttgtagatataatggaataattgtgagttagttttttgagattttgtggaattatttagtttagtagattttttggttttgaaatagattttttagtttttgattaataatttaaattagtttttttgagttttaaagataaatttaattattattattattatttaaaatgaattgaaagttaaaatttatatagttattttttatttttaggatttaataggggaaatgttaagttaagaagaaaaattagagttagaagagtttatgttttagtttgtatgtatataagtttgttttttgtggtgttttttttttattggttagagagtatagatagtattatttagtaatttttggattggtttgaagtttaattttagagtaaagttttataaaagagaatttatgtatttgagaattgtattagattttatgagataatttgttttaatagtttttttttattattttttatttatgaatgaagttaaagaaatttagaaatgttgggttatttaataattaagggattaaattaaatttgaatttagttttttttttttttattttaaagtttttttatagaattatataatttttggggttaatatttatgtaagagatgatggaattttattttatgtgttttgggaaagagttgaaggaaggtggatatgtaatttggaatatttaaatttatttatgataagatagtagttattattatttgaaagagattattatttttttttatgtagttataaggggttaatttaaaaattatgtattgaattttaggaaaaaaagattgtatattaagattaaaagataattttttatgatttagaaaagtttttgggagtataaattttttgttattgaaaagttatatgaatagggagttatttggtagggatgttgtgttagagaggatttgagtatagaaagagtagttaggtaagtgaatatataatttataattttttttataataatatgtattgtgagattttttttattattttttgttattttttttattatttatggagtttaattatatacgaaattggaatgggatttttttttaggtaattttatatagagttttttgttaatagtttttagtagattattattttagagtaattttagtttaaagtttatttattataaatttcgtatagttggtttggaataaaagaaaatagtaagagttttattaggggtagttggtgtgattgttttatttttttaatagtgtattagaatgttgatgaattggttggttatttattaagtgatgggtagaaggtaatgagagttttttttttaggttgttttagtttttttttatttaagtaaatattgagtaatgttaggaggtgtggttaagtgtatttgtttatgtgatgtaataaataaggaagaagatttgaaggatgtggttagggagaataaggtaataatttttttttgttttttgttttaaattttcgggttttatatttattatttgtttttcgtgtagtgaagatatattaggtaaatgattgttttttataattttttttttttttttcgttttattttatgttttatgttttttgataaagtagatttgattatgtaaatatatataatatataaaaatggaagtaaaagaagatatttaaatgggaagtaggtatatgaaaaagtgtttgaaaaggtgtttaatattattgattattagataaatggaaattaaagttataatgagatatttttttattttagttaaaaatggttttatttaaaatataggtaataataaatgttggtaaggatgtagagaaaagggaagttttgtatattgttggtgggaatgtaaattagtataattattatggagaatagtttggagtttttttaaaaaattaaatatagagttattatatgatttagtaattttattgttggttatatatttaaaagaaagaagattagtatattgaagagatatttgtatttttatgtttgttgtagtattgtttataataattaagatttggaagtaagttaagtgtttattaatagataaatgaatatagtaaatgtatatatatataatggagtattatttagttatataaaagaatgaaattttgttagttgtgataaaatggatggaattggagataattatgttaagtgaaataagttaggtatagaaagatatatattgtatgtttttatttatttgtgggatttaaaaattaaaataattgaatttatagagatagagaatgaaaagatggttattgggggttgggaaggttagtggtgggaaggagatgcggagggttaatgggtataaaatattggaaagaatgaataagatttattattggtagtataatagggtgattatagttaataataatttaattgtatattttaaataattaatagtataattggattgtttgtaacgtaaaggataaatgtttgataggatgaatatttttttttttatgatgtgattattacgtattgtatgtttgtattaaaatattttatgagttttataaatatatatatttattatgtatttataaaaattgaaataaaaaaatttaaaaacggaagtaaaagttgtaagtttgaaattgaagtaggtagtattggagaatttagtatatgaggggatttttggtatagtggtttttaaattatgattttttttttaagatagattttatgagagttttttaattaaggaggaaaattagagagttatatattaaatgtgaatttttgttttgttagggtagttgttatatgtgagaagtgttgtttattatagtttttttgagaattattagagaatattgttagtttagttaaggatgttatgatttaatgagttattatttgtattgtatttttgtgatggttaattttttgtgttaatttgattggtatttgagtgtttagattaaatattatttttcgatgtatttgtgagggtgtttttagataggattagtattttaattggtggattttggaaagtagaatgtcgtttttaatgtaggtgtgtattaattaatttattgagattttgaatagaataaaatggtgaaggaagggggaatttattttttttttgttttttgttagtttgtttgagttaggatattttattttttttagtttttaaattgagatttatattatcggtttttttggtttttgggtttttagtttggtttgaattattttattgatttttattgtatgtagatagtagattgtgggattttttagtttttataagggtatgaattaattttttggaataaattttttttttttttttatatatttatataaaatttatgtggaaattattattttattttttgtttttatgtatttgatgatttttagaatttatatataaatgagattatagtatttgtttgtgatttattttatttagtatgatattttttaggtttatttatgttgttttaaagggtattattttttttttttttatggttgaatattattttattatataaatataaatatatatatatatatatatatatatatgtgtgtgtgtatataaattataatttttatttttttatttattaatagatatgtaggttgtttttatgtttttgatattgtgaataatgttgtaatgaatatgggagtatatattttatataatatatatttttgtttgtttgtttgtttgtttgtttgtttttgagatagagttttttttttgtcgtttaagttggagtgtaatggtgtaattttagtttattggaaattttatttttcgggtttaagtgatttttttgttttagtttttagagtagttgggattataggtatttgttattatatcggttaatttttttatttttttttagtagagatagggttttaatatgttgattaggttggttttaaatttttgattttaggtgatttatttattttagttttttaaagtgttgcgattataggcgtgagttatcgtgtttattcgggagtatatatatttttttgaaatattgtttttgttttttttggatatgtatttagaattaagattgttggattatattgtagttttatttataattttttgaagaattattatattgttttttataatggttgtgtaaatttatattttgtaaatataaaggatttttttttttttatatttttatttatattttgttattttttgtttttttgataatagttattttaataggtataaggtgatgtgattattttgatttgaatttttttgatgattagtgatattgtgtatgtttttttatgtttgtttgttatttttatgttttttttggaaaatgttgaggtttttagtttattttaaaattaggttatttgttttgtttttgtttttattttgttattgaattgtatggtttttatatattttggatattaatttatttttagatataggttcgtaaatatttttttaaatattttatagtaatttggatggagttggaggtaattattttaagtaatataggagtagaaaattaaaaaaaatatttttttatttattattaatattattttattttttttaatggtttagtagtagaatttttttatatttaatttgttgagagtttttttttattatgaaaggatgttaaatttttttgattgatttttttttttttgttttttttttaatgtgttgttgaatttggtttgttagtattttgttgaggatttttgtatttatgtttattatgggtattggtttgtgattttttttttttttttggtagtgtttttatttggttttggtattagggtaatatttattttgtaaaatgagtttggaaatattttttttataatattttgggatagtttgtgaggaattgttattaatttttttttaggtatttggttgaatttattagtgaaatatttggttttaggtttttttttgtagggaggtttttgattgttgatttagtttttttatttatatttttggtttgtttagattttttatgtttttatgatttattgttggtatattgtgtgtttttaggaatttatgtattttttttaggttattttatttgttggtatataattgtttatagtagttttttatgattttttgtatttttgtgatagtagttgtaatgtttttattttttttatttataattttatttatttgagttttttttttttttttttggttagtttagttaaaggtttgtcgatttttttttatttttttcgaaaattaatttttagttttgttgattttttttattgtttttttattttttattttatttgtttttgttttgatttttgttgtttttttttttttgataattttgggtttagattattttttttttagttttttaatgtttaaatttagtttgtttatttgaaatttttatttttttttaatttagatatttataattatgaattttttttttagtattgtttttgttgtattttatatgtttttagatattgagtttatttttttatttgttttaagatattttttatttttttattaattttttttttggttttttgattgtttaggagtgaattatttaatttttatgtatttgtaaatgttttaattttttttatattattgatttttagttttatattattggggttagaaaagatatttgatataattttaatatttttaaatttgttaatatttattttgtgatttaatgtgatttattttggagaatgttttatatgtgtttgagaagaatgtgtatttttttgttgttggatggaatgttttgtatatgtttgttaggtttatttggtttaagtattgtttaaatatggtagttttttattgattttttgtttggattatttatttattgttgagtgtggggtattaaagttatttttgttattgttttgttgtttattttttatattagttttgttaatatttgttttaagtatttaatgttgggtatataaatatttataatttttatatttttttgatgaattggtttttttattattatataatgattttttttgttttttgtaataatttatttgttttttgtaatttcggttttttaaagtgtagggattataagtatgaggtattacgtttggttaagaattttgttttttatttatgtaattattttgttttttgattggagaatttaatttatttaagttttaagtaattttgataagttaggatttattattgttattttgt

SEQ ID NO: 1759 - DNA, 8577 bp, Artificial Sequence
  chemically treated genomic DNA (Homo sapiens)
aaggtgtttgttttttttttgttttttgttacgattgtaagttttttgaggtttttttagttatgtataattgtgagttaattaaatttttttataaattatcgaattgtaggtatttttttatagtagtgtgaaaattaatatttttttttttttgatataagagttttattcgttttggttttttaacgtgttgcgattataggtgtgaattattatgttcggtttttttttttttttattttttttttttttttttttttttttttgataaagataggggtttattatgttgtttaggtttgttttaaatttttggttttaagtgattttgttattttggttttttaaagtgttgaggttattgtatttagataattatttttttgatggattatgttttaggtgttgtatttaaaaaggtattatttttttttgaagttttatagttttgtgttttatagttaggtttattttaagttaattttttgtgaaaggtgtatgtttaggttgatttgttttgtatatagatatttaattgtttttgtattatttgatgaaatgttttattattatattaatagtgttttgttatttattttaatttgaaagtaatttgtgtgtgtgtgtgtgtgagaaggagtttcgttttgttgtttaggttggagtgtagtggcgtaattttggtttattgtaatttttattttttgggtttaagtaattttttagttttagatttttaagtagttgggattataggagtttattattaggcgtagttaatttttgtatttttagtagagattgggtttcgttacgttggttaggttggtttcgaatttttgattttaggtgatttatttatttcggttttttaaagggttgggattttaggtatgagttattgcgtttagttatttgaaagtaattttaaatttataggttttttaaaaggtttttggagattattagttatttagtgattatagttgggaattaatgttttagttgatgggatttttttatgattttatttttgttttttttttttttttttttttttttttttttttgtttttgtttgttttttgttttttgttttttcgagatggggttttgttttgttatttaggttggagtgtagtggtatgattttggtttattgtaatttttggtttttaggtttaagtaattttttcgttttaattttttaagtagttgggattataggtatatgttattatgttcggttaatttttgtatttttagtagagattggattttattttgttggttaggttggtttcgaatttttgattttaggtgatttattcgtttcggttttttaaagtgttgggattataggtgtgagttattgtgtttggttttaaaatatgattttaatatatatatatttttaattattaaaatagatattttatatagaattagagttgtgtatttgttatatttattttttttatgttatttttatgtatataattttattttttttttttgggttaatttttaggttagttttcgttaagttagtttaaaattattagaaataaatttagttgttgatttattttaatgagggaaattatttagtagaggaattatagtgatttggttgaataaagggaaaggttattaaagaattgaagggaagggtggagttaggtgaagtgtaaagtaagtagtgttttgaggtaagtaggttttaagtattatagggttgtgtatgaagggttcgttttaggtttggacggtaaagtggatttagagttttgtttttttggaaattataaagttaagaaaaatgtggaatgttgagtttagaaatattttatttgagattgtttgtttgtgttaaaatgatatagtttttttaggtaatagtgggatgttttgtttttattaataggatattaaatagtaaatttttgattgtttgtgtttttagggggaaaaatataaataattagtaaaaaaagtagtagttatttaaatagttgtagtatgtatggttttgatagaaatgttttttgttggttaggcgcgttggtttatgtttgtaattttaatatttcgggaggttgaggtaggtagattatttgaggttaggagttcgagattaatttggttaatagggtgaaattttgtttttattaaaaatataaaaattagttgggggtggtggcgtatgtttgtgatgttagttatttaagaggttgaggtaggagaatcgtttgaattcgggaggagggtgtagtgagtcgagattatgttattgtattttagtttgggtaacgagtgagattttgttttaaaaaaaataaataaataagaaaaaataagaaatgttttttgttgatgttgtagttggtttgtagttggttttagaggtttttgttattttagtttagtgggagtataggtagatttttatttttttattttaagttagtttttattataaatagaaattttgatttggttaggtgtagtggtttatgtttgtaattttagttttttgggaggttgagataggaggatcgtttgagtttaggagtttaaaaataaaaaaaatagaaattttgatttaaatgatgtaattatttttgttttttatattttttgattatatgatttgaaatagtattatttttgattagttattttatttttttttttaattttattttatttttaggatagggtttttttttgtcgtttagattggagtgtagtggtttgattttagtttattgtaattttagttttttgggtttaagtgatttttttatttgtagtttttagattagttgagatttataggtatatattattatttttggtattttttggttttgtttgttttttagaattagggttttattattttgtttagattggttttaaatttgtgggtttaagtaatttttttgttttggttttttaaagtgttgggattataggtatgagttattagtatttttaatatgtatgggaaatatgttgtttttttatttttatttttttattttttagtattgagtttaggtaggtaggtaggggggtgttttttttttttatttcgatattttaattattttggggattagaagtgattttttggaaggatgttgttgttttttattagaggttgacgataacgaaggttattttttatggttattttttttaggttgtttttttggaaataggaattataatagttgttattggaaataggtagagggttgggggagttaaggtagttttatttaggattaaggtggttttattgtatatattttattatgatttttttgaaggtttaaacgtgcggttttgcggaagttgggttttttattggtttttttttttttttagaatttttaggggtgttttttttagtggttatatttagtttttttgattggataatttattatttaaaatttttaagtagtttcgtaaatagatatacgttgttgtatttatttatgttaagggtttggtttgtgataaattaggtttaaaaagattgttttaaaagagtgaattttggtaatttattataaaataattgtaatgtagattgtgtatggaaatgattggagatattttaaggttatagtgtttttataaattgagttgaaagggaattgttaggatgattttgtttaattttttttttttatataggaagaattattttaaattcgagaggttaagtgatttggttaaagttatatagttattattagttaattcgtatatattgatttttttgtggggttgggtagatgaggaattttttgtttttttttttgtttgtagagattttttttgaggttatttttcgagttttggtaagtatttttgtttttggtagttttgtgtttcgatttaattttattttttttattttattttatttttgagatagggttttattttgttatttaagttggagtgtagtggtgtaattttggtttattgtagtttttattttttgggtttaagcgatttttttgttttagttttttaagtagttgggattatagacgtttgttattacgttaggttaatttatggttttttgtatgtgttttttgtgtttttgtagagatagtgtttttttatgttgtttaggttggtttttaatttttgagtttaagtgatttgttcgttttagttttttaaagtgttaggattataggtgtgagttatcgtgttcggatttaattttattttttaatttgttttgttttgttttttttaggaggtttttagttttttcggattggttgagaaaagtggtttggttggtttggggttagcggtatttattttttttttaattgtttaattttttttttttatcgaattgtttaattttttttttttaattgtttaatttttttatttttataattttttttcgttataattgagggaggcggtgttgaaaaatagttgattttagtaatgttgtttacgtgattattgtagttgtagttttcgttttattttttgttttgggttaggtgggtattattaggggtttttttggtaaggagtatcgggtaggtattcggttttgttaatttattattggaatagttggggggatagtagataggtacggtcggatagatttgatagattaggtattaggttttttgcgttggtttcgggttttttaagtaggaacgtgaatggttttaagatgttttatatggttttattagttttttttttttttttgttttttatttttaggagggttgttttgttttttttttttttgttttttggttttatgtttttcgttattatagattttttttcgttttatttttttgtagatttagtcgtgtattgtaggtatggaggattaattagtgataggaagttgcgtttttcggagcggtgattagttgtggttaggagagttttagtagggttagttttaggagtttttttcgatttttgtttattgtttatttatttgttgttgttatgaggtattttggggttttttttttttttttgggggttttgggggtttttattgagatgtgtggtgagtaattcgtttttattttgtgtttttttttttttgggtttttagtggggtggttagggtataggatgagggaatttatttgtttttttaagtttttatagtagtttgggtttagttggattttagtatttaatatattttattgtgattgattatatgtttgattttttattagataagattttcgttaatttagttattcgtttatatatttatttagcgtatattgagttttttttgtgttaggtttagtgttagtttttggggaacgtgtaaagtatgagataagtttaatttttgttattttagagtttatgttttagggaagggggatagataaaagaaatggttaggtgtttttatttgaaattttagtattttggaaggttgaggcgggaggggaggatcgtttgagtttaatagtttaaggttagtttgggtaatatagggagattttatttttataaaaaataaaaaaaattaaaaaatagttgggtatggggaagattttttgaagattaagaggatatatgggagttgaaattcgaaggaagaaaaggagttggtaggaaaggagtgggggatatatattttaggtagtaggaagtgagttttcggaggttttgtttgttttagttttgtgttttaaggggttttttggagtatagttttttgggatttgtttatgagtttgagtttagaggtttagggttgtttttttagataggaggtagaaggtaggttttgggaattttgggtcgtttacgcgttttttttttttttttgtatttaggattacgttgagtaatatatttttatttttatggttttttgagattttggggaaattttgagaggtgggtgtagttatgtttaggtgttaagtgaagaagtcgagggttggaggggttgagtgatttatttagggtgttttattttttttagagttttgttgaatttagtttttagaatttgaagtttcgtttgttttcgttttgttttttgttgagagaggttttttttttgttgtttaggttggagtgtagtggtacgattttggtttattgtagtttttgttttgtgggtttaagtgatttttttattttagttttttaagtagttggagattgtatgtgtatattattatgtttggttaatttttgtatttttttgtagagatagggtttcgttatgttgtttaggttggtttcgaatttttgggtttaagtgaaatttttgcgtcggttttttaaattgttgagattataggcgtgagttatcgtgttcggttagaattttaagttttttatttgtgttttataaatgtaattagatattttaggtttgggtttaggaattttagtttttggtttatgttcggatagtttttaggggagttttgggtttaattagtaagagtttttttttttggttgatttggtttttagttttggatagttagtttattaatttgattttataggagttttaattttttggggtttggggaattttgaattggggtttggggtgtaaatatttgtattgagttatttaattgtatttagttttatttttttatttgtaaagtgggttaagaatgtttttttgttttttttttcggtgtagtataaggaaggattttatgatatttgtttttttagtttaaagttttatatgtatgttgtgaaattgatagggatcgttgtataaacgttaatgtaaagtgggtttttgtgttttttttttttttttttttttttttttttttttttaatttttttttagagatgaggttttattatattgtttagggttggttttaaatttttagggttaagcgatttttttattttggttttttaaattgttggtattataggcgtgagttattttgtttggtttttgtgtttgtgaatgttaatagtaattagtttttagttggtagggttgggttggtagggcgagagtttatttaaggttgtttttattattttgcgtgaatttgtttggttttttttttttaaggaggttgttttgtggttgttagtttttttttttatagttggattttgattttttagtttttaattttgtgttgatttatcgtgttggaagtgagagttcggggtgaggttagggaatttttttgcgcgttttaagaaaagggaaaaggaaagagaggtgaggaggggggtagatgattagagagatataggttgagagagattgagatagatttagagagttttatatattgagtgatagagacggagaaatggagataggtattaaaaaatggtttttagtgatagaaagggaaaaaagtaattttttagttttttttaatatttggtgagaaattagttatgtgttttggtttgggtttatatagtaaaggattatgtagggttttatgttggtggatggttattttatagtaataggtatttggggttgtcgggaaaatagatacgaggttgtgggatttagatttatagagatggagttgttttaggagttttggttttcgttttggttttttgggatatggtatagtgaaggttattattaggtagttggagtttagtagtaattgggaggtagtaaatagggatcgaaagtgtaaggttattttcgaggtaaattattttaagttattttgtgttgagtttaagttttttggaattatttttaaggttttcgtttttagagtgtttgagtattttcgttgtatagtttcgaataaattttatagtaataggtaaacggttgtaagttgtgattgttttttaagagtttattttataattttaggttttttttatttaaatagagatggtaggaaaggcgttattttgagatttgtatggaggaagtttattaggtagttttaatttattagttggaagtttgcgttgtttggaaatttgatgtgtaatacgttttgtatgtgggttgatgtttttgtaaacgggtagtatatatatttagtagggtattaaagagcgggggttttgtagttaggtttatttttggttttgtagttttgtgtaagatatgatacgattttgaatttttgtttttttttttgtgtaaagtaatgatgatagtatttatattataggattggtatgaggattaagtgagattgggtaaggtgttcgggtatattagttttattgttattgttgatgggtagagtggttgtttggtagtagtattttttatttttagtttattattttttttgttggtttattttaattgttttttagagatatacgtttttttttttttttttttttattgttttttagtatggttgtatttttttttgtaagttggtgtgtgttgggtggaggtgggggtgaggatatgtattttttggagaaggttttggtaacgttaaagtatttttttgttggtggtttggttttgtgattttatttgtattatttttttttttaaga

SEQ ID NO: 1760 - DNA, 8577 bp, Artificial Sequence
  chemically treated genomic DNA (Homo sapiens)
ttttagaaaagaaaatggtataaatgaggttatagggttaggttattagtaaagaagtgttttgacgttattagggttttttttagagaatatatgtttttatttttatttttatttagtatatattaatttgtagggggaaatgtagttatattgaaaggtagtgggaggagaaaagaggggaagcgtgtatttttaaagagtagttggagtgagttagtaagagaggtggtgggttgaagatagaggatgttattgttaggtaattattttgtttattagtagtgatagtgagattggtgtgttcgggtattttgtttaattttatttggtttttatgttagttttgtgatgtagatattgttattattgttttgtatagaagaggaaatagaagtttaaagtcgtgttatgttttatataaggttgtagagttaaggatggatttaattgtaaagttttcgttttttggtgttttgttgaatgtgtgtgttattcgtttataaaaatattagtttatatgtagaacgtgttatatattaaatttttaaataacgtaaatttttagttggtgaattgaggttgtttggtgaattttttttatgtagattttaaaataacgttttttttgttatttttgtttaaatgaagaggatttgagattgtgagatgagtttttagaaaatagttatagtttgtagtcgtttatttgttgttgtgggatttattcgaagttgtgtaacgaaaatatttaaatattttggaagcggaagttttagggatagttttaagggatttgagtttagtatagggtagtttagagtagtttgtttcggaggtaattttgtattttcggtttttgtttattgttttttagttgttgttgggttttagttgtttgatggtggtttttattgtgttatattttaggggattagaacgaggattagagtttttagaatagttttatttttgtgggtttgggttttataatttcgtgtttgttttttcgatagttttagatatttgttgttataaggtgattatttattagtatgaaattttatataattttttgttgtgtgggtttagattaaagtatatggttggttttttattagatgttaagagagattggggggttgtttttttttttttttgttattgagaattattttttggtgtttatttttattttttcgtttttgttatttaatgtgtgaggttttttgggtttgttttagttttttttagtttgtgtttttttggttatttgtttttttttttatttttttttttttttttttttttttgaaacgcgtaagggagttttttgattttatttcgggtttttatttttagtacgatgagttagtatagggttagaaattgaaagattaggatttagttgtaaagggagagattgataattatagagtaatttttttagaaggaaggggttaggtagatttacgtagggtaataaaagtagttttgggtgagttttcgttttattaatttagttttgttagttaagggttgattgttgttgatatttataagtataggagttagatagagtggtttacgtttgtaatattagtagtttgggaggttaaggtgggaggatcgtttgattttaggagtttgaaattaattttgggtaatatagtgagattttatttttagaagaaaattaaaaaaaaaaaaaagaagaagaaagagaaaaggaagtataggagtttattttgtattagcgtttgtgtagcgatttttgttaattttataatatatatatagagttttaaattgggagagtaggtgttatgggatttttttttgtattatatcgaggaggaaggtaggggagtatttttagtttattttatagataaaggaatgaggttgggtgtaattaagtgatttagtgtagatatttgtattttaaattttagtttaagattttttagattttaagggattggggtttttgtggggttaggttaatggattaattgtttaaggttgaggattagattagttaggaggaagagtttttgttggttgaatttagaatttttttggggattgttcggatatgaattaagagttggggtttttgggtttagatttgaggtgtttgattgtatttatggaatatagatgagaggtttggagttttggtcgggtacggtggtttacgtttgtaattttagtaatttgggaggtcgacgtaagagttttatttgagtttaggagttcgagattagtttgggtaatatggcgaaattttgtttttataaaaaaatataaaaattagttaagtatggtagtatgtatatgtagtttttagttatttgggaggttgaggtgggggaattatttgaatttataaggtagaggttgtagtgagttaagatcgtgttattgtattttagtttgggtaatagagggagaattttttttaataaaaaataaaacgaaaataaacgaggttttaagttttaaaaattaagtttagtaaagttttggaaaaggtggagtattttgagtgggttatttagtttttttaattttcgatttttttatttgatatttggatatgattgtatttattttttagggtttttttagggttttaagagattatgggggtgaaagtgtattgtttaacgtaattttaggtgtagaggaggagaaaaggcgcgtgggcggtttaaagtttttaaagtttgttttttgttttttgtttgaaggagtagttttgagtttttaagtttagatttatagataggttttaggagattgtgttttaagagattttttggggtatagagttggagtaggtaggattttcgaaggtttattttttgttgtttagaatgtgtgttttttattttttttttgttagtttttttttttttttcgagttttagtttttatgtgtttttttggtttttagaaagttttttttatgtttagttattttttaattttttttattttttgtagagatggggtttttttatgttgtttaggttgattttgaattgttgagtttaagcgatttttttttttcgttttagttttttaaaatgttgagattttaggtgggagtatttaattattttttttgtttgttttttttttttagaatataagttttaggatggtagggattagatttgttttatgttttgtacgttttttaaaggttaatattgggtttgatatagaaaaggtttagtatgcgttgaatgaatgtgtgaacgaatgattgaattaacggagattttgtttggtgaggagttaaatatataattaattataataggatgtgttaaatgttgaggtttagttaagtttaaattgttatgggagtttagaagggtaggtaagtttttttattttatgttttagttattttattaaggatttaggaggaaagaggtataggatagaggcgagttatttattatatattttagtgagggtttttaggatttttagaaggaagaggaaggttttaaggtgttttatggtagtagtaggtgggtgagtagtgagtaagaatcgggaaagatttttggggttggttttgttgaggtttttttgattatagttggttatcgtttcgagagacgtagttttttgttattgattaattttttatgtttgtaatgtacggttaagtttgtagaggggtggggcgggggaaggtttgtggtggcggggaatataaggttaaagaatagaggaaggaagggtagagtagtttttttggaggtagggaataaagggaggaggagggttagtgggattatgtgagatattttgaggttatttacgtttttgtttaaagagttcgggattagcgtagagggtttgatgtttgatttgttaagtttgttcgatcgtgtttgtttgttgtttttttagttgttttagtggtggattggtaggatcgggtgtttattcggtattttttattaaaggagtttttggtagtgtttatttagtttaggataaggagtggaacgggagttgtagttgtagtggttacgtgagtagtattgttggagttagttgttttttagtatcgttttttttagttgtggcgggaggggattgtgggggtgggggagttgggtagttggggagggggagttgggtagttcggtggggggggggagttgggtaattgaggggagggtgggtgtcgttggttttagattagttaggttattttttttaattaattcgaaagggttgggagttttttggagaggataaaataaaataagttaaagaatgggattaagttcgggtacggtggtttatatttgtaattttagtattttgaaaggttgaggcgggtagattatttgagtttaggagttggagattagtttgggtaatatggggaaatattgtttttataaaaatataaaaaatatatataaaaaattataaattagtttggcgtggtggtagacgtttgtaattttagttatttggggggttgaggtaggaggatcgtttgaatttaagaggtggaggttatagtgagttaagattatattattgtattttagtttgggtgataaagtgagattttgttttaaaaataaaataaaataaaaagaatgagattgaatcgagatataaagttattagaagtaggggtatttgttagaattcggaaagtaattttaaaaaaaatttttgtaaatagggaagagaataaaagattttttatttgtttagttttataggagaattaatgtatacgagttaattagtggtggttgtgtgattttggttaggttatttaatttttcgagtttaaaatagttttttttgtgtgagaagagagggttaggtaagattattttaatagtttttttttagtttaatttgtgaagatattatgattttaaaatatttttaattatttttatgtataatttgtattgtaattattttatggtaaattgttaaggtttatttttttaagataatttttttgagtttgatttattataaattaagtttttgatataaataaatatagtaacgtgtgtttgtttacggaattatttgaaaattttaaatgataggttgtttagttagaaaggttggatgtggttattaggaggagtatttttggaggttttgaggaaggagggaggttagtggggagtttaattttcgtagaatcgtacgtttggatttttaggggagttatggtgaagtgtgtgtaatggagttattttggttttgggtgggattgttttggtttttttaattttttgtttgtttttagtaataattattatgatttttatttttaggaaggtagtttggaggaggtggttatggaggatagttttcgttatcgttagtttttggtgagaagtagtagtatttttttagagagttatttttgatttttaaggtagttagggtgtcgaagtaaaggagggagatatttttttgtttatttatttggatttagtgttagagggtgggggagtaggaataggaagatagtatattttttatatatattagaaatattggtggtttatgtttgtaattttagtattttgggaagttaaggtaggaggattgtttgagtttataagtttgagattagtttaggtaagatggtgagattttgattttaaaaaataaataaaattaaaaaatgttagggatggtggtgtgtgtttgtaagttttagttaatttagaggttataagtgggaggattatttgagtttaggaggttgaggttgtagtgagttgagattagattattgtattttagtttgggcgatagaaggagattttgttttaaaaataaagtaaaattaaaaaaagaaatagagtgattggttaggggtagtgttattttaggttatgtggttagggaatgtgaaaaataaaaatgattatattatttagattaggatttttattttttttatttttgaatttttgggtttaagcgatttttttgttttagttttttaaagagttgggattataggtatgaattattgtatttggttagattaagatttttatttgtggtgaaaattagtttggaatgagaaagtaaaagtttgtttgtgtttttattagattgggataatagggatttttaaagttagttgtaagttagttgtaatattaataggaaatattttttatttttttttatttatttattttttttgagatagggttttattcgttgtttaggttggagtgtaatggtatgatttcggtttattatatttttttttcgggtttaagcgatttttttgttttaattttttgagtagttgatattataggtatgcgttattatttttagttaatttttgtatttttagtagagatagggttttattttgttggttaggttggtttcggatttttgattttaagtgatttgtttgttttagtttttcgaagtattgggattataggtatgagttagcgcgtttggttaataggaaatatttttattaaggttatgtatgttatagttatttgggtgattattattttttttattgattatttatatttttttttttaaaagtataagtaattagaaatttgttgtttgatattttattagtaagaatagaatattttattgttgtttaaaagagttatgttattttgatatagataagtagttttagataaggtgtttttggatttagtattttatattttttttaattttgtagtttttaaggaaataagattttaggtttattttgtcgtttagatttgaagcggattttttatatatagttttgtgatatttggagtttgtttgttttaaaatattgtttgttttatattttatttaattttatttttttttttaattttttaataatttttttttttgtttagttagattattatagtttttttgttgggtggttttttttattggaataagttaataattgggtttgtttttggtggttttaggttgatttggcgaggattagtttaaaaattaatttaaaagagaaaaataaaattgtatgtatgaagatggtatgagaagaatgaatataataaatatataattttagttttatatgaaatatttattttagtgattaaaagtgtatatatattaaaattatattttaaggttaggtatagtggtttatatttgtaattttagtattttgggaggtcgaggcgggtggattatttgaggttaggagttcgagattagtttgattaatagggtgaaatttagtttttattaaaaatataaaaattagtcgggtatggtggtatgtgtttgtggttttagttatttgggaggttgaggcgggagaattgtttgaatttgggggttagaggttgtagtgagttaagattatgttattgtattttagtttgggtgatagagtaagattttatttcggagaaataaaaaataaaaaataaataaaaatagaaagaaagaaaaggaggaagaggaggagaaagtaaagataaaattataaaaaaattttattaattagagtattggtttttaattgtggttattggatgattggtagtttttaagaattttttagggggtttgtgagtttaaaattatttttaagtggttgggcgtagtggtttatgtttgaaattttagttttttgggaggtcgaggtgggtggattatttgaggttaggagttcgagattagtttgattaacgtggcgaaatttagtttttattaaaaatataaaaattagttgcgtttggtggtgggtttttgtagttttagttatttgggagtttgaggttggagaattgtttgaatttaggaggtagaggttgtagtgagttaagattacgttattgtattttagtttggataatagagcgagatttttttttatatatatatatatataaattgtttttaagttaagataaatagtaagatattattagtgtaatagtaagatattttattaaatggtgtaggaataattggatgtttatatgtaaaataaattaatttaaatatatattttttataaaaaattaatttgaaatagatttaattatgaaatataaaattataaaattttaagaagaggtgatgtttttttagatataatatttaaagtatagtttattaaagaaataattgtttgggtgtagtaattttagtattttgggaggttaaagtggtaggattatttgaggttaggagtttgagataagtttgggtaatatagtgagtttttatttttattaaaagaaaagaaaaaaaggaaaagaaaataaaagaaaaaagaggtcggatatggtggtttatatttgtaatcgtagtacgttgggaggttaaggcgggtggaatttttgtgttaaaaaaaaaaaagtattagtttttatattgttataaagaaatatttgtaattcggtaatttataaagaggtttaattgatttatagttgtgtatggttggggaggttttagaaaatttgtaatcgtggtagaaagtaaaggggaagtaagtatttt

SEQ ID NO: 1761 - DNA, 8349 bp, Artificial Sequence
  chemically treated genomic DNA (Homo sapiens)
gtagtggtgtatgtttgtgattttagttatttggggggttgaagtgggagaattttttgagttaaagaatttgaggttgtagtgagttaagatttcgttattgtgttttaggttaggtgataaaatgagacgttgttttaaaaaaataaaataaaagtttatgtaaaatttttaaaatttttatttgggaaataaatatgattttataaagatatttttttaggagtataagtatatataaattatggattttatttgtaatttaaagaaagttttatagaattatttttgtggaatttattggatgaattgtagggatgaggggtgtttattgagtaaattaacggagaggagaggtaggtagggtattgggatagagttagttacgtattgattgatatttgttttttttttttttttttttgagacggagtttcgttttgtcgtttaggttggagtgtagtggtacgatttcggtttattgtaatttttattttttaggtttatgttatttttttgttttagtttgtcgagtggttgggattataggcgtttattattatgttcgtttaattttttgtatttttttttttttttttttagtagagacgggattttattacgttagttaagatggtttttattttttgatttcgtgattcgttttttttggttttttaaagtgttgggattataggcgtgagttatcgcgttcggtttggtatttgttttttttaatttatgagtttgagtgttttaagtttatatagttaatttgatgtcgtttttataattttgtgatgggacggattatgtttaaattgtttatgtagaagaatataatttagaaaagttatttgaagaatttaattacgtttattgttgggagggagggataaaggttatttttttttataattataagatataataattaatttggttagttatatgatgaattattgagagtattattagaggttatgttaagttttagtttttttaaattattttatttttttaattattagaaatatagtgaaagtttgagtagattgtttatttattatatttaatttttttttttttttttttttttttttttttttttttttttgagacggagtttcgttttgtcgtttaggttggagtgtagtggtataatttgggtttattgtaagttttagtttttaagtttttattatttttttgttttagttttttaagtagttgggattataggcgttcgttattacgttcggttaatttttgtgtatttttagtagagacggggttttatcgtgttagttaggatggtttcgattttttgatttcgtgattcgttcgtttcggttttttaaagtgttgggattataggcgtgagttattacgtttggtttattattttattttttgagacggagtttcgtttttgttattcgggttggagtgtaatggcgttattttagtttatcgtaatttttgttttttgggtttaagcgatttttttgttttagttttttaagtagttgggattataagtatgtattattatgtttggttaattttgtatttttagtagagatagggtttttttatgttggttaggttagtttcgaattttcgatttttggtgatttgtttattttagttttttaaagtattgggattataggtgtgagttattgcgtttagttattgttggatattattgatgttatttattgatgtgatagtttattgattgttatgattattaggtttatatttgttaaataaaggtattggtagttttagttttatagtttgtatttaagaaatttgattttagaaaagaaaggtgattgtacgtaaatttgttaatttattattaatttttaaattgaaaaataaatttaagatttattttattgatttattgtatagaaattaaatattattttaaaatatggtagaatgttaaagatttatgagtagttacgagtaaaggtgtttgagttttaatgtttttgatggatatttattcgtggtagatggaaggtgttggaaatggtatttggtgaattgttaaatgttttaacgattttaaattttttagttttatagattatattagttgggtagaatataatattatattattgtatttttttaagtattataatattatataagtttagagaatttaaatttttttatttatagatatattcgtttaaaagaaaaaattttataaaggttatgttttagttaattttgtagttttaatttttagtttagagtttgatataaagggagtgttttatatatgtgtattgaataagtgaatagatagttgtgaagataaatagattagtttattcgtttattggtagttttaaaatgttatatatcgcgattatttaataaatgttttttaatagttaaaattggagagtggtatttaatgtataaaagttaaaattatgtaagtatttttaaaatgtatatttgtatgttttttgttgatttatgtgtatgttggtgattcgtagttataataagatttatgtattaattatgtattattttagtagatatttaggaaattgatttaaattaggaagtttttaaaaggttgtggggaaaattgaaaaggttgttttaagtgttatgtttttttattgtaggtgtttgtttagaatcggtttatttttgttttgtatataattttgtgatatttagttattgaattttaggtttataataaagtagtagaagaaaaaagattttagaggtttttgattggtttaggatcgtggtggggttaagagtttggaattaggtaggtagagaatatttaaaacgagattttaggtgatattgagaagggtaggtaggtaaagtaatgttagtattagaattatatgtggattgaggcgtacgattgaaatattaggataggggagttgaagttaggtaataagaaaggaatttaaaaggtagataaagtttagaatttaaggagaggaagattaggtgtggtaaagtaattagtttgtttagtaagttttttcgtttaggtcgaatatttagggttaagtagttttgtgttagttagggttttgtttttttttcgttagttttgttttttttaaggaggtaggtagttgtatttttttttattttttagttttttttatttgggtttgaggtaaagttaatatttatgagggaaatgatttatgtaataaattttaggtcgggtatggtggtttatagttataattttagtattttgggaggttgaggttggaggattttttaagttcgggagtttgagatttgtttgggtaatatagtgagattttatttttataaaagatatattaaaaaaataggtgggtgtggtggttagtgtttggaattttagttgtttaggaggttaaggtaggagaatattttgagtttaggagtttaagtttttagtggtttttggatgattaaattttaatatattttagtttaaaattttcgattatattattgtattttagttcgggtaatagaatgatattttgtttttaaataaataaataaataaatgttaattgtgtagttattatgtgttaggtataatgtggaaggaaggggatatattagtgaataaaatagattttttttgtatggtatttagtttttaaatggagatatattattaataagtaattataaatacgtttttgtaaattgagagaagtgttatgaggaaaatgtataggatgtaggggtggaggatgaggaggtcggttattttagatgtcgtggttatagaatggttttttgtaggagattttgagttaagatatgttaaaagtttagttatttaaagattattaagattagtttatagtttgataatttagtaattattgatttatggtagggtagaatgggtgaggggagggaggagtcgttgggttaggttttttttgaagggttttaataagattttgatagatcgattaggttatagttcgatggttataatttagatgagagatattaatttttaattggggtttcgagtatatggggtagaaataataagggttgttgatggattagatgtgggatttgaagtttaggtttattaaatttttgggatttttgtagttagtttttttttggggaatgggaagtgggttttagtaatttgaatttaagtgtatgacgaaattagaaaaagtaaacgttaaaattaaaattcggagttttagaatatttgttaatagatgtatatgttttagtttttcgtggagggtagtttattagagtttagtgtaatttttaatttttataaagaatttatatataaataaagtttgtttagtttattatggttaaggtagttaggaagtgtgttatattttataaaattttttatttaaaatgtttttttttaatggtgtttaaaggaaaaatttttatttatttggaaaatttaattttttaaagggaagtttcgtttagatagttaaagtatgttaattttagtttttaagggaattgtaataacgttttatcgggcgtattgtttttagtagttattttcgagtttgttgttaggtgttcgagcgggtttgaacgttcgcgttaatttatatagtataaatcggaggaggggtcgggattacgttttttttttaggattgttttttgtacgtgtgttttgtttttgttgttaaggtttagggagttgttcggttatttttacggatttttatggaaattattattttttagaggataggaggagaggcgaatttagggtttatttacgggtttcgtttagggatggggttattgagggttcgggtagcgaagggcggggttcgggagttgggtatgggcgaggtaggcgcgagaggagaggggcgtggtaggttcggggcggggtttgagtgcgtttgcgtagttcgcgttatttagggagtcggaggggacgcgtcggaggaaagatggaagattattaggttgcggaggaggtaatcgtcgggtcggcgacggaagggtggaggtttagagttttggtcgcggaaggatacgcggttttgttcggaaaggtttggttgtttattttttttagttaggttagtttcggtagtttacggtttgagtttttcggtcgtcggcgtttcgttcggttttattttgttcggatattgtcgtcgttttttcggcgcggggggcgggaaggggattgagttttttttcgcgcggggaggtatcgggcgtgattcggagagagcgtttcggtgagcggtgtcgagaaattttttcgtagggtttcgttttcggttcgtagttaagttcgtcgagaggatgatattatcgttttttgttttgcggggttgattttagttttagttttagtttggagcggggcgcggcggtcgggttgggagcgtcgaggtttggacgttttttcgcggaggtgcgggtgacgttttcgtcgttagttttttcgtttcgggttggcgtttcggttatttcgcgtttttgtttcgggttttatttggttttgtaacgttgggaatgagtagtatattttattttcgtttaatatgtttgtaagaaagtttattgttgtggggaaaaaattattttttatgtttttttgaggaagtaggataaagtttacgatgtcgttaagtagaagatatttatcggtatcgtgtgcgttaaatggtttttttttaagtttacggttattcggggaatagagttgatgggcgtagttgagatataatatttattttttttttattgaataatttttgttgaaatttagatagagttttatggatttattatgtagtttgttaaaaatataaattatagatatatttggtaaggttggatattttattatttatgaaatttagtggttgggcgtagtggtttacgtttgtaattttagtattttgggaggtttaggcgggcggattatttgaggttaggagttcgagagtagtttgattaatatggagaaatttcgttttttttaaaaatataaaattagtcgggcgtggtggcgtatgtttgtaattttagttattcgggaggtcgaggtaggagaattttttgaatttgggaggtagaggttgtcgtgagttaagatcgcgttattgtattttagtttgggtaataagagcgaaatttcgttttaaaaattaaaaaaaaagaaaaaaatttcgtttaaggaggaatgtttttagggaaaataaaattaaaatttaaggattgattttagagttttagttttgatttgattttttaattagtatatattttttgtgatagtggtataattagtgtttgaatgttgatggtaattaagtgaataatgacgagaagagttggtttaggagtagttggtaaagaaaaaagtttttttttttaaattgttattaatataatattggaaaatgttttgtattatagtaatatcgagtaaaatttttaaaaaagaaatcgttttgtaaaggaaagcgtttaatattgtagttcgattttgatttttataaataaggtggttaagtggttttattattcgagattttaatcgtatatgtgtaaaatgaaggggttggatagagtgatgagtgttttatttgggatggaggttttgggaggtggagattatggttgttttgtagtaggtatgttttaggtatttattgaatggttcgttttggtttttttattagttttttagtagttttttttgtattttttttaatttcgtgtagatgtttgggtttttgtaattatttttttaatttattatttattttttttggagacgttaaaattatttattggatttaatataattttgttttttattaaaaattttttaaaatgttttttaatttttttcgtattgtaattatatgggaggtgatatagtgttttttttttgtgattaaggttacggtagttatttggaaggattttttaagtttttagaaatgatttaatttttaagatattgtaaattgttttttatttagtgagttggttttgtttttaagttcgatttttgagtatagtaagtgaggtggtttcgggtagttagtttttgaattttttaaaaagaaagggtagggtttgtagtggatagtagttagatagggaggaagatttattgttaagttagggttttttgttttgatttttttaggatgtacgttgattgagggttttaggggttgttttttcgaaggcgtgtttagagttacgtattttttttgggatttagtagtaattttaaacgtttgtgtttatgtgaagagtatattggtaggtaagtgtttgattaatgttatttttaggatgattttttatttatttagatttattatgtgtaaaaggaaaattatatttttggtattagatttttgtaggtagtttattttttgagttatttagatattgatagagaatagttatgttggtagttggtggttagttttggagtcggagggtagtattgggaaagaaaaataattatttggagataatgtaattatcgtatattttataagtaatggtgttttaaaaaaatttttttaaggttaaattgatttttttaattagtttatattatggaagagagaattatattttaaatggattattttagtagttttagttaatttatataaaaattaattaatttattaagtttttttattggttaatgattttagtagttagttgaaatggaagaagagaatgaattttagtttaaagtgaagttttagattgtggtatgattaaaataaaatagggttaggtgtggtggtttacgtttgtaattttagtattttgggaggttgaggcgggaggattatttgaggttaggagttcgagattagtttggttaatatgatgaaattttatttttattaaaaatacgaaaattagtcgggtgtggtggagggtatttgtaattttagttatttgggaggttgaggtaggagaattatttgaatttgggaggtagagattgtagtgagttgagattgcgttattgtattttagtttgggttatagagcgatatttcgttttaaaaataaataaataaaaataaaataatatttttaaattatgtgtatgtattttagttttttggtttttgaagattgtaatgttatttttggtaaagttgaatagtttagttagattatttttaaggtttttatttttatattatgtttattatttatatttgtatttattaatgtagtggaaatattttttaaataaattaaatttaattgaatgtttttttttataga

SEQ ID NO: 1762 - DNA, 8349 bp, Artificial Sequence
  chemically treated genomic DNA (Homo sapiens)
tttgtaaggaagaatatttagttaagtttgatttatttaaaagatatttttattatattgataaatgtaaatgtaggtaatgaatataatgtagaaatgaagattttagaaataatttaattagattgtttagttttattaaggatggtattatagtttttagaaattagaagattagaatatatgtatataatttaaaggtattgttttatttttatttatttatttttgagacggagtgtcgttttgtagtttaggttggaatgtagtggcgtaattttagtttattgtaatttttgttttttaggtttaagtgatttttttgttttagttttttaagtagttgggattataggtgttttttattatattcggttaattttcgtatttttagtagagatggggttttattatgttggttaggttggtttcgaatttttgattttaggtgattttttcgttttagttttttaaaatgttgggattataggcgtaagttattatatttggttttgttttgttttaattatgttataatttaagattttattttaaattagaatttattttttttttttattttaattggttgttagaattattaattaatagagaggtttaatgagttggttgatttttgtataaattaattgaagttgttgaagtaatttatttaagatgtaatttttttttttatgatgtaaattgattaggaggattagtttgattttgaggagatttttttaaagtattattatttgtaaaatgtacgatgattatattatttttaggtaattattttttttttttagtgttgtttttcgattttaggattaattattagttgttagtatggttgttttttgttagtgtttggatgatttaggaggtgggttgtttgtaggaatttagtgttaggagtatagttttttttttatatatggtagatttgaatgggtaaaaggttattttgaaaataatattagttaggtatttgtttgttaatgtgttttttatatgagtataagcgtttaaagttattgttgagttttaggaaaggtacgtagttttggatacgttttcgagagggtaatttttggggtttttagttaacgtgtattttgagggaattaaggtagagaattttgatttggtagtgagtttttttttttgtttggttgttgtttattgtaggttttgttttttttttttagggggtttaggagttgattgttcgaagttattttatttgttgtatttagaagtcggatttggaaataaaattaatttattgagtgaagaataatttgtaatattttagagattaagttatttttggaagtttaaaggatttttttaagtgattatcgtgattttaattataaaggaaaggtattgtattattttttatatggttatagtacgaaaaaggttgagggatattttaaagaatttttagtggaaagtagagttgtattgaatttagtggatagttttaacgtttttaagaaagatgaatggtgagttgagagaatagttataaaggtttaggtatttatacgaagttagaagagatgtagaaaaggttgttaagaggttggtgggaggattagaacgggttatttagtaaatatttaagatatgtttattataagatagttatggtttttattttttagggtttttattttaggtagaatatttattattttgtttagtttttttattttatatatatgcgattgagatttcgaataatgaagttatttagttattttatttgtgggagttagaatcggattgtagtattaagcgtttttttttataaagcgattttttttttagaagttttattcgatattattgtaatataagatattttttaatattatattagtaatagtttaaggggaaaggtttttttttttgttaattgtttttgaattagtttttttcgttattatttatttggttgttattagtatttaaatattgattatgttattgttataggaagtgtgtgttagttaggaaattagattaaaattgaaattttagaattagtttttaagttttagttttattttttttgaaaatatttttttttaaacgaaatttttttttttttttttggtttttgagacggagtttcgtttttgttgtttaggttggagtgtaatggcgcgattttggtttacggtaatttttgttttttaggtttaagggatttttttgtttcggtttttcgaatagttgggattataggtatgcgttattacgttcggttaattttgtatttttaaaagagacggggtttttttatgttggttaggttgttttcgaatttttgattttaggtgattcgttcgtttaggttttttaaagtgttgggattataggcgtgagttattgcgtttagttattaaattttataaatggtaagatatttaattttattaaatgtatttatagtttatatttttgataggttgtataataaatttatagggttttatttgaattttaataaggattatttagtaagaagaaaatgagtgttgtattttagttgcgtttattagttttatttttcgaatgatcgtgagtttgaaggaaagttatttaacgtatacggtgtcgatgggtgttttttgtttggcgatatcgtgggttttattttatttttttaaggaggtataaaagatgattttttttttataataatgagtttttttatagatatattaaacggaaatgaaatgtgttatttatttttagcgttgtagaattaggtgaggttcgagataaaggcgcgggatggtcgggacgttagttcggggcggaggggttggcggcgggagcgttattcgtattttcgcggggagacgtttaagtttcggcgtttttagttcggtcgtcgcgtttcgttttaggttggggttggggttggggttagtttcgtagagtaaggggcggtgatgttattttttcggcgagtttggttgcgggtcggaggcgaggttttgcgggaaggtttttcggtatcgtttatcggggcgtttttttcgagttacgttcggtgttttttcgcgcgggaagaagtttaatttttttttcgtttttcgcgtcggggaaacggcggtaatgttcgggtagaatggggtcgggcggagcgtcggcgatcgggaagtttaggtcgtgggttgtcgagattggtttagttgaaggaggtgggtagttaggttttttcgggtaggatcgcgtgttttttcgcggttagggttttaggtttttattttttcgtcgtcgattcggcggttatttttttcgtagtttggtagttttttatttttttttcggcgcgtttttttcggttttttgagtggcgcggattgcgtaggcgtatttaggtttcgtttcggatttgttacgttttttttttttcgcgtttgtttcgtttatgtttagttttcgggtttcgtttttcgttgttcggatttttagtgattttatttttgggcggggttcgtgggtggattttgaattcgtttttttttttgttttttgggaggtggtagtttttatgggaattcgtgagggtagtcgggtagttttttaaattttagtaatagaaataaaatatacgtataaaaggtagttttggaggggaagcgtggtttcggtttttttttcggtttgtattgtgtggattgacgcggacgtttaaattcgttcggatatttggtaataaattcgaaagtgattgttgaaggtagtgcgttcggtgagacgttgttgtagtttttttggggattgggattggtatgttttagttatttgaacgaaatttttttttggggagttaagttttttaggtaaatgagaattttttttttaagtattattaaaaaaaaatattttgggtggaaaattttgtaaaatgtggtatattttttgattattttaattatagtgaattagatagattttatttgtatgtgggttttttatggaaattaggaattgtattgggttttggtaaattgttttttacggaaagttggggtatatgtatttattggtaggtattttgaggtttcgagttttgattttggcgtttgttttttttggtttcgttatgtatttgaatttaggttgttggaatttattttttattttttaagaaagagttgattgtaagggttttagggatttggtagatttaaattttaaattttatatttaatttattaataatttttgttatttttattttatatgttcgggattttagttaaagattgatattttttatttggattatgattatcggattgtaatttggtcggtttattagggttttattagagttttttaagaggaatttaatttaacgatttttttttttttttatttattttgttttgttataagttaatagttattaagttgttagattatagattaattttagtgatttttggatgattaaatttttaatatattttagtttaaaattttttatagagagttattttgtgattacggtatttaaggtagtcgatttttttattttttatttttgtattttgtatattttttttatagtattttttttagtttgtaagaacgtatttatggttgtttgttgatggtgtgtttttatttagaaattaagtattatgtaggaaggatttgttttatttattaatgtatttttttttttttatattgtgtttggtatataatagttatataattaatatttatttatttatttatttagagatagggtgttattttgttgttcgggttggaatgtagtggtgtgatcggagattttgagttaagatgtgttgaagtttagttatttaaagattattaagagtttgaatttttgggtttaaggtatttttttgttttagttttttgagtagttgggattttaggtattagttattatatttatttatttttttaatatgttttttgtagagatgggattttattgtgttgtttaggtaggttttaaattttcgggtttaagggattttttagttttagttttttaaagtgttgggattatagttgtgagttattatgttcggtttaaaatttattgtatgaattattttttttatgggtgttagttttgttttagatttaaatggagagaattggggagtggaggaagatgtaattatttgtttttttgagggaaatagggttggcgagaggagggtagagttttgattgatataaggttgtttggttttgggtgttcggtttgagcgaggagatttgttgggtaggttggttgttttattatatttggtttttttttttttggattttgaattttatttattttttgaattttttttttattatttggttttaatttttttgttttggtgttttagtcgtgcgttttagtttatatgtgattttgatgttgatattgttttgtttgtttgttttttttagtattatttgagatttcgttttggatgttttttgtttatttggttttaagtttttggttttattacgattttgagttaattaggagtttttgaaatttttttttttttgttattttgttgtggatttggagtttagtagttaagtgttatagaattatgtgtaaagtaagagtaaatcggttttgagtaaatatttgtaatggaagaatatgatatttgggatagtttttttaattttttttataattttttaggaattttttaatttaaattaattttttgaatgtttgttaggatggtgtataattaatgtatggattttgttataattgcggattattagtatgtatataaattaatagaaaatatgtaaatgtgtattttaaaaatgtttatatgattttagtttttatatattgggtattattttttaattttaattattaaagaatatttgttaaatgatcgcgatgtatgatattttgaggttgttagtaaacggatgagttggtttgtttatttttataattatttgtttatttgtttaatatatatatatggagtattttttttgtgttaggttttgagttgggggttgaggttataaagttgattaaaatatggtttttatggaatttttttttttaaacggatatatttgtaaataggagggtttgaattttttaggtttatgtgatgttgtagtgtttggaaaaatgtagtgatgtggtattatattttgtttaattgatgtagtttgtagggttaaggaatttaaaatcgttaagatatttggtagtttattagatgttatttttagtattttttatttgttacgaatggatgtttattagaagtattggagtttagatatttttattcgtaattgtttatgaatttttggtattttgttatattttagaataatgtttagtttttatgtagtaagttagtggagtgaattttaggtttgttttttaatttggaggttagtgataggttggtaggtttgcgtgtaattattttttttttttggagttaaattttttgaatatagattgtgggattggagttgttaatatttttatttagtaagtgtgggtttaataattatagtaattaatgaattgttatattaataaataatattaataatatttagtagtggttgggcgtagtggtttatatttgtaattttagtattttgggaggttgaggtgggtagattattagaggtcgggagttcgagattagtttgattaatatggagaaattttatttttattaaaaatataaaattagttaggtatggtggtgtatgtttgtaattttagttatttgggaggttgaggtaggagaatcgtttgaatttaggaggtagagattgcggtgagttgagatagcgttattgtattttagttcgggtaataagagcgaaatttcgttttaaaaaataaaataataggttaggcgtggtggtttacgtttgtaattttagtattttgggaggtcgaggcgggcggattacgaggttaggagatcgagattattttggttaatacggtgaaatttcgtttttattaaaaatatataaaaattagtcgggcgtggtggcgggcgtttgtagttttagttatttgggaggttgaggtaggagaatggtgggaatttgggaattggagtttgtagtgagtttagattgtgttattgtattttagtttgggcgatagagcgagatttcgttttaaaaaaaaaaaaaaaaaaaaaaaaaaaaaaaaaaaaaagggttaaatgtaatagataagtagtttatttagatttttattgtatttttaatagttagggaaataaaataatttagaaaggttaaggtttaatatagtttttgataatgtttttaatgatttattatgtaattaattaggttaattattgtattttataattatgaaggaaaatgatttttattttttttttttagtagtaaacgtgattgagttttttaagtgatttttttaagttgtatttttttgtatgggtagtttagatatgattcgttttattatagggttatgaggacggtattagattggttgtgtgggtttgaaatatttaggtttatgaattaaaagaagtaggtgttaggtcgggcgcggtggtttacgtttgtaattttagtattttgggaagttaaggagggcggattacgagattaggagatggagattattttggttaacgtggtgaaatttcgtttttattaaaaaaaaaaaaaaaaaaatataaaaaattagacgggtatggtggtgggcgtttgtggttttagttattcggtaggttgaggtaggagaatggtatgaatttgggaggtggaggttgtagtaagtcgagatcgtgttattgtattttagtttgggcgatagagcgagatttcgttttaaaaaaaagaaaaaaaaaagtaggtgttagttaatacgtagttgattttattttagtgttttgtttgtttttttttttcgttggtttgtttagtaaatattttttatttttgtaatttatttaatggattttataaggatgattttgtaaagttttttttgaattataaatggagtttatagtttatgtgtgtttatatttttaagaggatgtttttatgaagttatgtttattttttagataaaaattttaaaaattttatatagatttttgttttatttttttgagatagcgttttattttgttatttaatttggagtatagtggcgggattttggtttattgtagttttaagttttttggtttaagaaatttttttattttagttttttaagtagttgggattataggtatgtattattat

SEQ ID NO: 1763 - DNA, 5324 bp, Artificial Sequence
  chemically treated genomic DNA (Homo sapiens)
gatttttttttacgaatgtattttttttttagggtattaatattaatattaatattttttgttaggaaaataatttagtgatattttttttatttgtatgtttttttatgggttttttgtaagaagaaaaatgtggttttttttgtttgattttataggtagttagattttatggttgtttttttttgttttttaaaaattgttgttattttgttgttttttaaggtgtattgattttatattgtttaaatatacgttttataattaatttgtatagttaatataattattatagaggttttgaggtgacgtatttttttagtttaggaagataataggataaaagattaaagtaaagataggtgtaagaaattataaaagtattatttgggaattgataaatgtttttattaaaatgaaatttttataatttatgtttttttgttgtagttttagttggtttttttatttgggttttttgatttttcgtaatattttttttttttaaagaatagatgtttttattttgtaattttttttgatttgtgaattatttttaatagtatttttagtatttagtatttattttaatagtaataatatgaattttataaaattattgttatttaattattttaatttataaaagtattaattttatatggtttaaattgtatattatgagaataatatttaaattttaaataatttttttataatatttaaatttttaaaattattttaatgttttttatgtagttgataataaaatatgttatttagtatttttaaaaaattatataatatattatgattgtattataaagtttatttaatataatttatattattaaaatagttggtaatttttttttatttataaatagaatatttgtttttaaaaatattattaaattatataaagaaaagtatttttttttaaatttttaatgataatatattatgttgaattaggaaaaaatgaatgttaacgtgtttatatattaaaatatggttaaaaaatagtttttataattttatgtttgaaattgttggaatttatttagaattttattggaattatttttattaaaatgttaatgatttttaataaataaagaaataaaatttatttgtaggtatttttttaaagtttaggatgagaaagggttttttggtttttggtttttttgtgatgtgttttatgtgagaggtaggttagtttttttaattgtaagagtgtttagtgtaattttatttatatatattttttaagaatgttatttattttttttttgaaaattagttattttaaatttatagagataaatgaagtagtttttttattggtttataatttttttttttgaaattggtgttttaagtttgttttttgtttttttttaagtttgttataattataattgagtaaacgttagttgttgatggttgtttttgagttttattaaagagattttgaaaattttttaagtgtgtgattaaatttaaattttagttaaggaattttaatttcgtttagatttttatttatgggaattaaagaaaacgttagaataataaaataaggataagaaaaaagttattttatagtttaaatggtaatttattttgttaattaaagtttattgaatggttgttatgtttatagatgttttttggtttagaaaggaaaaaatttgttaaaaaaagtaattatttaatttttaaatatattatagtttttgatgaataagagttgtatgtattagattggtttttgtataagaaagtttgagttcgagataaggatttgggggatggggatttatttgggagatgtttttagaaagtagtgagggattaaggaagttgagataggaaaagagttataaataaattattgaggttaatgttaggagtaattgtgggttgttttgggttatttgaagaagggtgtagaatttttttagaatttttttattgagttagtatttttgtgtttgttataatttattattgttgagtaaggaaaagagtgggaaattgtattggtagataggaagatgttgtagtagttttaagttgtgaagggtagatggaaaaagaaaagttaatattttatggaagagtatatgtggtgttttgtagaaagaaatattgtgatggttgaagggatgatttttataaatttttatttacgtttagagtttagtttaatgtaagtttttgttaatttttattgttttattttcgtaggtttatttttttttgtattttaattttagaaattaagaggaaagatttagagataaagatttttgttataatgttttatatttgatttttatatttttttattatatgtttgaaaaagaaagttgttatattttttagttttttagtatttttatttttgaatatagattagatggtttttagggtaatttttaggtttagaattagttacgatttgtatttttttaaatatgtttatttattagtgttgtttttagtattttttttttttaagttatgtgtgtatagaattatgtgtatatggaaatagagtgggtttagaaggttattgtagattattgtttgtattcgtagaatttttttttttgatttgttaaatgtttgaggttttattatattgtattatttgagttaaagtatatttttagaaagtttgtgtaaaatatttaatatataaataaatagggagttgtagatattatagttatagaaattttaaatttgagtttaggagtagtggtttatgtttgtaattttagtattttgggaggttgggatgggtggattgtttgaggttagaagtttaagattagtttggttaatatagtgaaattttatttttaaaaataaaaataaaaataaaaataaaaataagaaataaattttaaatgtgattataaataaaagttttttaattagattattattagatggataaattgggttcgaagtggtaaaatttaagtattggtaaatgatgattagaatataattagtaatatatttgataatgttattgtaaaaaataatgaggatgtgtgtgtatgggggttttttattgtagttatttttttggatgaagaaaataagttatttttagattagtttgtagtttttttgatgttttaaagttaagttttttaatgattagtttttgtgatgtaaaagtaaatattgaattgatattattatttaagagtgaaatgttatttttttaaaaaattttttgtttttaaaatatttattttttttaatttataggaaaatttgtttttttatttgttttattagtatgttgattaataagtgaaggaaattttttagtttaaaaggtttaaagagagtggaataaattatttagtattattttttgtaaatacgtatttagttgaataattatgtagagaaagaggggttgttaattgttttttgtttttaaatattttaagttaggatattaggaaaagtaatagtgattttatcgtttttttaggtaaggtttttatttagtgtgtaggtaatttttaggattatttataaaaatttaagggaaatgtgataggtatagtatatagttttgatgatttttaagtttaattataatatggtatttgtatgttgtttatttttttgtattagatatataatttattatttagtaataaaattaagattttaatttgggttaggattttgaagattataattagtttaaatattttttattttggtgaggaaattgatatgtatagaaatttagttagttttttttatattataaggtagtcgtagagttaagattagaaattaggtttttgatttttaatgattttggttaattagataaaattttattatggtagatgattaaataaaggttaagtgttgtttttgtttatagtttttagtgagtagtagtggtatgttaaggataaggttatgaagtttttattttggtttaattgtttttggggtaattgtttagagtttagattaataaatgatgttttaaggaagaatatttttattattgatattgtatagaattatgggtatatggttattattggtttttgttgttgttgttgttgttgttttgtttttgttttgagataaagttttattttgttgtttaagttggagtgttatggtataattttggtttattgtaatttttattttttgggtttaagcgagttttttgttttagtttttttagtagttgggattataggtacgtattattttgtttggttaatttttttgtagttttagtagagatagagtttcgttacgttggttaggttggttttgaattattgttttaaaattttatataggtaatgtatgttaatgtggatgattgttagttattttgttattggtatgttatagatgaatagtaaattgataatgtttatttaaattttaatataatgtgttgagagtttaattgttgttgattattatatgatatttaggttagaagaattttgatgattgaatggaagtgggttttgagtatgtatttagattttattatatagttaatttttttagaggtgttaaattttagtttttggtttagaagttgtaagaatatttaaatttgagagaatatatatttgttttttataagtttattattttatgtattttaatattatgttaaatgtttttttgggattgaataaatgtaatttttttaatttggtttttgttgatttattggatgtttgttattttgaatataaaagtagaatttggtaagttatataatttaatttggtagattatttatttttagtaaatgaattgtgtttaatataaatttattttaaagtttatagaggtttagttttgtattaatggaaatgagaagttagttaagagtataagaagtatgttgattggttgatgtagggtaagtaggttatataaaaggtagttgtagaatatttgggaaggttaatgatagtatttgtttagagttaaattttcgtgttttttagatagtgtttttttattatgagtgggtgtttatttttaggaaataattttgggtgagtatttatttttattttaagtgggttttggtttttagaagtattaggtgtgagtattttaatttttgaatttaaggagtattgaaaattgttatttttatttttttgtttaataatttattttaaagaaaatttgtaatgagaattttaattatttatattattagttaattgtgttttttaaagtattattttttttttttgatttattaaatttgtaga

SEQ ID NO: 1764 - DNA, 5324 bp, Artificial Sequence
  chemically treated genomic DNA (Homo sapiens)
tttgtaaatttaataaattaagagggaaaaatagtgttttagaaaatatagttaattaatgatatgggtgattaaaatttttattgtaaattttttttagagtagattgttagataaaggaataaaggtgatagtttttaatgttttttaaatttagaaattaaaatgtttatatttgatatttttaaaagttaaaatttatttagaataaaggtaaatatttatttaaagttgttttttaaaaatgggtatttatttatggtgaaaaggtattgtttgagaagtacggaggtttgattttaggtagatgttattattgatttttttagatgttttatagttgttttttatgtagtttgtttattttgtattagttaattagtatgttttttgtatttttagttaattttttatttttattggtatagaattgaatttttgtaaattttagagtggatttatgttgggtatagtttatttgttaagagtgagtgatttgttaaattgagttgtatgatttgttaagttttgtttttatatttaaagtaataaatatttaatgaattaatagaggttaagttaaaaaaattatatttatttaattttaagaaaatatttggtatagtattaggatatataagatgatgagtttgtaaaaaataaatatgtatttttttaaatttgaatatttttatagtttttagattaaaaattgaaatttaatatttttagggaaattaattgtataataaagtttgggtatatgtttaaagtttatttttatttaattattagagtttttttgatttaaatattatgtaataattagtagtagttaagtttttaatatattgtattggaatttaaatgaatattattagtttattatttatttgtggtatattaatgatagggtagttagtagttatttatattagtatatattgtttatatagaattttaaaatagtagtttaagattagtttggttaacgtagcgaaattttatttttattaaaattataaaaaaattagttaggtaaggtggtgcgtgtttgtagttttagttattagggaggttgaggtaggagattcgtttgaatttaggaggtggaggttgtagtgagttaagattgtgttatggtattttagtttgggtaatagagtgagattttgttttaaaataaaaataaaataataataataataataataagaattaataatagttatgtgtttataattttatatagtgttagtgataaaaatatttttttttgaaatattatttattaatttaagttttaaataattgttttaagaataattaagttaggatagaagttttatggttttatttttagtatgttattgttatttattaagaattataggtagaaatagtatttagtttttatttaattatttattatgatggaattttgtttaattagttaaagttattggaagttagaaatttgatttttagttttggttttacgattattttgtaatatgagaaaaattgattgaatttttgtatatattaatttttttattaaaatagaaagtgtttaagttgattataatttttaagattttgatttaggttaaaattttgattttattattgaataataaattatatatttagtatagaaagataaataatatgtaaatgttatgttataattgaatttgaaaattattaaaattatatgttatatttgttatattttttttgagtttttatgaatgattttggaaattgtttatatattggatagggattttatttgagagagcggtggagttattgttgttttttttggtgttttggtttagagtgtttggaagtagagaatagttaatagtttttttttttttatatagttgtttaattgggtacgtgtttatagagaataatgttaaataatttattttattttttttaagttttttgagttgagaagttttttttatttattggttaatatattagtaaaataaataaggaaataaatttttttatgaattggaaaaaatagatattttagaaataaaaaattttttaaagaaatgatattttatttttaagtagtagtattaatttaatatttgtttttatattataagaattgattattgaaagatttgattttggggtattagagaaattgtaagttaatttaaaaataatttattttttttatttaggagagtaattatagtggaaggtttttatatatatatatttttattattttttgtaatagtattattaaatgtattattagttatattttggttattatttgttaatatttaaattttgttatttcgaatttaatttgtttatttgatgataatttaattaggaaatttttatttataattatatttagaatttattttttatttttatttttatttttatttttatttttagagatggggttttattatgttgattaggttggttttgaatttttggttttaagtaatttatttattttagttttttaaaatgttggaattataggtatgagttattgtttttaggtttagatttagaatttttatgattatagtatttatagttttttatttatttatatattgaatattttatatagattttttggaaatatattttaatttaaataatataatgtaatagaattttagatatttaatagattaagagaggagattttacgggtataggtaatgatttgtagtaattttttaaatttattttatttttatatgtatataattttgtgtatatatggtttagagaaggaagatgttggaggtaatattggtagatgagtatgtttaagaagatgtaaatcgtaattaattttgggtttaaaagttattttagaaattatttaatttatatttagaagtaaaaatattagaaagttaagagatatagtaatttttttttttagatatgtagtaaaagaatatgaaaattagatataaagtattataataaaaatttttgtttttaggtttttttttttgatttttaaggttagggtgtagaaaagagtgagtttgcgagggtagagtaatgagaattagtaggaatttgtattgagttaaattttgaacgtgaataggagtttataaagattatttttttagttattataatatttttttttataaagtattatatgtgtttttttataagatgttaatttttttttttttatttattttttatagtttaaaattgttgtaatatttttttgtttgttaatgtaattttttatttttttttttatttaatagtggtagattgtggtagatatagaaatgttgatttagtaggggaattttgaaaggattttgtatttttttttaaatagtttagagtaatttatagttgtttttgatattgattttaataatttatttatggttttttttttgttttaatttttttagttttttattattttttgggaatattttttagataaatttttattttttaaatttttatttcgggtttagatttttttatgtagaagttaatttaatatatatagtttttgtttattaggagttataatatatttaggaattgaataattattttttttaatagatttttttttttttaagttaagaagtatttgtaaatatagtagttatttaataaattttagttgataagataaattgttatttgggttgtgaagtagttttttttttgtttttgttttgttgttttaacgttttttttgatttttatagatgggagtttgaacggaattaaaattttttagttaggatttaaatttagttatatatttaggaggtttttaaagtttttttgataaaatttagaaatagttattaataattaacgtttgtttagttgtaattatggtaggtttgagaaaaagtagaaaataaatttagggtattaattttaagggaagaaattatggattagtgaaaggattattttatttatttttgtggatttaggatgattggtttttaagggaaaaataaatgatatttttggaagatgtatgtagataaggttatattaaatatttttatagttaaggaaattggtttgttttttatatggaatatattataaaggaattaggaattaggagatttttttttattttgggttttggagaaatgtttatagataaattttatttttttatttattaaaaattattaatattttaataaaaataattttaatgagattttaaataagttttagtaattttagatatgaggttatgaaaattattttttggttatattttggtatataaatacgttaatatttatttttttttagtttaatatgatatattattattgaaaatttgaaaagaaatgtttttttttatataatttaatagtatttttaaaagtaagtgttttatttgtaaataagaagaggttattaattattttaatagtataaattatattaaataaattttataatataattataatgtattatataattttttaaaagtattaagtagtatattttattattaattatataaaaaatattaaaatgattttaaaagtttaggtattataaaaaaattatttaaagtttaggtattatttttataatatatagtttgaattatatgaaattgatgtttttgtaggttggaatggttaaatagtaataattttatagaatttatattattattattaaagtaaatattaaatattaaaaatattattaaaggtagtttataagttagaaaaaattgtaaaatagaaatatttgttttttaaaagggaagggtgttgcgggaagttagggaatttaaatggagggattagttggagttgtagtagaggaatataaattgtgaagattttattttaataaggatatttattagtttttaaataatatttttataattttttatatttgtttttattttaattttttattttgttatttttttaagttgaggagatacgttattttaggatttttgtgataattgtgttaattgtataaattgattgtaaaacgtgtgtttgaataatatgaaattagtgtattttgaaaaataatagaataatagtaatttttaaaaaataagggaagataattataaggtttgattatttgtggggttaggtaaaaagagttatatttttttttttgtagagagtttataaagggatatgtaagtagggaagatattattaaattatttttttagtaaggaatattaatattagtattaatattttgggaaaggaatgtattcgtggggggagatt

SEQ ID NO: 1765 - DNA, 8166 bp, Artificial Sequence
  chemically treated genomic DNA (Homo sapiens)
tgttttgattttttatagtgttgggattataggtgttagttatcgtgttcggtttttgtttttttatattattatatagaggaaattatgttttcgttggttgtttaattgttttgttttttggatattgtgttttattaagtatgtttttgattttttaagaattaggttttttggttgtttttttgatttttttggttattataaaaattatgattgttttttaatatttttggttttatatagtagagtgacgttatttggtttgtatttttttacggatttattattttcgttgttgttagagttaagtttcgtgattattttttttggtattagttttggttggtattagggagttattattgagttgtttagtgatgttggtgtttttttttttagtatatttttgttggttttggtggttggtgcgtttgttttttggttttttatggaatatgattgtttagtgggtttagtagagttatataatatatttattttattatgtaaatatttgtgagttttttggtttttttttcggttatttgttatggtaatttaggtatttgaattttgtttagtgtgagttatcgttttttttaggtttttagaagttttagtaggagtgagtttgtattatttttttgtgtttttgatattacgttgaagtttgtagttttagagagtgtttttaagttaataaatttttttttgttttattttatgttttagtttttttgatagagtagttttagaatttagttttttgggtatgttttttttttatttttattagtgtgtgttggtgttttgtatttgtagtattttcgtgggtatagtttttttagatttttgttaggtttagtatgtttttggttgggttatgtggtagtttagtttagattataggtttggtatttaggagagaaggtgggagtagtttttgaagagagtaattgttgttttgtgggggaaagttttgtttattgtttttttgtgttgggagaaattttaatttttgatggtgtggagtaggatgtgtttaaaggattagaagttttgagaaataaatttttggaggtatttatttagatagtttttaaatgaggttaggtatataaaataggtatataaaatatttgtatgtatatatgtgtgtatatgtgtatatgataaattatatgtataatatatatgtacgtatatataataaattatatatacgtatatatgtatatatatatatatatgtatgttttttttaggtaggttttgatattggtataatagagttgttttttttgagtgtttgattaagtttttgttatttaatagggttttttagagaaaaaattgtttattcggggagttttgttttgagtggaaagtgatatattgtgtagtttgattttgttcggttattggcggagggttgttttatgaagagtgtgttttgggttttagtattggggttgagtttgaaggtattgagggttggaggttgttggttaattgtgttttttatatttttgttgtacgggggtttaagtggcgtattttttagtttgttatagttaataattgtattattttaaagtagtttttatttgattatttgttttatagaaaaaggtatataaaatttaagaaaataatataaaaataaaataaaatttattttatttgagtttagaggattgtatttttttattttgtttgagttgtttttttttttgtttataaaatagtattaatttttgttattttttttttataaagtatagttattttgggtaattagttttaatttatttttatcgtattttatatttaaattttgttaaaatttttgtttattttatatttttaacgaaataagtttttttgttgatatagtatgaaaagatatttttgttatttgttaatttgtgattattgggtgtatattagaatatatatttattgattagttttttaaagtgataagttagtttggtgtttttttacgtatttggtgtttttttgtagtcggatttttaaaggtattttaatttatgtatgttattattttgtgtatttggttatgtttagatggtatttattcgggtagtagttttgttttaagaaggatggagtatttaatatgggttaaaagggttgtgatataaatattttagaatgtatgaaaaaggaagaaagtaattagtatgttattagtagttaattaaaatatagttagcgattttgttttaagatatttaggttggttattggattaaaatttaaggttggataaagagaatttttttgtaatgagtttttgatttgaatttaattttattttaaataggtatttaagaaattagtttttttgttatataaatatacgttattttaagtatttttagaatttaaagaaaaataaataaatgtgagttatttggaaagaagtagttatttaatatttgtaagtaaatatgtgtggaggatttataatattagtgagagaataaataatgtgggaaatttattgaattattataggtttttggaaaaatacggagtaatttaaattaaaaaaatttagttcgttaagtatttttgtttattttaagataatatgtttaaatttagaattatattttttttgtatagttggtatttaaatgtttggttagagaaaatttgtagtaatttttaaatttttattgatgtgtagaagagttttttttttttgttatagttaagttattttttttttaataaattttatttaaatattttgaatagtagatttagtttatgttttagttagttttgtttattttatatttattggatgtttggaagtatttaatcgagtacgttttttttttatttatatgttttttaaattatttatttattgtaaattttttattagaaggggtttattttttttttttgtttttagtgatttttattgggtgttagggaaggtttttaggttatagtttgagattttttttgtggaagatcgtgtttagcgttaggttttttgttagattttgtttggaaagtgttttgttttattttttgtagagcggtgtattagagagaaaagagagggtataaaatttaaaaagtttggaaattttttttaaatattttatgtatatttgtgaaaaaatagagtagagtttatttgtggcgattgttgaaaattagagaaataaaaaaagattttaatagaaaattaattttatttaaatgttggaggtagttgttttgtttggagttttaattttatgttggtggatgttaattttgtaatattatatagttgtttttttttgggtataaaggtagaaggggggtttttttttgtgttttttagtgtaaagtgattttgattagaaaggtttaaggttttagttttaagtatttgatatttttatttgaatttatttttttttttaaaggggaaaaaaaaaggtttagttttttaggaaaagaatttttttacgtaattttgaaattgatttttagatttatttttttttaattaatagaaaaaaatttgattgtagtttaatatttatttgtttttagtgtaggattaatttaatttttggttttaagagtacgagatttagatattattttaggaattagaaattattggtaataagttgaggagaattgatatgaatttttgttttatttaattttttttggtttattaagatttggtttaatatttttgatttagtttttttagtttttatagaataggttagtgatattttttataaatataaatatttaaatgaattttttttatttttttttgaatcggttttttaagggttttagttttaaatttgtacggtattttttttattaaagttgtgtgtgatttttgttaaatttttgtattttttttagtaaaattgtttaatatttaatatgtgtttgaaattataatatatatatttgataattaaagatttgtaataaaatttttataggataaatttattgtttttttcgtgaaagtttggttgaagaattgtgataattttaaatgataagaggaaggttttttttttttaagaatattgttaggaggagattttatggtttagttatacgtttgggtgatgtttaatttgagtttgcgttcgtgtttttatcgtagttttgtagagtgatatagataaaatatgtttttgatggagggtaaagttattatgtaatcgattgtaaattaatacgaaaataagtttttttttgttgtgttttttttttaattaatttgttggaattaattggttgtttgtgcgttggattttatttttattgtgattttaattttggattggtttttttttattattaatgtttttattatttattttattgtgggaagttagtgaatagagtagattggttttgaatttggttaatattttaaaatgatggatcggttttattttatggagaaggtgatggtagattttaaatttttttagttgtagaatatattgtgttttaattaatttttgtttgattttgatggaaagttgtagtgaaaattaggaaatttaggttttattggggtgtggtttttgttgtagagatataattcgggatttgtatgtatttttagcgttgggttttagtttttagcgttttatttgatgtagaggggatattttttttttacgtatattatttttattgattttaaataattatttgatagtttgaatgattttattatatttttagattggttttttttgggtatttaatttgtttatgaagtgttgaatttcggaggatttgttagtatttaggggattttagttcgatttagtattgttgatgttgttatgtgaatttgttttatgacggttttgatggttttgggattagttattaaatatatttggtgttttgtttattttggtaagttggggattttttttttattttttttttaaaattttaggatgaattatttattattttttagaatttgggttttttttattttcgtatttgtatagtattaaggtgagtattatagaattttataaagtttttagttagtatgtttttgaattgataaagagatatttttattggaattataattgtaagggtaggtgtatgtgtgtttatagatataagagaaaaatgtaattaaattttattattaagggtaaaatttattaattttaaatgaggtttatttatatttttattttttttttatttaattttaaatattatttgtatgtattagtttgttttgtgttagtggagtagatttttaaaattacgtaaaattatttttattaaaagtagataagataggggtatgtgtattttatgtttgattattgatttttattaaggtatttaatttgtggtggagattttaaagaatttatttatttcggttaaaaattaggaaattataatagtattgatgttagtggtttgtgtattagtgattttttacgtggtttttaaatttaaaatttaaataagataatttttttttttagtgattttttttttttttttgtgtagtattgttttgggtaagtgaaaggttatatatgttttttttttattgttgttttggattttagataaagacggggcggtttacgtagattttaattttttatggttaaaattttaaggtatttttttttattttgcgagtttgtttagtttaagtggtatatgagtataagtttgagatgaatacgttaagtttttgtgtagtgttaatatttttttagaattggtgaatttaagtagttaaattatagtgtgaaattttacgggaatgaaagagggtttttgattttaattttttattttagttttaagaaagtatattttatttggtgggaaaaaaaaaattttggaaatatagttatgtttattgtgaaatttttagtttagggtaagtatggatagggatatttttttttttagtaattttgatgttattgataggttatgttgttaatagttttatatatatatataaaaataataatggtttttgtagtgttaattatcgtagtttaaatttacgtttttgtgtttagtatttttttttttatttgataagtattatttattatattagatatttttaatgtttgtattttttttaaaattaaaaatatttaatagttcgtttttttttatttaaaattgtgaattaattaggattatttacgaagagaagaattttgtaaattgttttatttttgtagtagaagaggaagttagggttattttttttggttatggtttttcgttttttttatgcggtattatgggttttttattttttaggtagattggttaattagtgtagtttaaaatattaattaatttttttatatagatgatgataatttagtgtgaatttgagtttttatttatatttgggtatgatttttaaaaagttttttatgaaggataaatttatgttaggatataatttgttattgttaattttagaaataagtatttgtgtataatattgtagtagagattataaagattttttttaattagtatttttaggaatttttaatttgttattattatgtaaatagaaatgttagaagatttttttttatttgttggttgtgatattaaatatagtttatgggtttagagtgtttatgattcgatatagcgttttttatagttttaaattcgggttgttttttagtaatttttggggtttggacgatgtatatatacgaatgattagattagttttgttgttttttttggatgttagtttttggaaagaaattagtttttcgttgaggtataattttttttgttttttgttttagaattggagagttggtttttggtttggtgtaataggtttgttttttggtcgttttgtattttttttttttatatgagttgttgtttgtttattaaaagttttttaaaggagtaaagatagtttttggtcggttgttttttagtttattgtttttattagtatagagtagggatttttttaagtagaaggttcgatatgagaatgggggtgtcggtattttatagtagtaagtaggtattttaagaagtgtggtcgatgtttagtatggttttgtttttgttttcgagaatgagaaatttaaagaaaggaaaaaagggagaaaacgatagtgttttattgttttatatttatttaggagaagaaaggatagaggtaaagaaaagtaatatttaaaatgtagattattttatagatgttattggatttgatttttagtgatgtagattttagggaatttgttttattttttttataaaattgagttatattttgtaatagtatggacgggaaatttgggagtagtaagttaggagaggaggtgattttgttatagcgggatgtagtgtgtgtttgtgtgatggttttttagtgattaggaggattaattagagttttgtaatttattttttttaaagagtttttaaggatttaattttttgatttcggaggattttatgtttgttttttgtaaaaaaggagttgggtaaagagttttttgtagggtcgtttttaattaaggttatttatgggttaattgttataaattttttttttttatttttgttttagtttttattgttgtttatttttttttgggatttgggattttttttaattgtgtagtaagagggagggaattttttttaggaaaatatacgatagtggaatttttgagttagaataggagttttaaaattgtggttatgttagatttagaggttgttttttagtatttagaaagtttaaggtttttagggaaattttataaatttttagttagttgtagttatagatattattaagatgtatgaaagtgtaagaatatgtataaagtgtttttttttatggagaaataatgttatttttattttttcgttttttagagtagaagatattgcgttgtgtatggtttaggtttaggatgaatgatagggtagtatgatttgtatttagtttgtaagttttattgaaagaagttggttttagtaggtaggagagatgtagattgttaaacggtagagggagttgttatttatttaattattattttttttgatagt

SEQ ID NO: 1766 - DNA, 8166 bp, Artificial Sequence
  chemically treated genomic DNA (Homo sapiens)
gttgttaagagagatgatggttagatagatggtagttttttttgtcgtttggtaatttatattttttttatttattgaagttagttttttttagtagggtttgtaagttgaatgtaagttatattgttttgttatttattttaaatttaggttatatatagcgtagtattttttgttttgggaaacgggaaaatgggagtgatattgtttttttataggagaaagtattttgtgtatgtttttgtatttttatgtattttggtgatatttatggttatagttggttggaaatttgtgaaatttttttggaaattttgagttttttggatattgagaggtagtttttaggtttggtatggttatagttttgaagtttttgttttagtttaagaattttattatcgtgtgtttttttgaaaggagtttttttttttttgttgtataattggagaaaattttagattttagaaggaaataaataatagtgggaattgagataaaagtgggaggagaggatttgtagtaattggtttatgaatgattttgattgagggcggttttgtaagaggttttttgtttaattttttttttataaaagatagatatgagatttttcggggttagagggttgggtttttgagaattttttggagagaatgaattgtagggttttgattggtttttttggttattggagagttattatataaatatatattgtatttcgttgtgatagggttatttttttttttggtttgttgtttttaggtttttcgtttatattgttgtaagatgtggtttagttttgtgggagaaatgagataagttttttagggtttgtattattgaggattaagtttaatagtatttgtgaaataatttatattttgggtgttatttttttttgtttttgttttttttttttttgaatgaatataagataataggatattatcgttttttttttttttttttttttttaaattttttattttcgggggtaggggtaagattatgttgggtatcggttatattttttgaggtatttgtttgttgttatgagatgtcgatatttttatttttatgtcgggttttttatttgggaaagtttttgttttgtgttgatggaagtaataggttggggagtaatcggttaaggattgtttttgtttttttgggaggtttttggtgaatagataatagtttatgtaaaagagaggagtgtaaagcggttagaaagtaggtttgttgtattaggttaagagttagttttttagttttgaagtagggagtaagaggagttatgttttaacggagggttaatttttttttaggggttgatatttaaggagagtagtaaaattaatttggttattcgtgtatatgtatcgtttaaattttagaagttgttgagaagtagttcgaatttgaggttgtaggaggcgttgtgtcgggttataggtattttgggtttatgagttgtatttaatgttataattagtaggtgaaaaggggttttttaatatttttatttatataatagtaataaattaaaaatttttggaagtattaattaaaaaaaatttttataatttttattatagtattatatataggtatttatttttgaagttaatagtaataaattatgttttggtatggatttattttttatggggaattttttaggagttatgtttaagtatgaatgagggtttaaatttatattgaattattattatttgtatggaaagattaattggtattttgggttgtattgattggttaatttgtttagggaatggaaaatttataatatcgtatggaggagacggaaaattatggttagggagaatgattttaatttttttttttgttgtaaaggtgaggtagtttgtaagattttttttttcgtgggtgattttaattagtttataattttgaataggaaagaacggattgttaaatatttttaattttaagaaggatataaatattaagaatatttaatatggtaaataatatttgttaaatgaaaaagagggtgttaaatataagggcgtaggtttaaattacggtaattaatattgtagaagttattattatttttatatatatatataaaattgttagtagtatggtttattaataatattagagttgttaaaagaaagaatatttttatttatgtttgttttaagttgagaattttataataaatatagttatgtttttaggatttttttttttttattaaataaaatgtatttttttggagttggggtaggaggttgaagttaagggtttttttttattttcgtggggttttatattatggtttaattgtttaaatttattaattttggaaaaatattagtattgtataggggtttgacgtgtttattttagatttgtatttatgtgttatttgaattagataaattcgtaaggtaaagaaaggtgttttagaattttagttataaaaagttaaaatttacgtagatcgtttcgtttttgtttaaaatttaaaataatagtagaaaaaagatatatgtggttttttatttatttagggtagtgttatatagagaaaaagaaggaattattgaggggaaaaattgttttatttaagttttagatttgagggttacgtaaaaggttattgatatataaattattgatattaatgttattgtaattttttagtttttggtcgaaataagtagattttttaaagtttttattataaattaaatgttttaatggaaattagtgattagatatgaagtgtatatatttttattttatttatttttaatggaaataattttgcgtaattttaaagatttattttattagtatagggtaagttggtatatataaatagtatttgaagttaaataagaaaaaagtgggaatataagtaaattttatttaaagttaatgaattttatttttgataatagaatttaattatattttttttttgtatttgtagatatatatgtatttgtttttataattgtggttttaataaaagtgtttttttattaatttaagagtatgttaattgagagttttatggaattttgtagtatttattttggtgttgtataagtgcgaagatgaaagagatttaaattttaaggaatgatgaataatttattttggaattttaaaaagaaaatgaaaaaaaaatttttagtttgttagagtaaatagaatattaggtgtgtttagtggttaattttaagattattaaaatcgttatagaataaatttatataataatattaatagtgttgagtcgggttgaaattttttgaatgttggtaggtttttcgaagtttaatattttatgaataaattagatgtttagaagaagttagtttggaagtgtaatgagattatttaaattgttaagtaattatttaggattagtgagagtggtatgcgtaaaggaaaggtattttttttgtattaaataaagcgttgaaaattaggatttaacgttaaagatgtatgtaggtttcgggttgtgtttttgtagtagaaattatattttagtgagatttggattttttaatttttattatagttttttattagaattaaataaaagttggttaaaatataatgtgttttatagttaggagaatttagagtttgttattattttttttatagaatggagtcgatttattattttgaagtattgattagatttagggttagtttattttgtttattgattttttatagtgaaatgaatgatagaaatattagtaataaaaaaggattaatttagagttggaattataataaaaatagaatttagcgtataagtaattaattagttttagtaagttaattaaagaaggaatatagtaaagagaaatttgttttcgtgttagtttataatcggttgtatggtggttttattttttattaggagtatgttttgtttgtgttattttgtaaagttgcgatgagaatacggacgtaagtttaagttagatattatttaagcgtgtggttagattatgaagtttttttttgatagtatttttaaaaaagaaaaattttttttttattatttgaagttattataattttttagttaaatttttacgggaaaggtaatgaatttattttgtgagagttttattgtaaatttttagttgttaagtatatatgttgtaattttaagtatatattaaatattagatagttttgttggaaagggtataaaggtttagtagagattatatatagttttaatggagaagatgtcgtgtaagtttaagattagagtttttagggaatcggtttagagagaagtaaggaggatttatttagatatttgtatttatgaaaaatgttattaatttgttttgtagaggttggaggaattgagttagaaatattaagttaaattttggtaagttagaaaaaattaggtaaaataagaatttatgttagttttttttaatttgttgttaataatttttgatttttgaaataatgtttgaatttcgtatttttaaaattaaaaattaagttagttttgtattagagataggtaagtgttgagttgtaattaagtttttttttattgattaaggaaaagtaaatttaaagattagttttaggattgcgtagagaggttttttttttgaaaaattagattttttttttttttttttgaaaaaaaaagtagatttagatggaaatgttaggtatttggagttgaaattttgggtttttttgattagaattattttgtattgaaaaatataaaagaaaattttttttttatttttgtatttaaaagaaggtaattgtataatgttatagaattagtatttattagtatgggattaaaattttaaataaagtagttgtttttaatatttaaatgaagttggttttttattaaagtttttttttgtttttttggtttttaatagtcgttatagataggttttattttatttttttataggtatgtatgaagtatttaaagaaaatttttaaattttttaggttttatgtttttttttttttttttgatgtatcgttttgtaggagataggatagggtattttttaggtaaaatttaataagggatttagcgttagatacgattttttataagggaaattttaaattgtggtttggaaattttttttaatatttagtgagggttattggaggtagaggggggagataaattttttttgataaaaaatttgtagtaagtaaatagtttaaaaggtatgtgaataagaggaaaacgtgttcggttagatgtttttaagtatttagtagatgtggaatgagtaaaattggttaaggtataagttaaatttattatttaaaatgtttaaatggaatttattaagaaagaagtaatttgattgtagtaggaaaaaaaaatttttttgtatattaatgggaatttaaaaattattgtaaattttttttgattagatatttaaatgttaattgtataaaagaaatataattttgggtttaagtatgttgttttaaaatggataagagtgtttggcgagttaaatttttttagtttaaattatttcgtgtttttttaaaaatttgtgataatttagtaggttttttatattgtttatttttttattggtattatgaattttttatatatatttatttatagatgttaaatgattgtttttttttaaatgatttatatttatttgtttttttttggattttaggagtgtttagaatggcgtatatttatataatagaaaagttagttttttgggtgtttatttaaaataaaattaagtttaaattaaagatttattatagaaggattttttttgtttagttttaggttttagtttagtagttaatttaaatgttttgaagtaaaatcgttggttgtgttttaattaattgttggtggtatattaattgtttttttttttttttatgtattttaggatatttatattatagtttttttgatttatgttggatgttttattttttttgagataggattgttgttcggataaatgttatttgggtataattagatatataagatggtggtatatatgaattagaatgtttttgagaattcggttgtaagggaatattaggtgcgtggggagatattaggttggtttattattttgggaagttggttagtgagtgtgtgttttggtgtatatttagtggttatagattgataaatgataaaaatgtttttttatgttgtgttagtaggaggatttatttcgttgaaagtgtgaggtgagtaaagattttgataagatttagatgtggggtacggtgggggtgggttggagttagttatttaagataattgtgttttataaaaaaaaaatggtagaagttgatgttgttttataggtaagaggaaagatagtttaaataaaataaaaaaatatagttttttaaatttaagtagaatgggttttattttgtttttgtgttgtttttttaggttttgtatatttttttttgtggaatagatggttagatgggagttattttgaaatgatgtagttattggttatggtagattgggagatgcgttatttagattttcgtataatagagatgtgagaagtatagttggttaatagtttttagtttttagtgtttttaggtttagttttagtgttgaaatttaggatatattttttatggggtagtttttcgttaatgatcgggtaaggttaggttatatagtgtattattttttatttaaagtaggatttttcgaatgggtagttttttttttggagagttttgttgaatgataaggatttggttaggtatttaagggaagtagttttattatgttaatattaaggtttatttgggaaaaatatatatatatgtgtgtgtatatatatgtacgtatatataatttattatatatacgtatatatatattatatatatgatttattatatatatatgtatatatatatgtatatataggtattttatatatttattttatatatttagttttatttggaggttatttgggtagatgtttttaaagatttattttttaaaatttttgattttttagatatattttattttatattattaggagttaaaattttttttagtataggaagatagtagataggatttttttttataagataatagttgttttttttaaaagttgtttttatttttttttttgaatgttaggtttataatttgggttaagttgttatataatttagttagagatatgttgggtttgataggagtttaaagagattgtgtttacgaaggtgttgtaggtgtaaagtattagtatatattggtagggatgaggggagggtatatttagggggttggattttgaggttgttttattaaggaggttgggatataagatagaataagagagagtttgttgatttaggggtattttttagagttatagattttaacgtggtgttaagaatataaggggatggtgtaaatttatttttattgaagtttttagaagtttggaaaaaacgatggtttatattgagtaaggtttaaatgtttgaattattatggtagatggtcgaagaagggattaaaaggtttatagatgtttgtatggtggaatagatatattatgtgattttgttaggtttattggataattatgttttatggaaggttagaggatagacgtattagttattaaagttagtaggaatatattggagagggaggtattagtattattaagtagtttagtagtggttttttaatgttagttaaggttaatgttaggaaaggtgattacggaatttggttttgatagtaacggagatgatgggttcgtgaagaaatataagttaggtgacgttattttattgtgtgaagttagggatgttggggggtagttataatttttataatgattaagaagattagaggggtagttaaggggtttgatttttaaagagttaaggatatgtttaatagagtatagtatttaaggggtaaagtagttgggtagttaacgaaagtatgattttttttgtataataatataaaagagtaagggtcgggtacggtggttaatatttgtaattttagtattgtgggaggttaaggta

SEQ ID NO: 1767 - DNA, 5474 bp, Artificial Sequence
  chemically treated genomic DNA (Homo sapiens)
tttcgttttgtcgtttaggttggagtgtagtggcgtgattttagtttattgtaagtttcgtttttttggtttatattatttttttgttttagtttttcgagtagttgggattataggggtttattattatattcggttaattttttgtatttttagtggagatagggttttatcgtgttagttaggatggttttgattttttgattttgtgatttattcgtttcggttttttaaagtgttgggattataggtatgagttatcgcgtttggttttttttttttttttgagatagagttttgttttgtcgtttaggttggagtgtagtggtataatttcggtttattgtaagttttgtttttcgggtttatatgttcggtcgattattaatttttaaaatttttttagtggaggttgggcgtggtggtttacgtttataattttagtattttgggaggtcgaggtgggtagattgtttgaggttaggagttcgagattagtttgattaatatgggaaaattttatttttattaaaaatataaataaattagcgggtgtggtggtgggcgtttgtaattttaattatttgggaggttgaggtaggagaattttttgaatacgggaaacggaggttgtagtgagtcgagattatattattgtattttagtttgggtaatagagcgagattttgttttaaaaaataaaataaaataaaaaattttgttagtgattaggcgtggtggtttacgtttgtaattttagtattttgggaggtcgaggtgggtggattattttaggttaggagtttaagattagtttgattaatatggtgaaattttatttttgttaaaaaatataaaattagttgggtgcggtggtgtatgtttgtaattttagttatttaggaggttgaggtaggagaatcgtttgaatttaggaggtggaggttgtagtgagtcgagattatatcgttgtattttagtttgggtaataagagcgaaatttcgttttaaaaataaaaataaaaataaataaaaaaaattttgttaggtttagtttggtggtttagatttgtaattttagtattttgggaggtttaggcgggaagattgtttgagtttaggagtttgagattagtttggttaatatggtaaaattttgtcgttataaaaaaataaaaaaataataattggttagatatggtggtatgtatttgtagtttcggttatttaggaggttgaggaaggaggattattggagtttaggaggtcgaggttgcggtgagttatgattatattattgtattttggtttgggtgatagagtaagattttgttttaaaaaaaaaaattttgttagtttgattggtatgtgttaggtaattttttttttttttgagattgagtttcgtttttttcgtttaggttggtatgtaatggtatgttttcggtttattgtaatttttatttttttggtttaagtgatttttttgttttagttttttaagtagttgggattataggtgtttattattatgttcggttaattttgtatttttagtagatatggggttttattatgttggttaggttggttttgaatttttgaatttaggtggtttttttattatggttttttaaagtgttgggattataggcgtgatttatcgtgtttggttagttattattattattattattattattattgttattttaagatagagtttattttatttaggttggagtgtagtggtattattttagtttattgtaatttttgttttttaagcgatttttatgttttggttttttaaagtgttgggattatagtcgtgagttatcgtatttagtattgttagatattatttataggttttattttatttttattttttaagacggagtttggttttgttgtttaggttggagtgcggtggcgggattttggtttattgtaattttcgttttttaggattaagtaatttttttgttttagtttttcgagtagttgggattataggttttagttattatatttagttaatttttgtatttttagtatagatggggttttattatgttggttaggttggtttttaatttttgattttaggttatttatttattttggttttcgaaagtgttgggattataggtgttagttatagcgttcggtcggtataagttgtttttattaatttatttaggatttgtttagaaagttttttatttttttttattaaaaaaaatttattttttttttatttttttaaaattaaggtatgatttatataaagtgcgtaaattataagtgttttgtttgatggattttttttttattttttaaagttttattattttttggttattttaaaattatttttttttttatttattataaatatttaattgtttttttaagggaatttttttgaaaattttaagtgttttttgtttttttgtaattttagttattcgggaggttgaggtaggagaattaattgaatttgggagatggaggttgtagtgagtcgagattgcgttattatatttaagtttgggcgataagagtaaaattttgttttaaaaaataaataaataaataaaaaatagtttatatttattgagtttttattataagttgagtttttcgttaaaggtattagaaatagtaatttattgatttttcgtataatttttaagaggtatttttattatttgtgtttgatagatgtggaaatagaggtatagagatagttaagggatttgtttaaggttatatagttagtaagtagaggagttagtattggttaggcgtagtggtttacgtttataattttagtattttgggaggttataatgggtggattatttgaggttaggagttcgagatagcgtggttaatatggtgaaatttcgtttttattaaaaatataaaaattagttaggcgtggtggtatacgtttgtaattttagttattcgggaggttgaggtaggagaattatttgaattcgggaggcggaggttgtagtgagttaagatcgtgttattgtattttagtttgggtaatagaataagattttgttttagaaaaaaaaaaaaaaagttagaattgaaaggtaagtgatttggtattaggtatagtagtttaattttgaaatttttagtattttaggagattagggtgggaggagtgtttgaggttaggagttcgagattagtttgggtaatacggtaagatttttaattttacgaaaaaaaattttaaattatttaggtatggtggtatacgttggtagttttagttatttgggaggttgaggtaggaggattatttgagtttaggagtttaaggttgtagtgagtacgattgtgttattgtattttaatttgtattatagagtgaaatttttttaaaaaaattaaaataaaggtaagtgatttggtttttggttaaggtaagtaggttggaatggaaaagtagttatgggtcgggcgtagtggtttacgtttgtaattttagtattttgggagatcgaggcgggcggattacgaggttaggagatggagattattttggttaatatagtgaaatttcgtttttattaaaaatataaaaaattagttgggtatggtagtgggcgtttgtagttttagttattcgggaggttgaggtaggagaatggtatgaatttagaggcggagtttgtagtgagtcgagatcgtgttattgtattttagtttgggcgatagaacgagattttattttaagaaaaataaagaaaaaaaagaaaagtagttatgattattaaagattagttagatttagaggtttttttttttatttcggaacgtgtattttatagaatttttggttttttaggatattatatatattaaggttttgatattaatttataggtttagtatgggatttatatttttaaggatatggttatttgtatttttgagttgtttttgagtggttttaaattggatttttgtaggttttagattagtggggttggtaggataatttttgaagttagattagttattgggttttttaggaagaggtatttataattattattttgaattaaggtttgagttggaggttttttatttggttaagtgttagttggtgaattttaagagtattagagatatttgaaagtgatttagattttttatgggattatgggtggtttttttgtttatttttttaattgttttataataaaatgtgttatttttgtgattataaagagtatatgtttagcggttgggttgttaggtgtattttatttattggtattatattggtttttgttttataattatagtatttgttaaaatataaatttgtttaaagatttttttttgtgtatgtttttttttataatttttaaagtgtttaataaggtgtatatatttggtttttttttttttttttttttttttttgagacggagtttcgtttttgttgtttagattggagtgtaatggcgcgatttcggtttatcgtaattttcgtttcgcgggtttaagcgagttttttgttttagttttttgagtagttaggattataggtatgcgttattacgtttggttaattttgtatttttagtagagatggggtttttttatgttggttaggttggtttcgaattttcgattttaggtgatttattcgttttagttttttaaagtgttgggattataggcgtagagttatcgatttcggtttgttttttagtttttaatatattgtttcgcgtttttagtatagtagttgttttttgtaaattcggagcgaagttgattgtaaaattcgtcgggtttatcggtttgggcggtgtggattttaagttttaggaggtattgcggtcggtatatcgggaattacggcgtttgagaagggggtcgggtttttcggtttttttttttttagaagttcgcgggcggttcggaacgttgtttttattatggtcgcgggagtcgggacggcgggtttcgttttcggttcgggcgtcgtgcgtgatttagcggcgttatagtcgaggaagcggttcggtcgggagggcggggagggcgcgcggcgatcggatacgatggcgggaggaggcgggagtagcgacggtagcgggcgggtagttggtaggcgggcgtttcgtagtagcgggcgggttcggcgggggcgttacgagtcggggttggggggttcggcggagcgcggcgcgggggaggtacggttggaagaggtagttaatcgttgggtgtttaagttttatttttacgaggcgttgcgggtttttcggggtagtcggtacggggattttagatagattcgggatattatgtagggtgagggtcgggtcgggggaggggggttggagcgtcggggaagggggttcgggggatcgggagtcgggattgggggtcgtttagttaacgatgtttttttttttagt

SEQ ID NO: 1768 - DNA, 5474 bp, Artificial Sequence
  chemically treated genomic DNA (Homo sapiens)
gttgggagagaagatatcgttggttgggcgatttttagtttcgattttcggtttttcggattttttttttcggcgttttaatttttttttttcggttcggtttttattttgtatgatgtttcggatttgtttgaagttttcgtatcggttatttcgaaaggttcgtagcgtttcgtggaagtagaatttgagtatttagcgattgattgttttttttagtcgtgtttttttcgcgtcgcgtttcgtcgggttttttagtttcggttcgtggcgttttcgtcgggttcgttcgttattgcgggacgttcgtttgttagttgttcgttcgttgtcgtcgttattttcgttttttttcgttatcgtgttcgatcgtcgcgcgtttttttcgttttttcggtcgggtcgttttttcggttgtgacgtcgttgggttacgtacgacgttcgggtcggaagcggggttcgtcgtttcggttttcgcggttatgatagaaatagcgtttcgagtcgttcgcgggtttttgggagggaaaggatcggagggttcggttttttttttagacgtcgtagttttcgatgtgtcggtcgtaatgttttttggggtttgaagtttatatcgtttaggtcggtgaattcggcgggttttgtagttaatttcgtttcgaatttatagaaaatagttattatgttagggacgcggaatagtgtattagagattgaaaaataggtcgggatcggtggttttacgtttgtaattttagtattttgggaggttgaggcgggtggattatttgaggtcgggagttcgagattagtttgattaatatggagaaattttatttttattaaaaatataaaattagttagacgtggtggcgtatgtttgtaattttagttatttaggaggttgaggtaggagattcgtttgaattcgcgaggcggaggttgcggtgagtcgagatcgcgttattgtattttagtttgggtaataagagcgaaatttcgttttaaaaaaaagaaaagaaaaaaaagaaaattaaatatgtgtattttattaaatattttgaaaattgtggaagagagtatatatagaggaaagtttttaaataaatttgtattttaataaatattgtaattataaagtaaagattagtgtgatattaataaatagaatgtatttggtaatttagtcgttagatatatattttttgtaattataaaaataatatattttgttgtagaataattagaaaaataagtaaaaggattatttatagttttatagagggtttgagttatttttagatatttttgatatttttggaatttattaattggtatttgattaaatggagaatttttagtttagattttagtttaggatggtggttgtgggtgtttttttttgagaggtttagtaattggtttagttttaaagattgttttattagttttattagtttggaatttgtaaagatttagtttggggttatttaaagataatttagaagtgtaggtggttatgtttttgaggatgtgaattttatgttggatttgtgaattaatattaggattttaatatgtatagtattttggaaagttaaaagttttatgaggtatacgtttcgggatgagagaagaggtttttaggtttgattgatttttggtgattatagttgttttttttttttttttttgttttttttgagatggaatttcgttttgtcgtttaagttggagtgtagtggtacgatttcggtttattgtaagtttcgtttttgggtttatgttatttttttgttttagtttttcgagtggttgggattataggcgtttattattatgtttagttaattttttgtatttttagtagagacggggttttattgtgttagttaggatggtttttattttttgatttcgtgattcgttcgtttcggttttttaaagtgttgggattataggcgtgagttattgcgttcggtttatggttgtttttttattttagtttgtttgttttaattaggaattaaattatttgtttttattttagtttttttgagaaagttttattttgtaatgtaggttggagtgtagtggtataatcgtgtttattgtagttttgaatttttgggtttaagtgatttttttgttttaattttttaagtagttaagattattagcgtgtgttattatgtttgggtaatttgaaattttttttcgtagaattaggggttttgtcgtgttgtttaggttggtttcgaatttttggttttaagtattttttttattttggttttttaaagtgttggggattttagggttgagttattatgtttggtgttaaattatttgttttttaattttaattttttttttttttttttgagatagagttttgttttgttgtttaggttggagtgtagtggtacgattttggtttattgtaattttcgtttttcgggtttaagtgatttttttgttttagtttttcgagtagttgggattataggcgtgtgttattacgtttggttaatttttgtatttttagtagagacggggttttattatgttggttacgttgtttcgaatttttggttttaagtgatttatttattgtggttttttaaagtgttgagattataggcgtgagttattgcgtttggttagtgttaatttttttatttgttagttgtgtaattttgaataaattttttaattgtttttgtgtttttgtttttatatttgttaagtataaataatgaaggtattttttggaaattatacgaaaagttaatgagttgttatttttaatgtttttagcgaagggtttagtttgtggtaagggtttagtaagtgtaaattgttttttgtttgtttgtttgttttttgagatagagttttgtttttgtcgtttaggtttgagtgtaatggcgtaatttcggtttattgtaatttttattttttaggtttaattgatttttttgttttagtttttcgagtagttgggattataggaaagtaggaagtatttaaggtttttaaagaagtttttttaaagagatagttgggtatttgtggtagataaagaagagaatgattttgggataattagaggatgatgggattttgaaaaatgaggagaaaatttattaagtaggatatttatgatttgcgtattttatgtaagttatattttaattttgaaaaaataaaagaaaaatgagttttttttgatagaggagagtaggagattttttaggtaggttttggatgagttaataaaaatagtttatatcggtcgggcgttgtggttgatatttgtaattttagtattttcggaggttaaggtgggtggataatttgaggttaggagttggagattaatttggttaatatggtgaaattttatttgtattaaaaatataaaaattaattgggtgtggtagttgaagtttgtaattttagttattcgggaggttgaggtaggagaattgtttgattttgggaggcggaggttgtagtgagttaggatttcgttatcgtattttagtttgggtaatagagttagatttcgttttaaaaaataaagatgaaataaggtttgtaaataatgtttgataatgttgggtgcggtggtttacgattgtaattttagtattttgggaagttaagatatgagaatcgtttgggaggtagaggttgtagtgagttgagatggtattattatattttagtttggatagagtgagttttgttttaaaataataatagtaataataataatgataataataattggttaggtacggtgggttacgtttgtaattttagtattttaggaggttatggtgggaggattatttgagtttaggagtttaagattagtttggttaatatggtgaaattttatgtttattaaaaatataaaattaatcgggtatggtggtgggtatttgtaattttagttatttgggaggttgaggtaggagaattatttgaattaaggaggtggaggttgtagtgagtcgagaatatgttattgtatgttagtttgggcgaaaagagcgaaatttagttttaaaaaaaaaaaaaattgtttgatatatgttaattaagttagtaaggtttttttttttgagataagattttgttttgttatttaggttagagtgtagtggtgtgattatggtttatcgtagtttcgattttttgggttttagtgattttttttttttagttttttgagtagtcgggattataggtatatgttattatatttggttaattattatttttttatttttttgtagcgatagggttttgttatgttggttaggttggttttaaatttttgggtttaggtagttttttcgtttaggttttttaaagtgttgagattataggtttgagttattaagttgggtttagtaaggttttttttgtttgtttttgtttttgtttttgagacggagtttcgtttttgttgtttaggttggagtgtaacggtgtgatttcggtttattgtaatttttattttttgggtttaagcgatttttttgttttagttttttaagtagttgggattataggtatgtattatcgtatttagttaattttgtattttttagtagagatggggttttattatattggttaggttggttttgaatttttgatttgaggtgatttatttatttcggttttttaaagtgttgggattataggcgtgagttattacgtttggttattagtaaggttttttgttttgttttgttttttgaggtagagtttcgttttgttgtttaggttggagtgtaatggtgtgatttcggtttattgtaattttcgtttttcgtatttaagagatttttttgttttagttttttaagtagttgggattataggcgtttattattatattcgttaatttgtttgtgtttttagtagagatggggtttttttatgttggttaggttggtttcgaatttttgattttaggtaatttgtttatttcggttttttaaagtgttgggattataggcgtgagttattacgtttagtttttattagaaaggttttaaaagttaataatcggtcgggtatgtgaattcggggggtagagtttgtagtgagtcgagattgtgttattgtattttagtttgggcgataaagtaggattttgttttaaaaaaaaaaaaaaggttaagcgcggtggtttatgtttgtaattttagtattttgggaggtcgagacgggtggattataaggttaggagattaagattattttggttaatacggtgaaattttgtttttattaaaaatataaaaaattagtcgggtgtggtggtgggtttttgtagttttagttattcgggaggttgaggtaggagaatggtgtgaattagggaggcggagtttgtagtgagttgagattacgttattgtattttagtttgggcgatagagcgaga

SEQ ID NO: 1769 - DNA, 5416 bp, Artificial Sequence
  chemically treated genomic DNA (Homo sapiens)
cgttatatatttttattatttttttttttttagggggaaggggatttataaaattaggtatagaggatattttatttttttatgtggttttattttattatatagtatttttaaatgtattttgtgtttgatagagggtgtattagaataaatgttttttatatggtttagttggttagaaaaatatttagttggtgaaggagttgtttaaattttagtaaaatttttatgattatttattgtttagaagagattaattattttttttagtagatgtgtaaatttattagtgttagttggatttattttaagttttattttggtagggtttaaattaagaggtagtaaaaattgtttttgtttattaaggagttattagtgtaattttttaaatatttatgttatataatatgtatttttaaattattgggtttaattaatttttattatttatttataagttagatatgttatttttttttaaggtgtttgagagagaggaagattatttgttatagtttattttttaaatttttggtttatttatcgagacggtagggtttttagaggatatagtattatatttaaggtatgggaggggttaaataggttaaaattaattttatttgttgtggggtttaggggtgtggtggtgagaaagattagaggtagtaatttgatatatgtagaggcgtttttggatttattgtagtttttgtatttttaaattttggtattttatattttgttttaaggttttggtatggtagaaagaatttaggtttaggtgtgatagaaagaatataggattaagaatttagaattgtggattttagttttaggtttgttaataattatggtaggtaaatatgattagatgtttaatttttttagattttagtttatatttgtgtaaagtgaatatatttatagttttatttagtatttaaattataattttatgttttatttttatagaattttagattattttgagtttttgtttttagttatagataatttaattgttaattggtgtagtaatgataaattaatttggatgattgttttttttagttatttttagttttgtattttttgttgattttggataaaggaattattttttttagttttgaggtagtattttgggttagatattggattaaggagatagaagtgttatgatatttttttggaggttgattgtggtggttatgttgttttttttaaaatattttaaatgtaaatttagtaacgttaaagtagtttttaggaaatttagattatttttatattggaagatgttttttttatggatataaaaatatttaattatttatgtaattaagaggaatattttttttgtaataatttgggttagtaattttaaatttttgttaattttatttttttaatttttttttttttatttgtggttatagaggttttaaggatgtattttgtttggtatagaaaagtagaaggaaattagtatttttagagtatttttcgggattgattttaatttgtatttatagattatattatagaagggtgagaggtttgtttttgttttttttttatttttattatatgttttatatagtagttttgagtgggttgaggattttgttttgaaatttttttgaagtttatttttttagaagagattattagaaagtgtgataattttatgggtagagaggtggtttttgagtttagttaagagaagagttgataggagtaaggatatgggttttaattttataaggttattttatgttgttttgttttttgatgggagtttgatgttttattttaaaattgtgtgttaaggtttttaatgggaagtaggatatgggatgatttggatgaagtttgtgttattgtgtgaggggttaaaataatatttttgaatgtataggtattttttatttaatttttataatatatttgcgaggtagagttattatgtttattagaaaaggaaattgaggtttagagagttttaagtaatttgtttaatgtagtaaggaataaaatttaggtattttttgaattttaattttatttttttatggtacgatgtaattttttaaaatgtttgttttgatataaaagggttaatttttttttttttttttttttagttagatttagagttttattttgttatttaggttggagtgttgtggtacgattatagtttattgtaaatttaaatttttgggtttaattaatttttttattttaattttttatatagttgggattataggtgtatataattatgtttagttaagttaaaatttttttttttgtaaagatggaattatattatgttgtttaggtttgtttttgatttttggttttaagcgatttttttgttttagttttttaaagtgttgggattattagtagaagttattgtgtttagtggtttatttttttttttgtatgagcgaaagataattaaaaagtgtttagtatttgagaataaagagaaatggtagtagttagtgttttatgaaaattgagtattagtttttgaattttattttagtttaaagatatatttaattttatttagaagatagatataggtaagtttgaagttgagttaattttttttttgaatatgattttcggtaaatgagtggtaaaatttttttttttaataatattttgaaggaattgggagggtttaatttgattttattttgaatgtgttattttaaaattggttgtttgttttagtggttggtgtattagagttagtttatatagattttggttatggggagttttggtttttggagatttttttttatttcggtatttagtgattttgtagtggtagtttgaaattgattttagtgagtatatttatattatagaaattagttaattatataaagtatttttattttatttatttttttttattggagaggtgataattaaatatttatttttatagttttaattattatttttaattatagatatttgttaattaaagttgatagtatttttagattaggttggtttttttaggattgtgattttgtaatatgatattagaatgattgaaaattggtataaggatataatgtgtaaaatattttagattattaatttattttgagtaagtgtgttttatattttttagggttttttgaaaatttgaaagagaatttttgtaaattatttttagtatttttagaagttaagaataattatttatttgagaatgttgaatataataagagaaaaggggaagggaagataagtatattaaaatgtttttaaaaatatttttaatattttatgtaaaattttattgtaggtaattgtttgtattaaaaaaaaaagtggattataagttaatatgttaaaggaatagggaattttaatggatgtattgatattaggaaatgtgtgggaatatattgatttggttaaatttttagaattttttaaggttatttttttgggttgttatggtttttttttaaaaatatagatatatataaaaatatagttttatatatgtttggttggggtgtaaaatggtataattattttgaaaaaattttttggtagtgtttaatatttttaagtattttatttaagagtaataaaaattgtaggtttatataaagtagttttttttataagagtttttaaataaattagaaataatataaattttagtaataagatatttgtgatatattagaatattatttaatgatttaaaggaatagattattgatatatatagtaatatatttatatattgtgggatatttatacgttttggtaaatttatattttggattacgtaggaattaaaagaaatagattattgatgtagtgatttgggcgtattttaaaaataggaagtgtgagaaagaaatattatatagtgaatattttataatttcgtttatatgaaatttaagaataggtaaatttaatttatggtaatcgaaatgagaagagtgtttgtttttggtttaaggatggaaggattgatttaggaaaaagtttgtaggagttttttggagtgatggaaatgttttaattttttttttttttttttttttttttttttttttcgtttcgagacggagttttattttgtcgtttagattggagtgtagtggcgttatttgggtttattgtagttttcgttttttgggtttaagttatttttttgttttagtttttcgaggggttgggattataggtgttcgttattacgttcggttaattttttgtgtttttaatagagacggggtttcgttatgttggttaggttagtttcgaatttttgattttaggtgatttattcgttttggttttttaaagtgttgggattataggcgcgagttatcgcgtttagttaaaatgttttaattttttattggtggttatatagttgttaaaatttattaaattgtttatttacgatatattataagtttgtattaaatgtaaattagaattcgattgaaatttgtgtgtataaatataaatatatatttatttatatttttaatttaatttgaaggtttattgtaacgaatttcgtttcgttttgatttaagaatttcgtattttttttttattagttttttaaatatttgaattttatgtttttaagaggtggatttcggtttttttatagcgtaattattagtaggttattttcgtttagtttgtagattttttattattgatataaacgtttttttagggcgttttcgtttggattataggagaaagtttgggaggtaggtttaattttttaatttggcggggaattttttttttttttatatagtttgtagcgcgggggcggcggggtgatagttttcgtgtatgaattagttattttttaggtttcgtttcggcgggggtcggtcggacgttcgtttcgtataaagcgggtattcgggtcgtttggagtagaaagtcgcgtattttttttcgttaggcgttttttcggacgttttgtttagcgggtcgttcgattttttgtattatggatttcgttcgttttttggggttgtcgattttgttgttttttttgacggaggttgtattgggcgatgttgtttaggagttaataggtatttggtcgttttaggagtttttttttttaatcggcggagagggcgtagcgggttatggggtttcgtgtaggcgttttttaagtttcgttttttttaggtttttgtcgcgcgtttcgttggtaggggggattcgtttttaagtttgtattttttttgtagaggttttttcgttcggaaggggatagaatttttcgggatgttttttttttttaggagttacgtttgattatttttttttttttttgttttttttttgttttttttttagg

SEQ ID NO: 1770 - DNA, 5416 bp, Artificial Sequence
  chemically treated genomic DNA (Homo sapiens)
tttgaagaaggggtagaaggagagtaaaagagagggaaagtggttaggcgtagtttttaggaggaaagaatatttcggggagttttgttttttttcgagcggaggggtttttgtagagaaagtgtaaatttgggagcgagttttttttgttagcggagcgcgcggtagggatttggagaaagcgaggtttggagggcgtttatacggggttttatggttcgttgcgtttttttcgtcggttggggagagaagtttttggagcggttagatatttgttggtttttgagtagtatcgtttagtgtagttttcgttaggaaaagtagtagaatcgatagttttagggggcgagcggggtttatggtgtagggggtcgggcggttcgttgggtaaggcgttcgagaaagcgtttggcgggaggaggtgcgcggttttttgttttaggcggttcgggtgttcgttttatgcggggcgagcgttcggtcgattttcgtcggggcggagtttgaggggtggttgatttatgtacggggattgttatttcgtcgttttcgcgttgtaaattgtgtaagagggagaggaatttttcgttaagttgaaaagttgaatttgttttttaaatttttttttgtagtttagacggggacgttttgagggagcgtttgtgttagtaatgggaaatttgtaagttagacggaaatgatttgttagtgattgcgttgtaaagaagtcggaatttattttttgaaggtatgaagtttaggtatttgaaaggttggtggagagaaagtgcggagtttttgggttagagcggagcgggattcgttgtaatggatttttagattagattagaaatgtaaataagtgtatatttatatttatatatatagattttaatcgagttttaatttatatttaatataggtttataatatatcgtaggtggatagtttgataaattttgataattgtgtagttattaataaagaattagaatattttggttgggcgcggtagttcgcgtttgtaattttagtattttgggaggttaaggcgggtggattatttgaaattaggagttcgagattagtttggttaatatggcgaaatttcgtttttattaaaaatataaaaaattagtcgggcgtggtggcgggtatttgtagttttagtttttcgggaggttgaggtaggagaatggtttgaatttaggaggcggaggttgtagtgagtttagatggcgttattgtattttagtttgggcggtagagtggaatttcgtttcgaaacgaagaaaaagaagaagaagaagaaaaaaaaaagagttagaatatttttattattttagaaagtttttgtagatttttttttaaattaatttttttatttttaggttaggggtaaatattttttttatttcgattattatagattagatttgtttatttttgaattttatataaacggaattataaagtatttattgtgtagtattttttttttatattttttgtttttgagatacgtttaggttattgtattaatagtttgttttttttaatttttgcgtagtttaaggtatgaatttattaaaacgtatgaatattttataatgtataaatatgttgttgtgtgtattaatagtttgtttttttaaattattgagtaatattttaatatattataaatgttttattattggaatttgtgttgtttttagtttgtttgggggtttttatgaaaaaagttgttttgtgtggatttgtaatttttattatttttggataaaatatttagaaatgttagatattgttaaaggatttttttaagatgattgtattattttatattttaattaagtatgtatgaagttatgtttttgtatgtatttatgtttttggagaagaattatagtagtttagagagatagttttggggagttttgaagatttgattagattagtgtatttttatatattttttaatgttagtgtatttattaaagttttttgtttttttgatatattagtttgtgatttatttttttttttaatataaataattatttatagtgaaattttatataaaatattaaagatatttttgaagatattttaatatatttgttttttttttttttttttttttgttgtatttaatatttttaagtaaataattatttttgatttttgaggatattgggggtagtttatagaagtttttttttaagtttttaggaagttttgaaaagtataggatatatttgtttaaagtgggttaataatttgaggtattttgtatattatatttttgtgttagtttttagttattttgatgttatgttataaggttatagttttaggaaaattagtttgatttggaaatgttgttagttttgattagtagatgtttatgattaagaatgatagttgaaattataaggataaatgtttaattattatttttttagtagggaaaaataaatgggatggggatgttttgtatagttaattgatttttgtgatgtaaatgtgtttattaaggttaattttaagttgttattgtagaattattgaatgtcgaggtgggaaaagatttttaagagttagagttttttatggttaaaatttgtgtgagttggttttaatgtattaattattgagatagatagttagttttggaatgatatatttagagtaaagttagattagatttttttagtttttttaaaatattattaggggagggaattttattatttatttatcgagaattatatttaggagaaaagttgatttaattttaaatttatttatatttattttttgaataaaattaaatatatttttagattaaaataaaatttaaggattgatatttagtttttatggagtattgattattgttatttttttttgtttttaggtgttggatattttttgattgtttttcgtttatataaaaaaaaaaatgaattattggatataatggtttttgttagtaattttaatattttgggaggttgagataggaggatcgtttgaggttaggagttagagataaatttgggtaatatagtgtgattttatttttataaaaaaaaaaattttaatttagttgggtatggttgtgtatatttgtagttttagttatatgggaggttgagatggaaggattggttaagtttaggagtttgaatttgtagtgaattatggtcgtgttatagtattttagtttggatgatagagtgagattttgaatttgattaaaaagaaaaaaaaaaaaagattagtttttttgtattaagatagatattttgggaaattgtatcgtgttatggaaaaatagagttggaatttagaggatatttggattttattttttgttatattggataagttatttaaaattttttgagttttagtttttttttttaatagatataataattttatttcgtagatgtgttatgaggattaaatggaaaatgtttatgtatttaaagatattgttttagttttttatataatggtataaattttatttagattattttatattttattttttattgagagttttggtatataattttgagatggagtattaaatttttattaggaaatagagtaatatgaaatggttttatagaattaaagtttatgtttttgtttttgttagttttttttttaattaagtttagagattatttttttgtttatgaagttgttatattttttggtagttttttttagggaaatgagttttaaggggattttagagtagaatttttagtttatttagggttgttgtataaggtatgtagtggaaatgggaggggggtaaaaataggttttttatttttttgtggtgtggtttgtagatgtaggttggaattagtttcgagagatgttttagaaatgttggtttttttttatttttttatgttaaatagggtgtatttttaaaatttttatgattatagatggagaaaggagaattaaagaagtggaattggtagaagtttgagattattaatttaggttattataaaaaaagtattttttttaattgtataaataattgagtatttttatatttatgaaaaagatattttttaatataagggtaatttgaattttttggagattattttgacgttattgaatttatatttagaatattttggaaggagtaatatgattattataattagtttttaaagggatgttatagtatttttatttttttaatttagtgtttagtttaaaatgttgttttaaggttgaggaaagtaatttttttgtttaaagttaataggaagtgtaaggttagagataattgggaaaaatagttatttagattgatttgttattgttatattaattgatagttaaattgtttgtggttaaagataaaggtttaaaatagtttggagttttgtaaaaataaggtatggagttgtaatttgaatgttgaatggaattataagtatgtttattttatataagtgtgaattgagatttagaaaggttaagtatttggttatgtttatttgttatggttgttggtagatttgagattagaatttatagttttggatttttagttttatattttttttattatatttagatttaagttttttttattatattaagattttaaagtagaatatgaaatattagaatttaaaaatgtaaaagttgtagtgagtttaggagcgtttttgtatgtgttagattgttgtttttgattttttttattattatatttttggattttataataaatgaagttgattttgatttgtttagttttttttatgttttgagtatgatattgtattttttgagagttttgtcgtttcggtaggtgaattaagaatttaagaaatggattgtggtagatggttttttttttttttagatattttagagagaggtagtatgtttggtttatgagtgaatgatgagaattaattgagtttagtgatttggggatatatattatgtaatataggtatttaaggagttatattgataattttttaataaataaagatagtttttgttgttttttagtttaagttttgttaaaataaaatttgaaatgagtttagttggtattaatgagtttatatatttgttaagaaagatagttaattttttttgagtagtaaatggttatgagggttttgttaaagtttaagtaatttttttattaattaggtatttttttaattagttgggttatgtaagaaatatttattttaatgtattttttgttaggtatagagtgtatttgagagtgttatataataagatgaagttatatgaaaggatggggtattttttgtgtttaattttatgaatttttttttttttagaaagaaagagataatgagggtatataacg

SEQ ID NO: 1771 - DNA, 9848 bp, Artificial Sequence
  chemically treated genomic DNA (Homo sapiens)
  unsure 1454, 1460, 1565, 1622, 1705, 1736, 1743, 1861, 3392..3393: n is a or g or c or t
gtgtttggttagaaagtttttttttaatgttagttataatattttttgttttataatttgcgtatattttatagtttgttttgtgtcgtgtgtgtttaatatgttttaagtgtattcgtatataggaaaagttttaaaatggtatttaataaatgtttattttgtaaattttaggataatgttatttttaagtatttagatgtttttaaattaaattaattggaaaatttagattttagttaaggtttttaatttaatttaggattttgattatagagatgtattttgttttgataaaagttaaggttaatgttttaaatttttagagatgataatataatttttataatttagtaatttatttaatttcgtttagattattaatttttagttttgaataggttatttagtttttttaataattggtttttttatttgtaaaatagcgtaatttgtgttttatgtttttttttgtgttaaagatcgaattatttgtaggaattatttatttagttaggattagtatttttttttttttttattggagatggtttgtggtatttgtagtataattggttttgtttgttttagttttaattttgtttttttgtatgtgttatttttttttttttttgagatagagttttgtttttgttttttaggttggagtgtagtggcgcgattttggtttattgtaagttttattttttgggtttacgttatttttttgttttaggttttcgagtggttgggattataggcgtttattattacgttcggttaatttttgtatttttagtagagatagggtttttttatgttggttaggtttgttttaaatttttgattataaatgatttgtgtgtttcggttttttttagagtgttgggattataggtatgagttattgtgtttggtttatttttttttttttgttttttattttatgtttagttagaatttttgtttatttataattttgttttatttttgtttttttgtttttattaatattatggtttgggttattgtatagtattttgaattgatttgtgtttttagttttagttatttaggaggttgaggtgggggaattagtagagtttaggattttgaggttgtagtgagttgtgattatataaaagtattttattttgggagagagagggagattttgttttaaaaaaaaaaaaaaatttataaaaagggagagattgattgagaagattagtgtgaattagtttttgattgggtttagggaagaatgttggtttgaaaggagaatattttaaggaatatatagtaagttatagtaatggtttaataataagtatatatttaaacgaaagttcgtaaatggtgatttattagagcggaatttttttttggagtattttgtttgtgtgtttttttgtacgaggggggttgtacgtagagaataggtgtttatgtantttatntttttgtttgagttttttttttgtttattaggagttataatatgttttttcgatggaggtataattttttggtttcgtgttttttttatcgtgatagttatatgntttttagagggaaaagatatattgggttagtattcgtttatattttaattgaaagtnttttttttttaattaaggttagaatagtaaagtttgagaaagggttttgaaaatatttagtaatttaagttttggaaatgatntgaatattttaaggtattaagttattgggtnttttganaatggtgatggggaattattaattaattaattaatttttgttttgttttaaatatattgtattaggtttgtgtgttagaatttatatttaaaaagtataggtttaattttgatatatnttttttgaagaaatagtttaattgttttttaatgttatatttaggatgtggttaaatttttatttgagataaaatgtattatttttttttatgtaaattaagatgttgtattttgaaaaattatttttttgggaatttttagattttttttagtttttttgaattttttgtgtattattattatgtttagttattttttgtatttttagtagagacggggttttattatgttggttaggttggttttaaatttttgattttaagtgattcgttgttttggtttcgtaaagtgttgggattataggcgtgagttattatatttagttagttttatgggttttgaaaaatgtagttttatgtattatatagaagagtttcgttgttttaaaatattatatatggtttatttatttagtttatattttattttttaagtttttggtaattattgatgtattttaggtttttataattttattttttttagaatgttatataaatagaattattatagtatatagttttttaagattggtttttggttgggtatgatgatttacgtttgaaattttagtattttgggaggttaaggtgggtggattattggagtttaggagtttgagattagttttagtaatatagaaagattttgtttttataaaaattataaaataattagttaggggtggggacgtgtttttgtagttttagttgtaagttgaggtaggatggttggagtttgggatgtagaggttgcggtgagttatggttattttattgtattttagtttgggtgatagagtgagattttattttaaaaaaagagaaaagaataaaaagatttattaggtaaaatggtttagaatttaaatttatggttttttattaattttgttgttttttgttttaatggatttatggttatgagaaattgtagcgaagtgaaggtgtgtttggaagggagagatggattttgattaattgtattagttttttggtaatagttaattttatatatataagtattaaaattaaatttaaggatattttgttttggaatattaaagtgttgttgttatagaaaggaaggtagttttttttttttaaatttataatgttaattatttttttgagagttttcgttggttttatatattttgtatttgtttttaataatttagatggtattgtgggggttaaagtttttggttttttgaagttttattaaaaaattaatttatagtttggcgcggtggtttatttttgtaattttagtattttgggaggtcgaggcgggtggattattcgaagttaggagtttgagattagtttgattaaaacggtgaaattttatttttattaaaattataaaaattagttgggcgtggtggtgtacgtttgtaattttagttattttagaggttgaggtaggagaattatttgaatttaggaggtagaggttgtagtgagttacgattatgttattgtattttagtttgggtaataagagtaaaatttcgtttttttattnnaagtggtataaataaataaaattattttttaaagatttattgaaggaatattataggggagtaggtttggtgtttgaatgttaaggtaggttttttgtggatgtgtatttttaatttttttttgattagattattaaaggtgtagtaatgtttttgtttatatgatttttttttttttttgagatggaattttgttttgtcgtttaggttggagtgtaatggcgcgattttggtttattgtaattttcgttttttgggtttaagcgatttttttgttttagttttttgagtagttgggattataggcgcgtgttattatgtttggttaattttttttgaaatttttttagtagagatggggttttattatattggttaggttggtttcgaattttagatttcgtgattcgtttatttcggttttttaaagtgttaggattgtaggcgtgagttatcgcgtttggtaatttatatgatttttaaatatttttttttggggagagagattttagagaatgggagtaaagagaaaggcggtgagaattttaagtattttttttattttagagtagaagaaataaagggaagagtaaaagtttaaggtttagaaacggatttgttttttaaagggttgttttgtgtttttacgggtttgaaggttagtttatgtgtaatgttttttaaggtatgggttgtttttttgtattgtagttattatttttttggtttgttggttattgattagagggagggagagggtgtgattgtttggaaagagtttaaatagtgataagaattgaattttatttatttgttatttattgtataatttaataatagcgatggtaatgaaaacgaaagttaatttataattttattattttattaagttatttgtttttatttttttttttatttttttatgtattaaatattacgtaaagtatttcgttagttttggttaaagtgtagtttgtatatattttgaataaaaatttgtattttgtttttttttttttttttgtatttttgaggttgtaaaatatatttttataagagtggttttaatagttatttaatattttattttgtacgtatattttaaggtattgtcgtagtgtaatatttttttttaagcgttaacgttaatagattggatttagtattgtagggattggaggttggttaaggttaggcggaggttgttaggttattagggtggaggaaggcgtcgaggtagaggttagtgcgtttatcgcgcggtttttcggggtatttgttgttttggcgtttttttttttggttttcgtttcgttcgtagcgtttttcgtatagggtttcgttcgttgcgcgcgtattttcgtttttcgggcgatttgttagagtatttcgcgagcgtacgtgttttaggaagtgacgtatagtttttttgggggtcgggggcggggttaggttataaatcgtcggttaggggtcgttatttttttagagcgtcgggatatcgggtggcggttcgggacggaggacgcgttagtgtgagtgcgggtttttagaattatatcgattttcgtgttttttttttattttgcggggttggttggagcggtcgtttcggtgttgtttagtagttatagggagtcgtacggggagcgggaaagcggtcgcggttttaggcggggcggtcgggatggagcggggtcgcgagtttgtggggaaggggttgtggcggcgtttcgagcggttgtaggtatacggggtcggcggttgtgcgtagaggcgtttttgcgtttttcgttttttcgtttttcgtttttttttttttttttgtttttttgttcgttttttcggttatagagcgacgaatgacgagattaggtgtattttattgtcgtttttagtttcggggatttcgggttttcgtttttgaaggtcgtaggttttagtgcgtcggtttcgggttgcgggttcgggagcgcgggcgtagttaaggtgtagttgcgcggcgtgcggcgtcgggggaatacgtggttgttttaggaagtcgttttagggaacggttgggattcgtgggtgattttgggtttttaaattttcggtttttcgggtttcgggcgggtttcgtttttattgcggaaagggataaagttgttttcgattcggttattagcgtgttataggtattaattagatacgggtttttgtaaatttatttttcggttttggtataatttgattttgttatgttttgtttgttcgttttgtgtatggattttgtttttttaaggtagaattcgattgaacgtcgtaggtgtttatattaagaatattgttagtagtttttattataagacgggagttataggagtgatttatttgtgaaagatatttggagattagcggtgtggttagagggttgtgttggattgatgggcgtcggagaggtcgattgtgttatattttgttggatagtttttttaaggttgggagggtgggtaagaaaatatattttgattcggtttttttcggataacgttttttttttgtttattgtttgtaagattttatttattcgggggattggattttgtagttttttttattttttttttcgttgataagaggattaaagttaggaaattgtatttggttattttatgtttatatgttaagtttattgtgaaaattaaggttaggttgtttagagtatttgtggattttgttggtttttttcgtttttcggttttgaattttgggttataatatgttttttaagaaaatttagagttaagataatttttgttatcgattttgtaaggttatatatagtatagtattttttaattttttttggatgtttttattaagtaatggtggttgtaaatttagtttgtgttgaagattgttagatagatagtagtttggttaatttcgttttaaggcgaggtagttatttgtttttgataatgtatttaaatgttatggagtaagatttttagttaaatttgaatcgattataatgttagttaaaaatgattttcggttgggcgtattggttttcgtttgtaattttagtattttgggaggttaaggtaggcggattatttaaggttaggagttcgagtttagtttgattaatatggtgaaattttgtttttattaaaaatataaaaattagtcgggtatggtggtttacgtttgtaattttagtattttgggaggtcgaggtaggtggattatttgtggtgaggagttcgagattagtttggttaatatggtgaaatttcgtttttacgaaaaatataaaaattagttgggtatggtggtgtatatttgtaattttagttatttaggaggttgaggttcgaaagtcgttttaatttgggaggtagaggttgtagtgagttgagatcgtgttattgtattttagtttgcgcgatagcgagatgttattttaaaaataataataaaaaaattttttattaaattagaagatgatggggacgggaaaagattttggtttaatgtttttattatattttttatattatttggaattttatgtattaggtatgttttagtattgttaaagataatatttttatttattattaggtagtttaatattagttattataggatagggaagttagttagagaaggttttatagagatgaagttttgagttgagtttggaagaaatgaggaggattttaaggaatagagaagaatgttggtgggtaaaaataggggttggattttgtttgattttggagaaaatagagggtagtgaagttgttaggtagtgaatgtgttttattttatggtttaaaacgtggggttacgttttgtttatttgagttttattattaatgtgagaaattgaattgttgtttttagttattattgagaatattaaagataatataagtagtttagattattatttatttatttatttttgatagattttatatttgttgtttaggttgtagtgtaatggtgtgatttcggttttttgtaatttttattttttttaggtttaagtgatttttttgttttagtttttttagtagttgggattataggtatgcgttattatgttcggttaattttgtatttttttggtagagatgggatttttttatgtttggttaggttagttttaaatttttaattttaggtgatttgttcgtttcggttttttaaagtgttgttgggattataggcgtgagttattatgttcggttatcgttttgtgtttttaaaattaatttaaaataagaaaatttgaggaatgatggtttagatgagtgttaaaatttgtaagatgtttttttttagaaaaggatgattaaaattggtttagggtggggttttttagttttggttttaatgattgggtttttattgttttggtggagtggtagtgataagttttttgtaatagaaggggtaaaagattgtgtttttggttgggcgtagtggtttacgttttcgatttttttgggatgtttttattaagtaattaattttagtattttgggaggttaggtgggtggattattttaggttagaagttttagattagtttggttaacgtggtaaaatttcgtttttattaaaaatataaaaattagttgggtatggtggtgggtatttgtaattttagttattcggagtttgaggtgggaaaatggtttgaattcgggagggggaggttgtagtgagtcgagattttgttattgtattttagtttaggtaataagatcgaaattttgttttaagaaaaaaaaaaagattatgtttttaagaatatggtttattgtatatggatattggtttttaaagtttgaatttaaaaagaattttttgtaataggttttagagtttttttttttttttttttattatttttttgagatggagttttattttgttatttaggttggagtgtagtggtgttatttcggtttattgtaatttttatttttcgggtttaagcgatttttttgttttagtttttttagtagttgggattataggtgtttattattacgtttatttaatttttgtatttttagtagagatggggttttattattttggttaggttggttttaaatttttgatttcgtgatttatttgtttcggtttttaaagttagtgttgggattataggtatgagttatcgtgtttggttagaaagtttttttttaatgttagttataatattttttgttttataatttgcgtatattttatagtttgttttgtgtcgtgtgtgtttaatatgttttaagtgtattcgtatataggaaaagttttaaaatggtatttaataaatgtttattttgtaaattttaggataatgttatttttaagtatttagatgtttttaaattaaattaattggaaaatttagattttagttaaggtttttaatttaatttaggattttgattatagagatgtattttgttttgataaaagttaaggttaatgttttaaatttttagagatgataatatagtttttataatttagtaatttatttaatttcgtttagattattaatttttagttttgaataggttatttagtttttttaataattggtttttttatttgtaaaatagcgtaatttgtgttttatgtttttttttgtgttaaagatcgaattatttgtaggaattatttatttagttaggattagtatttttttttttttttattggagatggtttgtggtatttgtagtataattggttttgtttgttttagttttaattttgtttttttgtatgtgttatttttttttttttttgagatagagttttgtttttgttttttaggttggagtgtagtggcgcgattttggtttattgtaagttttattttttgggtttacgttatttttttgttttaggttttcgagtggttgggattataggcgtttattattacgttcggttaatttttgtatttttagtagagatagggtttttttatgttggttaggttggttttgaatttttgattttaggtgatttatttattttagttttttaaagtgttaggattataggtgtgagttatttcgtttagtagtatgtgttattttgtttatttagaatatagtggttcgtatttataattgtagtattttgggaggttaaggtgggaggattgtttgaggttaggagtttaagattagtttgggtaatatagggtgattttgtttttataaaaagaaaaaaaaagaattatgtatataataaattttaaaaaggattttatttaatttagttgttatgtaaattatggttaaatattttttttagaaaagtgataatgtattttaaaaatttaatgtattatttagtttggtaatagaaagtttattaatttgatatagtagtattttttttaataattttttattttgatatttgagg

SEQ ID NO: 1772 - DNA, 9848 bp, Artificial Sequence
  chemically treated genomic DNA (Homo sapiens)
  unsure 6456..6457, 7988, 8106, 8113, 8144, 8227, 8284, 8389, 8395: n is a or g or c or t
ttttaggtattagaatagagaattattgaaaaagatattattgtattagattagtgagttttttattattaggttaaatgatatattaaatttttaaaatatattattatttttttagaaaaggtatttaattatagtttatatgataattaaattaagtgggattttttttaaagtttgttatatatataattttttttttttttttttgtagagataaggttattttatgttgtttaggttggttttgaatttttggttttaaataatttttttattttggttttttaaagtgttgtaattataagtacgaattattatgttttgagtagataaaatgatatatattgttgggcggggtggtttatatttgtaattttagtattttgggaggttgagatgggtggattatttgaggttaggagtttaagattagtttggttaatatggagaaattttgtttttattaaaaatataaaaattagtcggacgtggtggtgggcgtttgtaattttagttattcgggagtttgaggtaggagaatggcgtgaatttaggaggtggagtttgtagtgagttaagatcgcgttattgtattttagtttggaaaataagagtaaaattttgttttaaaaaaaaaagaaagtgatatatataaaaagataaaattaagattaaggtagataagattagttatgttataaatattataaattatttttaatgggaaggggaagaaatattgattttgattgaatgaatagtttttataagtgattcgatttttgatataagaagaaatatgaaatatagattacgttgttttatagatgaagaggttagttattagagaaattaagtggtttgtttaaggttgaaaattgataatttaagcgaagttaaatgggttattgggttatagaaattgtgttattatttttggaaatttaagatattaattttaatttttgttaaagtaaaatatatttttgtaattaaagttttaagttaagttaaaggttttaattgaaatttgaattttttagttaatttggtttgagggtatttagatatttgaaaatgatattattttgagatttgtaaaatggatatttattggatattattttaaagttttttttatatacgagtatatttagggtatattaaatatatacggtataaagtaagttgtgaggtatacgtaaattgtaaagtaaagggtattataattggtattaagaaaaagttttttggttaggtacggtggtttatgtttgtaattttaatattgattttgggagtcgaggtaggtggattacgaggttaggagtttgagattagtttggttaaggtggtgaaattttatttttattaaaaatataaaaattagatgggcgtggtggtgggtatttgtaattttagttattggggaggttgaggtaggagaatcgtttgaattcgggaggtggaggttgtagtgagtcgagatggtattattgtattttagtttgggtgatagagtgagattttattttaaaaaaataataaaaaagaaaaagaaaaagttttaaaatttattataaaaaattttttttaaatttaagttttaaaaattagtgtttatatgtaatagattatatttttagaagtataattttttttttttttttgagatagagtttcggttttgttgtttaggttggagtgtaatggtaggatttcggtttattgtaatttttttttttcgggtttaagttatttttttattttagatttcgagtagttgggattataggtgtttattattatgtttagttaatttttgtatttttagtagagacgggattttattacgttggttaggttggtttggaatttttgatttagggtgatttatttatttggttttttaaagtgttaagattagttatttgataagaatattttaaggaaatcgaaggcgtgagttattgcgtttagttagaagtataattttttgttttttttgttataaaaagtttattattattattttattagaatagtaaggatttaattattagagttagaattggaaggttttattttgaattaattttaattatttttttttaggaaaaaatattttgtaagttttaatatttatttgaattattattttttaagtttttttgttttaaattaattttaagaatataaagcgatggtcgggtatggtggtttacgtttgtaattttagtaatattttgggaggtcgaggcgagtagattatttgaggttgagagtttgagattagtttgattaaatatggagaaattttatttttattaaaaaaatataaaattagtcgggtatggtggcgtatgtttgtaattttagttattggggaggttgaggtaggagaattatttgaatttgggggaggtggaggttgtagggagtcgagattatattattgtattatagtttgggtaataagtgtgaaatttgttaaaaataaataaataaataataatttaagttatttgtgttatttttggtgtttttaatggtgattgaaaataataatttaattttttatattaataatgaagtttaggtaggtaaaacgtagttttacgttttgaattatgaaatggaatatatttattgtttaataattttattattttttattttttttaaaattagatagaatttagtttttgtttttatttattaatatttttttttgttttttgaggttttttttattttttttaggtttagtttaaggttttatttttatgaagttttttttgattgatttttttattttgtaataattggtattgaattatttgataatgagtaaaaatattgtttttaatagtattggggtatgtttgatgtatgagattttaaatgatatgaaaaatataatgaaaatattggattaggattttttttcgtttttattattttttggtttagtagggagtttttttgttgttgtttttgagatggtatttcgttgtcgcgtaggttggagtgtagtagtacgattttagtttattataatttttgttttttaggttaaagcgattttcgagttttagttttttgagtggttgggattataggtgtgtattattatgtttagttaatttttgtatttttcgtagagacggggttttattatgttggttaggttagtttcgaattttttattataagtgatttatttgtttcggttttttaaagtgttggaattatagacgtgagttattatgttcggttaatttttgtgtttttagtagagataggattttattatgttagttagattggattcgaatttttgattttaggtgattcgtttgttttggttttttaaagtgttgggattataggcgggagttaatgcgtttagtcgagggttatttttaattagtattgtgatcgatttaggtttagttgggaattttgttttatgatatttaaatatattattagaggtaagtaattgtttcgttttagggcggagttagttaaattgttgtttatttaataatttttaatataggttaggtttatagttattattatttgataagaatatttaaaggaaattgaaggatgttatgttatatataattttgtaaaatcgatgataaaaattattttaattttgagtttttttgagaagtatattgtaatttaaaatttagggtcggggggcggggggaattagtagggtttataagtattttagatagtttaattttaatttttatagtaagtttagtatataagtatggggtagttaaatataattttttaattttaatttttttattaacggggaagaaaatggaaaaagttgtagaatttagtttttcgggtaagtgaggttttataagtagtaagtagagggaaagcgttattcgaaaagagtcgaattagaatgtatttttttatttatttttttaattttaaaagaattgtttagtagaatgtgatataatcggttttttcggcgtttattaatttagtatagttttttgattatatcgttaatttttaagtattttttataaataagttatttttatggttttcgttttgtagtgagaattgttagtaatatttttaatgtgaatatttgcggcgtttagtcggattttgttttgagaaaatagaatttatatataaggcgaataggtagagtatggtaagattaggttgtattagagtcgaagggtaagtttatagaaattcgtatttaattaatgtttgtaatacgttagtaatcgaatcggggatagttttgttttttttcgtagtgagaacggggttcgttcggagttcggggaatcgaaggtttaggagtttaaggttatttacgaattttagtcgttttttggggcgattttttggagtagttacgtgttttttcggcgtcgtacgtcgcgtagttgtattttggttgcgttcgcgttttcggattcgtagttcggagtcggcgtattagggtttgcggtttttaagggcgaggattcgaagttttcggggttgagagcgatagtggggtatatttggtttcgttattcgtcgttttgtgatcgaggaggcgggtaagaaggtagagagaagggaagggacgagaggcgaagggacgagaggcgtagggacgtttttgcgtatagtcgtcgatttcgtgtatttgtagtcgttcgaggcgtcgttatagttttttttttataggttcgcggtttcgttttatttcggtcgtttcgtttggggtcgcgatcgttttttcgtttttcgtgcggttttttatggttgttggatagtatcggagcggtcgttttagttagtttcgtaggatgaagggaggatacgagggtcggtgtagttttagaagttcgtatttatattagcgcgtttttcgtttcgagtcgttattcgatatttcgacgttttgaggggatggcggtttttaatcggcggtttatagtttggtttcgttttcggtttttaggggggttgtgcgttattttttgaggtacgtacgttcgcgaggtgttttgatagatcgttcggggggcggggatgcgcgcgtagcgggcggggttttatgcggagggcgttgcgggcgaggcgaaggttaagggaaaaggcgttaaggtagtaggtgtttcgaggagtcgcgcgatgggcgtattggtttttgtttcggcgtttttttttattttggtagtttggtagttttcgtttgattttgattaatttttagtttttgtagtgttaggtttaatttgttggcgttgacgtttaaaaaaaaatattgtattgcggtagtgttttgaaatgtacgtgtaggatggaatgttaggtaattattaaagttatttttgtgaagatgtattttgtagttttagaaatataaaaaggaaaagaaaagtaaaatgtaaatttttatttagaatgtatataagttgtattttaattaagattagcggagtgttttgcgtaatgtttaatgtatgagggaataaaagggaaaatagaaataagtgatttaatagggtgataggattgtagattaattttcgtttttattgttatcgttgttattggattgtgtaatgaataataaataaataaaatttaatttttgttattgtttaaattttttttaaataattatattttttttttttttttggttagtaattagtaggttagggaggtagtagttataatgtaagaaagtaatttatattttaaaaagtattgtatataaattgatttttaggttcgtagggatatagaatagttttttaagaagtaaattcgtttttgggttttgggtttttatttttttttttattttttttgttttaagatagagaaagtatttgggatttttatcgtttttttttttatttttattttttaaaatttttttttttaaagagaagtgtttaaaagttatatgagttgttaggcgcggtggtttacgtttgtaattttaatattttgggaggtcgaggtgagcggattacgaggtttggagttcgagattagtttgattaatatggtgaaattttatttttattaaaaaaattttaaaaaaaattagttaggtatagtggtacgcgtttgtaattttagttatttaggaggttgaggtagaagaatcgtttgaatttaagaggcggaggttgtagtgagttaagatcgcgttattgtattttaatttgggcgatagagtaagattttattttaaaaaaaaaaaaaagttatatgagtaggagtattgttgtatttttaatgatttaattaggaaaaggttaaggatgtatatttatagagggtttattttaatatttagatattaggtttgtttttttgtggtgtttttttaataaatttttaagaagtaattttatttatttatattatttnnaatgaggagacggagttttgtttttgttgtttaggttggagtgtagtggtatgatcgtggtttattgtaatttttgttttttgggtttaagtgatttttttgttttagtttttggagtagttgggattataggcgtgtattattacgtttaattaatttttgtaattttagtagagatggggttttatcgttttggttaggttggttttaaatttttgatttcgagtgatttattcgtttcggttttttaaagtgttgggattatagagatgagttatcgcgttaagttgtgaattgattttttagtgaaattttagggagttaaggattttggtttttatagtattatttggattattgggaataggtgtaaaatatatagggttagcgaaaatttttaaaggaatgattgatattataaatttagagaggaaggattgtttttttttttgtgataatagtattttaatgttttaaaataggatgtttttggatttggttttaatgtttatgtatataaggttagttattgttaggagattgatataattaattagagtttattttttttttttaggtatatttttatttcgttgtagttttttatggttataaatttattagagtaagaaatagtaagattagtagagggttataaatttagattttgggttattttatttgataagtttttttgtttttttttttttttttgagatagggttttattttgttatttaggttggagtgtagtggagtggttatggtttatcgtagtttttatattttaggttttagttattttattttagtttgtagttggaattataagagtacgtttttatttttggttagttgttttgtaatttttgtagagataggatttttttatgttgttagggttggttttaaatttttgggttttagtgatttatttattttggttttttaaagtgttggggttttaggcgtgaattattatgtttagttagaaattagttttaaaagattgtatattataatgattttatttatatgatattttggaaaaggtgaaattatagagatttaaaatatattagtggttgttagaggtttggagaatgaagtataggttgaataggtaaattatatatgatattttagggtagcgaaatttttttgtatggtatatgagattgtattttttaaaatttatagaattggttgggtgtggtggtttacgtttgtaattttagtattttgcgaggttaaggtagcggattatttgaggttaggagtttgagattagtttggttaatatggtgaaatttcgtttttattgaaaatataaaaaatagttgggtatggtggtggtatataaaaggtttaagaaaattgagaaagatttaaaaatttttaaaggaatgattttttaaagtataatattttaatttatatagagagaaataatatattttgttttaaataaagatttggttatattttaagtatagtattgaagagtagttaagttatttttttaaagaanatatattaaaattaaatttgtattttttgagtgtgaattttaatatataaatttggtgtaatatatttaaaataaagtagagattaattaattaattaatgattttttattattattnttagaanatttagtaatttagtgttttaagatgtttanattatttttaaaatttgagttattaaatatttttaaaatttttttttaagttttgttattttagttttagttggaagaagaangtttttagttaagatgtagacgaatattgatttagtgtgttttttttttttgagaantatgtggttattacgatgagaagagtacgagattaaaggattgtgtttttatcggagggatatattgtgatttttggtgggtaagaggagagtttaaatagaggngtaaantgtatgagtatttattttttacgtgtagtttttttcgtataggagaatatataaatagagtgttttaaggaggagtttcgttttagtaggttattatttacgaattttcgtttaggtatatgtttgttattgggttattattataatttgttatatattttttagggtgttttttttttaaattaatatttttttttgggtttagttaagggttagtttatattggtttttttagttagtttttttttttttgtaaatttttttttttttttgagataaggttttttttttttttttaggatggagtatttttgtgtgattatagtttattgtagttttaaaattttgggttttattgatttttttattttagttttttgagtagttgggattaggggtataaattagtttaggatattatgtagtaatttagattatgatgttggtgggagtaagggagtaagaataaaataaagttataaataagtagaaattttgattaagtataagatagaagatagaaaagagagaatagattagatatagtggtttatgtttgtaattttagtattttggggggggtcgaggtatatagattatttatggttagaagtttgagataagtttgattaatatggagaaattttgtttttattaaaaatataaaaattagtcggacgtggtggtgggcgtttgtaattttagttattcgggagtttgaggtaggagaatggcgtgaatttaggaggtggagtttgtagtgagttaagatcgcgttattgtattttagtttggaaaataagagtaaaattttgttttaaaaaaaaaagaaagtgatatatataaaaagataaaattaagattaaggtagataagattagttatgttataaatattataaattatttttaatgggaaggggaagaaatattgattttgattgaatgaatagtttttataagtgattcgatttttgatataagaagaaatatgaaatatagattacgttgttttatagatgaagaggttagttattagagaaattaagtggtttgtttaaggttgaaaattgataatttaagcgaagttaaatgggttattgggttatagaaattgtgttattatttttggaaatttaagatattaattttaatttttgttaaagtaaaatatatttttgtaattaaagttttaagttaagttaaaggttttaattgaaatttgaattttttagttaatttggtttgagggtatttagatatttgaaaatgatattattttgagatttgtaaaatggatatttattggatattattttaaagttttttttatatacgagtatatttagggtatattaaatatatacggtataaagtaagttgtgaggtatacgtaaattgtaaagtaaagggtattataattggtattaagaaaaagttttttggttaggtat

SEQ ID NO: 1773 - DNA, 6115 bp, Artificial Sequence
  chemically treated genomic DNA (Homo sapiens)
ttaaaatttttatatagttattttttatgttttttatttttttattgagaatttttattttttttatttgtttcgaatatatttataattgtttgttaaagtatttttatgatgattgttttaaaatttatattaaataattttgatatttgtgttattagatgttggtatatattgatagtttttttttattgaagttgagatttttttagtttttggtataattaatgatttttgaataaaatttggataatttgggtgttaagaaattttggattttattgtagaagaatttttatgatattattgtattgggaaataggagatgttattttattattgttaggtggggttggaagtttaagtttttattttattgatatttggaagttgttgtgtttttttgtattgttgggtagggatggtaatttagttttttttttcggttgatgttattttgtttgggagggttagggttgtttttttattgtttattatgtggttttgttattgttgggtaattatgaaggttttgattttttattaggttttttttgatattatttaagtgttaagggggagagtgttattttattattattggatgggagtagaagtttaggttttttatattttattgatatggtagaaagaggaggtttattatcgtttagtagggtaaaagttatagttttatattttgttttttttgataaataaggttagggggattggggaatttttttatagattgataagtgtggaaatttgggttttttatttgatttttgttggtttggtggggttagagatagattttttgtgatgtttgatatagtaaagaggttgttatttaaaagttttttgttttattagtttgtcgtttttttttggaattttggtttaagaggtttttttgggggtttgttttgtttgtgttttttggtatttttgagtatttagtttttttaatattttatttgagatataggaggtcgaataaaatttaggaaatttttattatatattttgtttttttgattttgaggttgatagttagtttttttttttttaatttttagtgtttttttatgtttgttttatgtataatatttatggttttagttatatttagtaagaggtatagggaaaagtgtattttttattttgtttttttgggatgagaaattaagaattagaaatgtttattattgttttaggaatttaggagaagacgggttgtggttttgtgtttttaggtatttggaggatggggagaagttgtttataagtggtagtagggatttagtaatatggtggtaggttggattaaaggagagatgattgggaagtaattttttgtggtgtatgatagttgatggatggatgttagaaatagtggtgtttgatgatttatttgaagttatttttttttttatattgttattattgtttatttttttttaaatttttagtaagtatttattatataaagtattttagtattaaaaaatgaaggagatgaaagagaaggttgtgtagttgtattttgggttaagaagagtgggagaggtggtagggttagcgatgaagagtttgttagagtgatggaggtttgagtaaggagtaagttggtgaagaaagattaggatattgttatgtggagtcgttgtggaagtttgtttgtttttagagtttagtggagaagaggtaaaagtagggattagtagttgagttattatgagaaagagggttttatggtggtggaagtgatatattgtttcgatttttttgaagttttttgttttgttgtttgagtggagagaagtatttttgttattgcgtatggagggaagttttttgtatggattttgaaggcggtttttgtatttcggattattgggtgtttttttataggtttttaatattttgttgtttttttaggtggggtttgacgtggagttagtttatagatttgttattttttttttatagtattttttattttagtgatattttggtttgttttatgaattttgagtttagagtttttaaagtattaaatttagtgaagtagagatatttttggtatgggtttgtgggttgttttttaggggttaggttagtaagaatgatttagtatataggttaatttgtgtaagttttatgtatgtattttagggtaatgggaagagtggtgagtgaggtttatggtaaatttttaattatatttaattttttttaagatttttttgttttagaatatgtagaaatggagaaatgattaggggttgtataatgttgtgtttattatattgttgtagagagaaggatgttgttagttttttatagtttggggtgaatttggtttatgtaatgaggtagtagggagttaggtaggtgagtttttttttttgtattgttttttttagtaaatgttaatatattttttagtttatttttatttaatatttaggttttaatttaagttgtttttttattttttagggtgaattgatttttttgttacggtattttttgagtatttgttggttgagtttttatttttattcgtgaaaatagttttgtgatgtgttgtttaatattatagaatggaaatagtgttttgatttattaggatttaaatattttttttgtagaatttataaagtgatatggatggttatattttagaggattgtttttgtagttggtggggaagttttggtgaggagtagtatagtaggttgttttggttggttcgttttgagttgtagggatgtgacggaggtaggaagagtgaggatgtagaggaggggaggattaaggaagtagaaatgagtagtagtttggtaggatttggaggttggtaagatttgaggggagaagtttaggatggggttcggatttattattatagagatagttaatggggtgatgttaggagaaaggttgaggagtttaggttgggatatgttgaatttgaaatatttgtagggtgtttaggtagagtggatttgagtttaaaaaagtttggttggagattgagttagagagagatgtgggagttttaggtatgtgtggtttttaagaaggacgggtagagtacgggtttttttttgtttttaattttatattttgatattttaaatgattgttgtgttttattttttttagtttatattaggaatttaataatgatgatagtagttgttatggattgaattgtgttttttttttaaatttatatgttgaagttttaaaattaggattttagaatgtgatcgtatttgaaggtagggtttttaaagaggtaattaagtgtataatgaggttataaggatgggttttaatttaatatgattggtgtatttaaaagaaataaatattaagatataaatatatatagggaagattaagtgaggatatagggaggagatggttatttgtaagtttaggagaggagtttttaaagaaattaatagtgttgatattttgattttggatttttagtttttagaattatgagaaaataaatttttgttatttaagttatttagtttgtgatagtttgtgatgatatttatagtagattagtatagtagttaatattggatatttattatgtgttaaatattgttttaagtattttgtatattttaatatatttaatatttatagtaattttatttgtggaaggtagtatagtttacggtacggtagttatatcggtttttttattttttttagggtttggagttttttttattttttagtttgtttttttgttttttattttattcgggattatattttttagatttttataggtttttttatttttttttaggtgttaggtttagtaatttgtttttattatttgttagtttttgattttatttgttattagttttttatttggttggattggttttttgaatatttgttattttttggtatgatgtttttgtaaaataagaaaattaataataataataataattgttagtgtttaataagtatgtgttttttaatgtttatttttttataattattttaataaatagggatatattattattttttttttaattttgttttttagagaaggaggttggggtttagggagatgaggtgagtttttttaggttttataggaataggattgaaggaaggaagttatgtttgttaggagaaattaaatggatatataggttttttgtggaatatatagtttttgttattttttggttgataaagtttgaggttttaggaaagagaggaaagtaatagaaatatgaatatgagtgtgtgtgtattttgttttttttattaaagtttttatagtttatattaatgagggtacgattttgtttgttttgttttttgttatatttttattgtttagattaggtgtttgttattgtggagttttaagaggttgttagagaaagaatagaagaaagaaaagaaggaaggaaggaaagaaggaagaaagaaaagaaagagggaaggaaggaaagaaagaaggaagaatgaaaggaaagaaggatagaagggagaaaggaaggaaagaagaaagaaaggaagaaaggaaagaaggaaggaggaaggagaaggagaaagggtagggtggggaaggaaagaataaaggattgttttttttttattgtgggtttgagtttgttttttttaaagatatagagttttggtttttatttataaaaaaggattttgaagttattttatttcgttttgtttttttatagtttagataagatttttatgttttattggttatacgagtgtttttaggaggagtagatataggtggagggagttttttttgattagtagagaaaataggatggggtattgttttattgaggatttgggggtgggaaggaaagtgttaacggtagttttataaaagttttttggttaggggatttagggtaagtagtggttttttttttttttttttaggaagggttaggaaaatggttttggttttggagatttttattttgttggtttttatttgttgggtgtcggttaatattttcggtaagttttgaggttatggagttaggcggtggggagggagttttagtgttagttaggttttgttttgggttttcgaataggtgcgatttaatttaatttttataaatttttatatgttagtgatttgtttttttttttttagatgaagaggtagatttagagagtcgaattgaattatttgaggttatagagttagtgattgatggagtagaaatgggaaatgtggttgatttttttaatttaattttaggttttttttattttattattttggtaaatttttggtattgattttgggtttttatttttttagttattttaaagtttgtgttatttataataggtattttagaagtagtagaaaaagaaatttatttatgaagtgaaatagttttaagttttgtttttggtttagttatttatttatatgatttcgggtaaagtgttaagtttttgtttttttttttttttttttatttaaaaagtaaataaataatatatattttatgatgcggttgtgatttttgggtaggattttatgtgttataagagtttttaatggaaaaataagttatgtatattattaattaattggtattttaatgtttatttggaatatgttatatttgtagggtatggtttgatagatttaagaagaatttttttacggttttttaatttattttaaatagttttatgggaattgcggtagggtgggggcgggcggggaacgtgtagttttagcgttgattttgggattttttatttgttagttacgtgattttgggtagacgattttcgttgtttgagatttggtgttttatgagtgataaggatatattgtttgttattttttaggagaatgttgtatattaaatgagttaatgttatatttgtaagaaagtgtgtttagttgttaaattttaaaataggttgttataggtaatgatgatgattttggaaaagtatttgtgtttatgagagttcgtttttgttttggtagtttagtttatatttttttttgatgaattatttttttttttttaga

SEQ ID NO: 1774 - DNA, 6115 bp, Artificial Sequence
  chemically treated genomic DNA (Homo sapiens)
tttaggaaaagaaaagtggtttattaaagaagagtgtggattgggttgttaggatagagacgggtttttataagtatagatgtttttttagggttattattattatttatgatagtttattttaaaatttggtagttaagtatatttttttataagtatgatattagtttatttaatgtgtaatatttttttaagaggtgataggtaatatatttttgttatttatgaggtattaagttttaggtagcgaaagtcgtttgtttaaagttacgtaattggtaagtgaaggattttaaaattaacgttgggattatacgtttttcgttcgtttttattttgtcgtaatttttatgaggttatttggagtaagttagagaatcgtaaggaagttttttttgaatttattaagttatgttttgtagatgtaatatgttttagataaatattgaaatattaattaattaataatgtatatgatttatttttttattgagaatttttgtaatatatagggttttatttagaaattataatcgtattatgaggtgtgtgttatttgtttattttttaaatgaaaaaaaaaaaaaaaaaatagaagtttggtattttgttcgaagttatatgggtaagtggttgagttaaagatagaatttagggttattttattttataggtagatttttttttttattgtttttaaaatatttgttatggatgatatagattttggaatagttaaggggataaaaatttaaggttaatgttaaaagtttgttaaaatggtggggtgaggaggatttagaattgaattaggaagattaattatattttttatttttgttttattaattattagttttgtgattttaagtaatttagttcggttttttaaatttgtttttttatttgaaaaaaaaaaagtaaattattgatatgtgggaatttgtgaagattaaattagatcgtatttgttcgaaggtttagggtagagtttggttgatattggagttttttttttatcgtttggttttatggttttagaatttatcgaagatattggtcgatatttagtagatggaggttagtagggtgaagatttttaggattagggttatttttttggttttttttgggaggaaggaggagaaattattgtttgttttaggttttttggttagggagtttttatagagttgtcgttggtatttttttttttatttttaggtttttagtgaggtagtgttttattttgttttttttgttggttaaaaggagttttttttatttgtgtttattttttttgagggtattcgtgtggttagtggagtatgaggattttgtttaaattgtgggggaatagaacggggtggggtgattttaaaatttttttttatgggtaaagattaaagttttgtatttttggagggaataggtttaagtttatagtgagggaaaagtaattttttgttttttttttttttattttatttttttttttttttttttttttttttttttttttttttttttttttttttttttttttttttttttttttttttatttttttttttttttatttttttttttttttttttttttttttttttttttttttttttttttttttttttttttttttttttttttttttttttattttttttttaataattttttagagttttatagtagtaggtatttaatttagataatgaggatatggtagagaataaaataggtaaaatcgtgtttttattaatatagattgtgaaaattttggtgagggaagtaaaatatatatatatttatatttatatttttattattttttttttttttttaggattttagattttgttaattaaaagatagtaggaattgtgtattttatagaaagtttgtatgtttatttggttttttttggtaaatatggttttttttttttagttttgtttttgtgagatttggaaaaatttattttatttttttgagttttagtttttttttttggaaagtaaagttaaaaggagaataataatatgtttttatttgttaaggtagttgtaagagaatagatattgaagagtatatgtttattagatattagtagttattattattattattgatttttttattttgtaaaagtattatgttagggaatggtaagtatttagaagattaatttagttaggtaaggagttagtgatagatagggttaggaattggtaggtaatgagggtaggttgttgagtttggtatttgaggagagatggagggatttgtgagaatttggaggatatggtttcgggtagagtgaagggtaggaggataagttggaaagtggaagagattttaaattttggggaaaataaaggggtcgatatagttgtcgtgtcgtagattgtattattttttataaatagggttgttatgaatattaaatgtgttaaaatatgtaaagtgtttaaaatagtatttgatatataataagtatttagtgttagttattgtattagtttgttatgggtgttattataaattattatagattgggtggtttaagtaatagaaatttatttttttatagttttgaaggttggaaatttaagattaaagtgttagtattgttggtttttttggagattttttttttgggtttgtagatggttattttttttttgtatttttatttggttttttttgtgtgtgtttgtgttttaatatttattttttttaagtatattagttatattggattagagtttatttttgtgattttattgtgtatttaattatttttttaaagattttatttttaaatgcggttatattttgaggttttggttttaggattttagtatatggatttggggggagaatataatttagtttataatagttattgttattattgttgggtttttgatataaattagagaaagtaaaatataatagttatttgaagtgttagggtatgggattaaaaataggggagaattcgtgttttgttcgttttttttggggattatatatgtttggaatttttatatttttttttagtttagtttttagttagatttttttgagtttagatttattttgtttggatattttataggtattttaaatttaatatattttaatttgaattttttaattttttttttgatattattttattggttgtttttgtgatagtaaattcgagttttattttaggtttttttttttaagttttattagtttttaggttttattaggttgttgtttatttttatttttttggttttttttttttttgtatttttattttttttgttttcgttatatttttatagtttagaacgagttagttagaatagtttgttgtattgttttttattagggtttttttattagttgtaggaatagttttttaaaatatggttatttatgttattttgtagattttataaaaagagtgtttggattttggtgaattaaaatattgtttttattttgtgatattaaatagtatattataaggttgtttttacgggtggggatggagatttagttaatagatgtttaggaggtgtcgtggtaggaagattaatttattttggggagtgggaggataatttggattaagatttagatgttaggtaaaggtgagttggggagtgtattggtatttattggaaaaggtaatataagaggaagaatttatttgtttgattttttgttattttattatataggttaagtttattttaggttatggagagttggtagtatttttttttttatagtaatataataagtatagtattgtgtagtttttggttatttttttatttttatatgttttaaagtagaaaagttttagaaaaaattgaatgtggttaaagatttattataaattttatttattattttttttattgttttaaaatgtatgtataaagtttgtataggttggtttgtgtgttgaattatttttgttggtttggtttttgagaagtaatttatagatttatgttagaagtgtttttgttttattgggtttggtgttttaggaattttgggtttagggtttatgaagtaggttaagatattattggaatgaggagtattatgagagaggaatggtaggtttgtgagttgattttacgttagattttatttggagaagtagtaaggtgttaggagtttgtgggggagtatttagtagttcgaaatgtagaggtcgtttttaaaatttatgtaaagagtttttttttatacgtaatagtagaggtgtttttttttatttaagtaataaagtagaaagttttaagagaatcgaggtaatgtgttatttttattattatgaaatttttttttttataatgatttagttattggtttttatttttattttttttttattgagttttgagaataaataggtttttatagcgattttatatggtaatgttttaatttttttttattaatttgttttttgtttaggtttttattattttggtaggttttttatcgttggttttgttattttttttattttttttggtttaaaatataattgtataatttttttttttattttttttattttttaatattaaggtgttttatataataggtgtttattgaaaatttagggggagatggatagtaatagtaatatagaggaggaaatggttttaaatggattattagatattattgtttttgatatttatttattagttgttatgtattataggaaattgttttttagttattttttttttagtttagtttgttattatattgttggatttttgttattatttatggatagtttttttttattttttaaatatttagggatataaagttataattcgtttttttttaggtttttagggtaataataaatatttttggtttttgattttttattttagaaagatagagtgaaaaatatatttttttttgtattttttattaagtatagttaaaattatgaatattatatataaaataaatataagaaggtattgaaagttagagagaaaaagattggttattaattttaggattagagggataagatatatggtaggagttttttggattttattcggttttttatgttttagatgagatgttggaggagttggatatttagaaatgttagggagtatagataaaataagtttttagaaaagttttttgagttaaagttttaggaaagggcggtagattggtaagatagaaaatttttagataataatttttttattatattaaatattatagaaaatttgtttttaattttattaggttagtaaaggttaagtgaggagtttagatttttatatttgttaatttgtaaggaggttttttaatttttttgattttgtttgttagaggagatagaatgtggagttgtgatttttattttgttgggcggtaatgagttttttttttttgttatgttaatggagtgtagggagtttggatttttgtttttatttagtggtaataaggtggtatttttttttttgatatttaggtggtgttagaagagatttagtgaagaattaggatttttataattgtttagtagtaataaggttatatgatgagtagtaaggaggtaattttgatttttttaggtagggtggtattagtcgagagaagagattgaattgttatttttgtttagtagtatagaaaagtataatagtttttaagtgttaatggagtaagaatttgaatttttagttttatttggtagtaatgaagtggtattttttgttttttaatgtagtgatgttataagagtttttttataatgagatttagagttttttaatatttaaattgtttaaattttgtttaaaaattattaattgtattaagaattaggaaaattttaattttagtgagaaaagattattaatatatgttagtatttggtgatatagatgttagaattatttgatatggattttaaaatagttattataaaaatgttttagtaaataattataaatgtattcgaagtaagtgaaaaaaatagaaatttttagtaaagaaatagaagatataaagaatagttatatggaaattttag

SEQ ID NO: 1775 - DNA, 6522 bp, Artificial Sequence
  chemically treated genomic DNA (Homo sapiens)
ttggagagttaaaattgtagagttatgagtggtttaaaagttataagtagtaattaattaattaattataattttaaagggtgagataatgtttttatagtgtattattagtgtgatgagtttatttttttaaagttttataatttgttgatatgttgtggttttttttggttttatttttttattttttattatttttgatttttttaaatttattttgtttttattttttttttcgtttattgtttttttatttttttttaatattttttttttagattaatttttaaatataaatggaaataataatcggattattttttgtaaggaaattatttttttgttttattatttataattagaataatgaaataaagttgtttatagaaatgtatttagaatatgagataaaattgatatagattaaatattgtttttgaatagtggtattaaatataaaattataaataaaattttaaaagatttttggtgtatttttatattaaagggttattttgtatttattaagtattattatttggggggaaatgtaattaattatcgtcgttttatgtattttttttttttattttttgattttttatgtttgaaatcgttttggaaagtttttagaattgttataaatgaagttatgttttggttaatgttagtaaggatttatgatttataggcgtaaaattttaggatagggatgagtagttttgttttttttagttttttgtagaaattttatattatttaagtgaatagatttattgatgagtggagaatggttaagagtggaaatagttttattttttatttttgtaattttaaaataaaagattttatttgagggttttaataagagattttaatcgtgaatgtttaattgaattttgatagttatttagtattttatttattaaaagtgtatttttttgttttttttttttataattattgggggtaaaatattataatatttaaaatgtgtttatagaaattattaggaggtagaattagaagtaaattttttttgggtttttttttggttttttagagagagcgagagagagagagagagaaggttagatatttttattataaattttttgatagaaataaagatatgataggataagaaatttatagagttagtgagtaatttgtttaggattataaagttagaaagtgatagaaatttgaatttaaaaaattatgattggagtttgttttttaaattattgtgtttttttgtttttttgaagtaattaagatgggtgtatattatttaaatatttttttattatgaagattgtagagatttcggtatataagatttttattaaatatagagatgaaaaggtattataagagttatttaatagaagaaatgatttatttacggttattagggagatagttttagtaattttgtcggttaggtttttaaagaattgattatttgagaggtggaaaggggtttttttttttttgttatatttttttattgtatttatttattttagtagttttaattaatatttttcgttttaattttttgggttttgaataaattaaagtatttatttatgagtaagttaggggttttaggtttaaggagttgttaagtgagtaataggtatttagttaaatatatattaagaatataagagtgtatgtttaggatcggaattgtagtggttaatagaatttaaggcgagttttgttttttttgaatatatgtaaaagaaattttgttattaaaattagaatcgaaattgaatttatttaaggtgttgtagtgattttaatttttaggttgtatattaatatttttttttttttttgttttttgtaagttatgtttttattttttttaaaattttgtttttttttgttttgttatcgatttatttttttttttattttttgtttttagtagtttttttgtttaagtttttcggtacgttggtattggcggtattcgtttttattttgggttatttttttagtttttttgttagtttcgggttgttattatattgattttattggtttgaattttttggttgtatgtattatttttatcgtcgtttcgattgattggaattttcggcgtttattgggacggtcggtttttttttatttaaaattggtataagggaaaggaatttgttttttttgatttatatattattgatagaataatttaagaaagtatgtgaataaatattattattacgagttttttaatgtgtgataatgggaaaaattttgtatttaagggagtttggaaaatgttgggttaaaagagtgaaaaggtttttttttttataggagttttagagtttttaatatgataatgttttagaatgaggaatttaagaggataggagagtatttagtattttttaaatttgtttgattttagaatttttgtttgttagaatatattttgggattattgttttttagaagtatatagtaggtaagaatatagtggattttgattgtaaaaatttagttttattatttattgtggtttcgaataaagtatttaatttttttgtattttagtttttttatttgttagatatggataataagatttattttataggtttatagtgaagattaaatgattatatataatatatattaaattattaagtgtagtatatgttagttattattattttatttatttagtgttttattaataatttaggttttatatataattgaagtataaattttaaaagtgatagaaagttttttgtgatttttttgaatttaggaatatttgaagtagagaatagtatatatattttgggtttgggagtatatttaatagagtttttagtttaaattatttgtttggttagtatggttgtagagttatgtcgaaatgaaaatgttgattttgagtaattaaaggtaaaataaaagaaaaagggaaggtggaatagtggtaagagttatttttgtatttatttaatttagatttagttgaaattgaaaatgttaagttatgagtagtgtagaatagtagatattaaatatttaaaattttagttttttggattaatgttatggaaagaatgaagttggttgataatgtttagtttagtaagaaggtgaagaagaaagttatataagaagtggtttaggtagtaaattataaaggtgattatttatttaaattagtaaaataaataagtatattttattttttaggtaaaattgatggatttttgttttttagtagtttataaatagaggggtatattgtaaataataaattaataaaataaattttgggatggtaatttgttaaggtattttagaaaataagaggtaggatatgaatttaaaagattggaaggtatgtttttagtattggtttggttttgagtagattagtgtttttttttataggggtgcgtgtgtatatataatataggagggaagtttttttttttagagtaagtgatttagtttgggaggttgtgattgagttatattaagtaaaaacgggagatttgattgttttttttttaatagatttgtttaaaatgattggaaagtaaatatcgtaaattattgttgttagggcgtatattttatttttttttttttttatttatagcggtttttatttttatatttttttaacggttcggggagagttcgtggtttaagtaacgagaggatttttgattgtaattttagtacgttattttgttgaaggtagatacgtggtttagagagaatttataaatttttttttttcggtaagatcgtgatgttatttgttggtagtagaaggttcgtttcgagcggagttttagaagtttttgataagagaaagatagattgagatagagatagaaagagaaagagagaaagagatagtagagcgagagcgtaagtgaaagaggtaggggagggggatggagaatattagtttgacggtttagggagttatttaggaataaattgaggggttgttcggttgtagataggaggagatagagaggatttattttagggtggtaagtgtttatttattttaagcgagtaattttacgttggggagaagttagtagaggttgggaaagggtgggagtttaagggagtttttgcgtaatttttttaggaataaaattttttagttagggtgtcgtaagggttgtcgttgtgattcgtagggggtgaacgtaatcgcgacggttgatcgtttgtggttgggttggcgtttggagtaagagaaggaggagtaggagaaggagggagttggaggttggaagcgtttgtaagcggcggcggtagtaacgtggagtaattaagcgggttagcgcgcgttcgttagggtgtaggttacggagcgtagtttttagagtaggattcgcgtcgttttagtagtttttgcggtttttgcggtattcgatcgagtatcgagcgttttgcgaagcgtattttttttttcgcggtgcgttgggttcgtttttagcgcgcgtatacgtatatatatatatatatatatatacgtacgtatatacgtgtgcgtttttttgtttcggagttgttgttgtttttgtttttagcgtcgtagtggaaggtaggatcgaatcgttttttttttaaatatataaattttagtttaggttagtttcggcggttttttttatcgcgttttcggcgtttttttcgttagttcgttagttgttagtttcgggatttttttatttttttttttttggtcggaggagtcgagtttagattcgttatttcgtattcgagattgatatattgaattttattttttttttttaaatttatttttatttaatagttattcgtttttttttttttttattttattgttttaagaatttttttttttttattcgttaaagttagggttttttttgttcgtttcgtattaatatttttatttttggaattattggttttttttttttaaaggaatttaagtaggatacgtttttttgttgggtattgattagattgtttgtaaaagtttcgtattaaaaataataataataaaaaattaaataattttttttgatttatattttgagaattgttgattttttttttttattttgatttttaaaaataatttttttttttatttttttaaaaaatgtattattgtgtgttgagcgtttttttgattttgtatttggttacggtcgcgtttagtttgtttatttgtagtatattcgatatggattagtttatgcgtaagaggatcgaggcgattcgcgggtagattttgagtaagttgaagtttattagttttttagaagattattttgagttcgaggaagttttttcggaggtgatttttatttataatagtattagggatttgttttaggagaaggcgagtcggagggcggtcgtttgcgagcgcgagaggagcgacgaagagtattacgttaaggaggtttataaaatagatatgtcgttttttttttttttcgaaagtaagtatttattttgatttttattttttgaggtttagttttgttcggagtttttaaaatcgtagtagttttcgggatcgtttttttttttcgcggttttcgttcgtttttttttcgtttttttgttttttattttattattttttttttagttgtatgtttgaggttattaggttttaaaatgtttattttttattttattttttttattttttttttttttttaataattcggtgttttaaaaggcgttatttttttttttttttttttgaagttttttagtcggttattagttaggagttagttttattttgttaaattagaggtgtttttaggggtagagttaaattgaggaattttggtaggtttgttttttttgtttcgattggcgtggagcgcgtcgaattggtgtacgaagggttaaaaaaagtgttttaaaattagttttttcggaaggcgtttttttttcgtgttgatttattagttggttttttaagttttttttattgtttttaattattttaaaaatgttagtatcgtcgagataaaattcggtttggagatttttcgagaaatttatttggtttttagtttttgatgtattatttgttattattaggtgttttattatttaaaggtaaaattttataattacgttttttttttatttaatttggagtgtagaaaggataatttcgtttttgattgtgttttaaaaggttttgtttacgttattttttagaatatatttaaatttgttttttttatatttttagtgtagtagattattttttttacgggtttgttattttgtttttgttttttcgtaggttttttgtagttattttaatgtatttttaaaatttagagtagacgatagtcgtattttttttttttttttttattggtttttttgagaatagtgtttttaaaattagttggtatatagtagtaataggagtgaaatgatttattgtagaggaagggaatagatagtgt

SEQ ID NO: 1776 - DNA, 6522 bp, Artificial Sequence
  chemically treated genomic DNA (Homo sapiens)
atattgtttgttttttttttttgtaataaattattttatttttattgttattgtatgttagttggttttgaggatattgtttttagagaagttagtaaaaaaaaaaaaaaaaaatacggttgtcgtttattttgagttttaggaatgtattgaagtaattgtaggaagtttacgaaaaggtaggagtaggataatagattcgtaagaaaaatgatttgttatattggagatgtgaagaaggtaggtttgagtgtattttgaaaaataacgtgaataaaattttttaaaatatagttagaaacggagttgttttttttatattttaggttaagtgaaaagggaacgtggttataggattttgtttttgggtaatgaaatatttagtgatagtaaatgatatattaaggattgagggttaggtaggtttttcgaggggtttttaaatcgggttttgtttcggcgatgttgatatttttagggtagttagagataatagagaaggtttggggaattagttgataggttagtacggaaagggggcgtttttcggagaggttagttttgagatattttttttaatttttcgtgtattagttcggcgcgttttacgttaatcggagtaaagaaaataaatttattaagattttttagtttaattttgtttttgggagtatttttagtttgatagagtggggttgatttttagttggtggtcgattaaagaattttagggaagagaaaaagagaataacgttttttaaagtatcgaattgttagggggaagggaaagatggagaaaataaagtagaaagtaaatattttaaagtttgatggttttaagtatataattgaaaaggaggtggtggggtgaaggataggagaacggaaaaagagcgaacgggaatcgcgagagggaagggcgatttcgggagttgttgcggttttgagagtttcgggtagagttaaattttaggggatggaagttaaaataagtatttattttcggaggggaagaagggcggtatgtttattttgtaaatttttttggcgtagtatttttcgtcgtttttttcgcgttcgtaggcggtcgtttttcggttcgtttttttttggagtaagtttttggtgttgttgtagatggaaattattttcggggggattttttcgggtttaggatagttttttgggggattggtgagttttagtttgtttaggatttgttcgcggatcgtttcgatttttttgcgtatgaattggtttatatcgagtgtgttgtaggtagataggttgagcgcgatcgtgattagatgtaggattagaaaagcgtttagtatatagtagtgtattttttaaaaaagtggaaaaaaaagttgtttttaaaagttagaataaaaaaaagaaattaataatttttaaagtatagattaaggagagttgtttggttttttgttgttgttgtttttgatgcgaaatttttgtaaataatttagttaatgtttaatagaaaaacgtattttgtttgaatttttttaaaaagaaaaggttagtagttttaaaagtggaaatattaatacgggacgggtagagggaattttgattttggcgagtaagaagaaaaaaatttttggagtaatgagatggggaaaaaaagagacgagtggttattaagtagaaataaatttaagaggaggaagtggagtttagtgtgttagtttcgggtgcggagtggcggatttgaattcggttttttcggttaaaagggaagagatgaaaaggtttcggggttggtagttggcgaattgacgggaggggcgtcgggagcgcggtgaggggggtcgtcgaggttgatttgggttgaaatttatatatttaaagaaggagcggttcggttttgttttttattgcggcgttgagagtaggagtagtagtagtttcggagtagagaagcgtatacgtgtgtgcgtgcgtgtgtgtgtgtgtgtgtgtgtgtgcgtgtgcgcgcgttgggggcgagtttagcgtatcgcggggaggagggtgcgtttcgtagggcgttcggtattcggtcgggtgtcgtaggggtcgtagaggttgttgaggcggcgcggattttgttttgggagttgcgtttcgtggtttatattttggcgggcgcgcgttgattcgtttggttattttacgttgttgtcgtcgtcgtttgtaaacgtttttagtttttagtttttttttttttttgttttttttttttttgttttaaacgttaatttagttatagacgattagtcgtcgcggttgcgtttattttttgcggattataacggtagtttttgcgatattttggttggggagttttatttttgagggggttgcgtaggggtttttttggatttttatttttttttaatttttgttggtttttttttaacgtggaattgttcgtttagggtaggtaggtatttgttattttaaaatagattttttttgtttttttttgtttgtagtcgggtagttttttagtttgtttttggatgattttttagatcgttaggttaatattttttattttttttttttgttttttttatttgcgttttcgttttgttgtttttttttttttttttttttttatttttattttaatttgttttttttttgttaggagtttttggagtttcgttcggagcgaattttttgttgttagtagataatattacgattttgtcggggaggggagatttataagttttttttgaattacgtgtttgtttttaataaagtgacgtgttaggattatagttagaagttttttcgttatttagattacgagtttttttcgaatcgttgagggagtgtggaaatgaggatcgttgtgggtaagggaggaaggaggtggaatgtgcgttttgataatagtgatttacggtatttattttttagttattttggataggtttgttgaaggaaggataattaagtttttcgtttttatttagtgtagtttagttatagttttttaagttgaattatttgttttagaagggaaggttttttttttgtattatgtgtgtatacgtatttttatgggagggagtattagtttatttagggttaggttagtattgaagatatattttttaattttttaaatttatgttttattttttattttttgggatattttagtaggttgttattttagaatttattttgttagtttgttgtttataatgtatttttttgtttgtgaattgttggaaaatagagatttattaattttatttaaagaataaggtatatttgtttgttttattgatttgaatgaatggttatttttataatttgttgtttaagttattttttgtatggtttttttttttatttttttgttaggttaaatattattaattaattttattttttttatagtattaatttaggaagttggaattttaagtgtttgatgtttattgttttatattatttataatttgatatttttaattttaattaagtttaaattagatgaatataagaataatttttattattgttttatttttttttttttttttattttatttttagttatttaaagttaatatttttatttcggtatgattttgtagttatattgattagatagatgatttaaattggaaattttgttgaatgtatttttaaatttaagatatatatattgttttttattttagatgtttttgagtttagaaaagttataaagaattttttattatttttggaatttatattttagttgtgtatggggtttaggttattagtagagtattgaataaataaaataataatagttaatatatattatatttagtaatttgatgtgtgttgtgtatggttatttaatttttattatgaatttataaagtgggttttattatttatatttggtagatgaggagattgaggtataaagaagttaagtattttgttcgagattatagtaagtggtagagttggatttttgtagttaggatttattatgtttttatttattatgtatttttgagaaataatggttttagaatatgttttgataaataggaattttggagttaaataagtttgggagatattgggtatttttttgtttttttagattttttattttggaatattattatgttaaaggttttgaaatttttgtagaagagaaaatttttttatttttttaatttagtattttttaaatttttttgaatatagaattttttttattattatatattgaaaaattcgtaataataatatttgtttatatgtttttttgaattattttattaataatgtatagattagaaggagtaggttttttttttttatattagttttgagtagaaggaaatcggtcgttttagtagacgtcggaaattttaattaatcggggcgacggtgaaagtagtatatgtagttagaaagtttaaattagtgaggttaatatgatgatagttcgaggttagtaaaaaaattagaaaaataatttaggatgggggcgggtgtcgttaatgttagcgtatcgggggatttaagtaggagagttattgaaagtagggggtggaggaaaaaatgaatcgataataaaataaaaaaaaatagaattttggggagaataaaggtatagtttataaaaaataaaaaaaaaaagaaatattggtatataatttaggggttagaattattgtagtattttaagtaaatttagtttcgattttggttttagtagtaaggttttttttatatatatttaaggaaaatagggttcgttttaagttttgttgattattataatttcggttttagatatgtatttttatatttttaatatgtatttgattgagtatttattgtttatttaataattttttagatttgagatttttgatttatttataagtgggtattttaatttatttaaagtttaggaggttaagacgggaggtattggttaaagttgttggaatgggtaagtgtagtaagagagtatagtaggagaggaggagtttttttttattttttaaatgattagttttttgaagatttaatcggtaagattgttagagttgtttttttggtaatcgtaaatgaattattttttttattaaatggtttttataatgtttttttatttttatatttaatggaggttttatgtgtcggggtttttatagtttttatggtaaaagggtatttaaatgatatatatttattttgattattttaaggaggtaggagagtatagtggtttaaagggtaggttttagttatggttttttgggtttagatttttgttattttttggttttgtgattttgaataagttatttattgattttgtgagttttttattttattatgtttttatttttgttaaggaatttataataaaaatatttggttttttttttttttttttttcgttttttttgaaaagttaggaaagaatttaagaagaatttgtttttagttttgttttttagtagtttttgtaggtatattttaaatattatggtattttgtttttagtaattataggagggaaggataagaaaatatatttttggtgaataaaatgttaaatgattattaaagtttagttaagtatttacgattaaagttttttattaaagtttttaaatggaattttttgttttgaaattatagaggtagagagtggagttgtttttatttttagttattttttatttattaatgggtttatttatttaagtaatgtgggatttttataagaggttgaagaaaataaaattatttatttttgttttggagttttacgtttatggattataggtttttattaatattgattaaagtataattttatttgtaataattttggaagttttttagaacggttttaagtatgaaaaattaggaggtgaaaaaaagaaatatatggaacgacggtaattgattatatttttttttaaatagtgatatttgataaatgtaaaataattttttaatatgaaaatatattaaaagttttttaagattttatttataattttatatttgatattattatttaagaataatgtttggtttatattaattttgttttatgttttagatgtatttttataaatagttttattttattattttagttatgaataatgaaatagaaaggtggtttttttataaaaaataattcgattattatttttatttgtatttaaaggttaatttaaggaagaagtgttaaggaaaaatgaggaaataatgggcggggaggaaaatggaaatagggtgggtttaaagagattagaggtggtaaaagataaagagataggattaagaaaaattatagtatattagtaggttgtgaggttttaaagagataaatttattatattaatgatatattgtgggaatattattttattttttggaattatgattagttgattgattattgtttgtggtttttgggttatttataattttataattttagttttttag

SEQ ID NO: 1777 - DNA, 5813 bp, Artificial Sequence
  chemically treated genomic DNA (Homo sapiens)
tgtagtttgagttggaattttgtaaggagttgtaggagttggagtttgagaataaatgtgaggttttatttcgtgagagtttgtttttagagttcgttgaggaaatttttttttagtgtggttttgagaggatagtaggaaggttttaggaggatgggagtagaggaggttttaagagaaattttttttttttttgttttttttttagggtgtttgtttattattattttgttgatgcgggtattggattttttgttgtatgagaaggagattttgtagtatttttagatttttaaggtaagttttgtttgtagaatagattagggggaggtttagtaggtaggaggtaggtagttgatatgtatattttgtttattttatttattttaggtcgtggattttatgcgggtaacgtatttggatgatttgcgtagtaagtttttgttggagaatagcgtgtttaagatggagtatgtcgaggtgcgtgtgttgtatttggtttataaggtatgggttgttatgtatgtttttttttggtttttatttcgttggtttttttacgtttttgattttgtttttagttttaggtgtttttgtggatttttaattaagatagagtttatttttgttttttagtttgttttttttttaggtttttttgttatttagtttatttttttttttgttatttatttttaaatttcgagttattaggatttttttgtgttgttttttttttaggttggttatagttttatttttttttagagtgatcgttagtttattttttttatatattttagtatattttattttggagtaatttttaatatttgaaggttaaatattttttagagatttttgagaagttgtttaggttttatttttttagttttttttaatatattagttttattatattattatagtttatttttatttttgttaaatttatttttgttttattaggattagtttttatgggggattagtttttgtttatttagtattttttattggtttttgtattttcgaattttaggtttttttttttttatttattttattggttattttattcgtagtattgtttgttttacgttatgtattgttgtgggttgtaaggttagttttttatatgtttttattttttttttggttggggtttttaagggtttgtggggtatagagggtatgtgtttaataaatgttggtcgaggatttttttttaggttttttgggaagtttattattttttttttttttttattttttaggatttgatagtgttttgttatttggaatagttgtttttggttatttattttgatttgttatataatcgttttcgaattttgttatttgtattggttgttttgcgttgttttgaggtaaagtatttatgttttcgtttttgttacgggtggtttttttttttttttttttttttagaagtttgtttattttataaggagatgtgtaggattttttatttcgaataggtaattgcgtgttttttatttttattacgtagtttgattttgtgagtttttttgtgttttgtggattcgttattttgagttttttagttgttgaattatttttggttgatagcgtttgttttgtttttttgttttttttgtttttaggtgttgtaggttagtgataatgttatagagtttttggacggcgttattaatttatttcggttgtaggagttgttattgtgtaataatcgtatttttttttttgggtgttttttagatagtgggtaaagtgaggtgttattttgggaagggatagatagtaggtagggtatgtgttatttttttgtagggtaggagagagggggttttgtagtgtgagttgaagggggagagtttggggttgtcgggttattattgatttgtattggtggagttgtgcggagtggatttttttaagttagagtttataaatgggtagttcgtagttgttttttaggtttatgtagttttttgaaaattaggaatttttatattttaaaaaatatttagagttttaattttttttttaaaaattggaagttagagtaattttatattggtatttttatttagtagtttttggttattgttgaatagtaaatgtttttttggattaggttagatttttattttattatattttgtattatttttttgatattatattagtttgcgtggggtgttgcggtttatttttttttggttgattttgtgggtaggtatttgtagtttttgtttagagtttgattttttttagggagtatatgagatgtttattaaatagatttttaggtagtagtttttagtttttgagggtatataggagtaaataaattgggaggaatttgttaagttttttttgatttttttgaataaggtttttagtagtttgtagtgttttagttttttgttttttgttttaggttggttttttttaatttgtagggtaattcgttgtgttaagcggtgggtattttggagtaattggttgaattgttgtttttagttagtagcgtttttatttaagaggttttgttttttatttttgttttttaatttattgggattgaataaagaatggagaggtttttttaggttattaagttgttgtcgttgttattattatattattatttttattatttttattttttgaaaagaaagggaagagatatggggtgttgttagttttttttttttgcgttattttattgtttttttttagagagagttaaggttttagtgtttggggtagaatttagggtgaaggttgagtttttgtttattttttggtttggggtgggggttgggattgggtttagattttaagtaggaatagggtttgggtttaggttttggttttggtaagttatagagtagttgtgagtttttttagttggaagtattatataatttttttttatgatttttgtattttttatatgttttttttgttttggtttttatttattatagttggggaggtttaagggttttacgtttttaggaatgggttagggtgtttttgtttcgttttgtttgaataatattatcggtttttatgagtagtattttacggttgaagtatttttgagaatatttgatattatttgatttttatagagttttagggatgagatttttaggtttagtgtattgatgaggaaattgttgttgagatttgtttaaggtttttggtcggagcgttttagtattgaaattaaagttgtttttatttttggtttaggattttagatttatgtttttgtttttgtattgttaaggaatggttgggtagcggtttggttttagttttttgaggttttgagttgagtgtttgtttttatggtgtttttttatatatattatgtatatattttgttttgatttagagagttttgagtggtggtggggggaggggattggtttaggggttagggtattgatttaaatttggttgggtggggagagaaagattgattaaagttagggagagagtgtgataaaggtattttattggttttttgggatttgtttgggtttatatgtgtttatatacgttcggatagttagggttttgttttttttcgtatttgtagtgatgtataaattcgtagtttttgtataaagttttttggttgatttgtttggaagtttatatttattggtgtgtttattgagggtgttggaggtggggtatttgtttttattttcgggtaggttttggtgtttggagttggataagaaaaggtagtgtgggtgtggagggttttttgttagtttttggggtttttttgtttttattttttacggtatttttttgtttgatgtattattaaatagttttttttggattttgtttttttgtgtttttttgtcggtttgtttttattgttttttgttaggcggtttatgggtagagttgggatattagtgggaaggaaggaaagaaggaagaaggttttggttgacgggtttgaggataagatttaaggagagtttttttgaagatgtttagtttttttttttttattttgggatcgttttggtgttatttttagtgtttttttagtgacggggtggagtaaggatgtatatagtataggtgtttgagtcggttggtttggatttttaggaagaattttaggttggagaaaagggaattttttagtttaattgagtagagattttttttagtgagagaaaggtattttgtatttttggaagggggatttagtttttatttaagtttgagtggaaaggtttaaatattttttaattttcgaggttatagcgggggtgggggacgtgaaatgagattgtttttattttgatttttttaattttaaatttgagggtagtttatttatgtttggggttgtagagtagttgagaaagaagggatagatttgggggtggagggagttagaatatttggtagagttagtaggttaggggttagttggtggagttagtttgagggtttggttgttgatgttattagtttgtaatttgggattttaggatttttttgggtaggatgagttttaggattaggtttttgggttaattttatagggttgagtttggtttgggttgtatagaattcggtagtaggagtttgtgagagtagaggtaggtagtttaagtttgggattagaaggtcggttagatagggttgtgggtggaagggtttgtttgttttattgtttttgtagtttttttattcgggagaaggggttttttatatgtttagtttggtaggaattagtttggtgttaggggttattatagcggtggtttttattaaagtttagtttaagtttttagattttatttttgttttttttttagtattttttttttatttttcgtttagaggtttggtttttttttttcgttttttatagtagtttggttttttttttttatataagttatttattaggtttgtttttgcggtatttagtttgtgggttttgttttatttattttgatttgttttattttagttttaggatttagtattgcggttgttaatattgttgttaggtgaggggtttttacgggtattgtggtgtcgagtttaggcggtttatattattagaggtcgtgtttggatttagtaaggtggggtgtgggttagttgtgtatttgttagttttagttaggttgtttttaatattaagattttgttttttttgtgtataggtttcgggtatttgttatgttttattttttttggtagttttaagtggggttttttttgatttgggaatgttaaggattataggtttcggggttatttgtttgttttgtgaggaattttgagttgggggatttttgttaagaaatgagttttagaagttgttagtgttgtgtatttttagattgtagagttagtaggtggacggattaggtttagggatgttggagtattttgatgtgtgtgtagttgggttttgaggttgggataagtgtttatgtagggaattatgtggattttttgggatggatcgttgagtgggtttttttattgggtagtttttcggatgttgtttggtgggggtgaggggaaggtttttttttgtagtatgagaagtttttttgggtgagtttgaatggttttcgcggaaggtttttggatgtgtttggagaatttttgggttaaggtgggattgtttcggttatcgggtgggattgaattagttgtttggatggagggtttttgggttaattggttgggattatttgggttaaggagttattttgtttttttttaatagg

SEQ ID NO: 1778 - DNA, 5813 bp, Artificial Sequence
  chemically treated genomic DNA (Homo sapiens)
tttgttaggaagaggtagggtggttttttaatttaggtagttttagttagttgatttagaaattttttatttagatagttgatttagttttattcgatgatcgaaataattttattttggtttagagattttttagatatatttagagatttttcgcgaagattatttagatttatttagagaagttttttatgttgtagagaaaagttttttttttatttttattaaataatattcgaaaaattgtttaatgaagaaatttatttaacgatttattttaggaaatttatatagttttttgtatggatatttgttttagttttaagatttagttgtatatatattagagtgttttagtatttttgggtttggttcgtttatttgttagttttgtagtttagaggtgtataatattgatagtttttagaatttattttttagtagaaattttttaatttaaggttttttataagatagataagtgatttcggggtttgtggtttttggtatttttaagttagggaagattttatttggggttgttaggaggggtagggtatggtaggtgttcggagtttgtgtatagggaaagtagagttttggtgttgggaatagtttagttggggttgataggtatatagttggtttatattttattttgttggatttaggtacggtttttgatagtgtgggtcgtttggattcggtattatagtattcgtgggagttttttatttggtagtagtgttggtaatcgtagtattgagttttggggttgagatggaataggttaggatggatgggataggatttatagattggatgtcgtagggatagatttggtaagtgatttatgtgggagggaggggttaaattgttgtagggggcggagagaagaggttaggtttttgggcgggaaatggggagaagatgttagggagggagtaggggtgaggtttgggggtttaggttgggttttggtgggagttatcgttgtgatggtttttggtattaggttgatttttattagattgggtatgtgaggagttttttttttcggatgaagaagttgtaagggtagtggggtaggtaggtttttttatttatagttttgtttggtcgattttttggttttaagtttaggttgtttatttttgtttttataggtttttgttgtcgagttttgtgtagtttaagttaggtttagttttatgaaattggtttaggggtttggttttggaatttattttgtttagggaggttttgggattttaggttgtagattggtgatattagtagttaggtttttagattggttttattagttaatttttgatttgttggttttattagatattttgattttttttatttttaagtttgtttttttttttttagttgttttatagttttaggtatgagtgagttgtttttaagtttgggattagggagattagagtaggagtaattttattttacgttttttattttcgttgtagtttcgggggttaggggatgtttaggtttttttatttaggtttgggtgggaattgagttttttttttaggggtatagagtattttttttttattgagaggagtttttgtttagttggattagaggatttttttttttttaatttggaattttttttgggaatttagattaatcggtttaggtatttgtgttgtgtgtatttttattttatttcgttattggggaaatattgaggatggtattaaggcgattttaaggtagagaggaggaggttaggtatttttagggaggttttttttgggttttgtttttaggttcgttagttagggttttttttttttttttttttttttttattagtgttttagttttgtttatgggtcgtttagtagaagatagtaaaaataggtcgataagaagatataaggaaatagaatttaggaggggttgtttggtgatgtattaggtagggaggtgtcgtggggagtggggatagagaggttttaggaattggtagggagttttttatatttatattgtttttttttgtttagttttaagtattagaatttgttcgggggtgggggtaggtgttttatttttaatatttttagtagatatattagtggatataaatttttaggtaggttagttagagggttttgtgtaggggttgcggatttgtgtattattgtagatacgggaaggggtagggttttggttgttcggacgtgtgtgagtatatgtgggtttaggtagattttagagaattagtaggatgtttttgttatattttttttttagttttaattaatttttttttttttatttagttaggtttgagttagtgttttaatttttgagttagttttttttttttattattatttaggattttttaggttaggataaggtgtgtatatggtatgtgtggggggatattatgggagtagatatttagtttaggattttaaggagttgaggttaggtcgttgtttaattattttttagtaatatagaagtaagaatatgagtttagaattttagattaagggtagagataattttggttttagtgttgaagcgtttcggttaagaattttgggtaagttttaatagtagtttttttattagtatattgggtttaaaaattttatttttgagattttgtgaggattaaatggtattaagtatttttaaaggtattttaatcgtagaatgttatttatggggatcgatagtgttgtttaggtaggacggagtaaggatattttggtttatttttgggaacgtggagtttttgagtttttttagttatggtgaatgggggttagggtagggggaatatgtggaaggtgtaggggttatgggaaaaaattgtatgatgtttttagttggagaaatttatagttgttttgtagtttattagagttagaatttgagtttaagttttatttttgtttggaatttagatttagttttagtttttattttaaattagaaggtaaataaaagtttagtttttattttgaattttgttttaaatattgaagttttggttttttttgagaggaaataataggatggcgtagaaagaaggagttggtaatattttatgttttttttttttttttttaaaaaataaaagtgatgaaggtggtggtgtagtgatagtagcgataatagtttggtagtttgagagggtttttttattttttatttagttttaataagttaaagggtaagggtagggggtagggttttttaggtgaggacgttgttaattgaaggtagtagtttagttagttgttttaagatgtttatcgtttggtatagcgggttattttgtaggttgaggaggattagtttggggtaggaggtaagaggttggagtattgtaggttgttggaggttttgtttaggagagttaaggaaagtttggtaggttttttttaatttatttgtttttgtgtatttttaagagttggggattgttgtttggaagtttgtttgatgggtattttatatgttttttggagggagttaggttttaggtagggattgtaaatgtttatttatagggttagttaggaaagaatgagtcgtaatattttacgtaagttggtgtagtattaggggagtggtgtagggtatgataaggtggaaatttagtttggtttaaagagatatttattatttagtaatgattaagggttgttgagtgaaaatattagtgtaaggttgttttaatttttaatttttaagagaggaattagaattttagatgttttttaaagtatgaaagtttttgatttttaaaaaattatatagatttgaagaatagttgcgggttgtttatttgtgaattttgatttgaggaagtttatttcgtataattttattagtgtaggttagtgatagttcgatagttttaggttttttttttttaatttatattatagagtttttttttttttgttttgtaagagggtggtatatattttgtttgttgtttgtttttttttagggtggtattttattttatttattgtttgaaaggtatttagaaggaaggatacggttgttgtatagtagtagtttttgtagtcggggtaggttggtgacgtcgtttagggattttatggtattattattggtttgtagtatttgggggtagggagggtagggaggtaggataggcgttgttagttagggatggtttagtaattgaggagtttagggtgacgggtttatagagtatagaggggtttatagggttaggttgcgtgatggaggtggaaggtacgtagttatttgttcggggtggagggttttgtatatttttttgtaggatgggtagatttttgagggagaggaagaggaaaagaattattcgtgatagggacggagatatgggtattttattttaaggtagcgtagggtagttagtgtaggtggtagggttcggaggcgattgtgtgataagttaagatgggtgattaagagtagttgttttagatggtagagtattgttagattttggggggtgaagggaggaaggaggtgatgggttttttaggagatttgggagagggttttcggttagtatttattaggtatatgttttttgtgttttataggtttttggggattttagttaagaagaggatgggagtatgtgggaagttgattttatagtttatagtagtatatgacgtgggatagatagtgttgcgagtggggtaattagtggggtgggtgaggaggaggaggtttggagttcggaggtataggggttagtggagggtgttgggtaaataaagattggttttttatggggattggttttgatgaggtagagatgagtttggtaggaatggaggtgggttgtggtgatgtgataaaattaatgtgttgggaaggattaggaaagtggagtttggataattttttaggaatttttggaaagtatttggtttttaggtattggaggttgttttagggtgagatgtgttggaatgtgtgggaggagtgggttagcggttattttgaaggaagatgaagttgtgattagtttggggaagaaatagtataaggaggttttggtgattcgggatttgaaagtgagtggtaagaagaagaatgggttgagtgatagaaaggtttggaagaggagtaagttgggaggtagggatgaattttattttgattggaagtttataaaggtatttgagattgggggtaaagttagggacgtggggaggttagcgggatgagggttaggggaaggtatgtatggtagtttatattttgtgagttaggtgtagtatacgtatttcggtatattttattttgagtacgttattttttagtaagaatttgttgcgtaggttatttagatacgttgttcgtatggggtttacggtttggagtggatgaggtgggtagggtatgtatgttagttgtttgttttttgtttgttgggtttttttttggtttgttttgtagatagaatttgttttgagggtttggaagtattgtagggttttttttttatatagtagggggtttagtgttcgtattagtaggatgatggtaagtaggtattttgaggagagggtagggaaaaggagggttttttttggaattttttttgtttttatttttttgaggtttttttgttgtttttttagggttatattggaaaggggtttttttagcgggttttgggagtagatttttacggaatggggttttatatttatttttaggttttagtttttgtagttttttataggattttagtttagattgta

SEQ ID NO: 1779 - DNA, 5683 bp, Artificial Sequence
  chemically treated genomic DNA (Homo sapiens)
atggtaaatatttgaaaaagtttttacgttgaaatttaaattagattatatttaggatgttttataaggtggtattttttattaagatgataaaggataaatattggtggagttagagaggttgtttttaaatatagttttttttattagtaatattgtagtagtttgtatttatcgtttagagtatgaaaaagatttttgttaaagacggtttttggggatttattattattatatgttaagagtttgttttttatgtttttatttttttattttgttaattttttttatttttatttttcggtttagtgtgagattttattattttttttttttatttttttttttttatatttttggttttttagtaggttaatgtttttgtttttttattggaatttatttattttggttatttttttttttatgaatttgttggattatattttaaagttatttaaaagagggatataaagatataataaaatcggaaataacgtttatttttattagtttgtagttaagagtgtgtggaattagggtggttgtaggtaaagagatagggggaagggttgttttatgttatgggtaggatagtaaatggtgtaaattttttggaaagtattttagtaatataggtgaagagtttttataatgtgtttattttatgatttatttttattttttttattttaaaggaataagaagaggtttaattaaagtatgagtgaaaaggttatttaaatatagggaaaggggtcgttatgatgtttacggttttaagaaatagaaaataataatttggtttaaataataagtatataattaaagaaatttagaagtaggatttttttaagagttgagagatttagtagtttaaaaatgtgatttgatatacgagttttttttatgtttttgtttttttttttttaatattggttttatattaaatttggttttttagtggttaatagtattaaatagtatttatcggtatttttgttggtatttaaaagagatggagaaagtttgattttatatggtttttttttaaaagtaataaaggatttttttcggaagtttttagtaaatttcgttagatttgaattatatgttaatttttaaattagttattggtagggaagtgggaaaaaggggaggaggtgtttatttttaattaatatgtttatttttgtttattgagattaattttataaaagtattgttttagttttttgaagaggagtataatgtttgtgagttatttattatatttatttattaagagttaagggataattgagtaaaatggtagagttggtaggaaaatggtgagtagtttcgtttttttgtgttataattgatttgtatataaagagatttggaaatttaaatataagaattttttttttttaagtttagggttttgggtattttaagtttggtttttgtttgggtatagtggtttacgtttgtaattttagtaatttgggaagttaaggagggtggattatttgaggtgatgagtttgagattagtttggttaatatggcgaaattttaattttattaaaaaatataaaaattagttggatgtagtggtatacgtttggaattttagttatttaggaggttgaggtaggaaaatcgtttgaatttgggaggtaaaagttgtagtgagttgagattgtattattgtattttagtttgggagatagagtaagattttattttattttttattaaaaaaaaattttggtttttatatgtgaaaaaataaaagttaatttttaaaaattaaataataaagagtgttaggtgataagttttatgatagagataatgtgtgttttaaaatatatagtataaaatagatggaaaatattttatggagaagggagagtttgaattggtgtttgattgaaggataagaaaaatttgttggtaatttttttttggttttgatttttgatgtagttaaagtaaagtaatttagaattatgatttagggaatatatttagagagaaatgaatttatgatgtttttaatttgaagatgttatgattttagattattttagaatataatgattttttattgttttatatttgtaagaaatgttttattattgaaaatttgtaatatttaaaaaatttttatataaaattatagtttattttgttgttttatgttaaataaataaaatatttttttttaattatgttgttttttttaattatacgtaattttaaaattagttgtaattgatagttttttttttatatttattgttaatgtatttaggttaattttatttttaattagagaaatttagaaaaaggaaattttacggtgaaatgttatatgttttataatttttagtaattaatttttaaggatgataatttggtaaaaaagagaattggattagttttttgaaaggtttattatttcggtttatgttaattgattgttttaaaattatagtgtttttaggttgtagagatatatttaaaatggattattgtttttatattaaaggggataggtttttttttttttttttttatttttgttttttttaaagttgtatagaggtatatgaggtttggggaatatttgtagtatatgttggttggtaagaatgtgggtgaatttttgttaaggggcgtagatatttttttttttatgattttttttttttatttagaataattgaagtattatgataagaggaagggttttgtgtttgagataagtagtttttatatttgttagttttttttaataagaaagtttttttttgttatcgtataggttatttttttattggtaaagtatgatgaagtttggaaattgttgtttttgttttgttgaaagaagttaagttttaagaaatttgtagaggtatttttataattttttagttatggtagtatgaattttgaaggggtagtgagtgttggtttttattttgtttgtatagttaagtttaggggagataatttttttatataagatgtattttgtttttgtgggttttttgtagtttttaagtttttatttgatttgtatataatgatttagtgggttagaggagtttagagttatgagcggtttatttttttaagaattatttttgattgtttagtattatggagtaagtggaaagaagaaaaaaaaaatttaattatttttcgaagagtaagatgaatgttgtagaaggagaaggaaggggagggagatggatgggtgtcgattttagaatttttagatttgtttggatgaattattatttatgatttgcgggataagaatttgattttatttattaattagtagaaatttttttttttgttttttaatatttgaaatttaataaatatgtgttttaggaatatatcggttattttttagaggtattttatatatatattgagtaattagaaaatatttttttcgtaatatatatatatatatatatatatatatattattttgttatataatatttttacgtaagaaaagcgaaattgttgtttgatgaatgtaaatatttggttgtttgtagtagtcgggagttttgttaggtttaagtgttaagatgggaggtgaattttaggggtttttttttgttcgtgttgagatttttatttggttaagtttttatttatgttttggtttcggagcgagttcgatagcgttggattatagtagagggagcgaggcggttgacgttttatttcgaagagatgaatggaattttaggaagttagagttatgttggtttgggatagtggtttggagattagattttaatgatagaagtattaggtagcggtatttatggtaatgtgtgtatttatagaaatgtaatttatatttcgggtttaggagtcgaaaaatgaaaagaacgtttagggaggaaaaagggaaatataataataggtagagagtaatttattattttatgggtttgttttgtaaatagttgaagattttggagttagatggttttgtaaattttttaaataggagttacgttaagaagtacgagtgggtataaaaattgttttttaagatataattttaatttggtttgtggaaattggatacgagtaagtttttttaaaattcgagtagaaagtagttgtttttttcgggttttttgatgagaatacgtatatcgtttttaagcggtcggtcgagggagcgtcgcggtagcgggagaggcgtttttgtgggttttttggtagtcgcggtaggaaagggttcgaaggtagcgaaggcgaacgcggcgtattaatttgtcggtttcgtcgacgtcgcgtttattttttttcggggcgggcgtggggttagtttaggataggcgttcgggggacgcgtgtttttattttacggggacggtggaggagagttagcgagggttcgaggggtaggtattttaacgaatggtttttttggtgttttttgcgtttcgtcggtttatttttttttttataaaacgggtttagtttttagtatttatttttcgttattaattaggtatttcgggagattagttcgttcgaaagtttttgcgttatttcgcgggtttttttaggtggtttttttagtttcgttttttttcgggatgtttgttgattatttcgagttcgcgtggcgtaagagtacgagcgtcgagttcgtgcgcgttaaggttgcgtgggcgggtatcgatttttttgagaagttttagtgtttttaagtttcgattttcgttttttttattttttagttggaaagttgcgcgttaggtagcggggggcggagagaggagtttagattggtttttatttttcgttttttgttcggtcgtcgtttattggtcggaggaatttttaggaatgcgagcgtttttttaaaagcgcgcggttttttcgttttgttagtcgttgcgttcgagttggtttgcgagtttagggtttttgtcgttttttaggagtaatttttatttcggacgtataggtatttttcgcgtttttttagttttcgtcgttttcgttatcgttttcggtcgtcgcgtttcggtatatataggtaagtcgttttcggcggtcgtcgaggattaaagttgttcgggatatttatttggagcgttgaggttttagtttttttggtggatttcggaatttatatttttttcgttcgtttattttagttcgttttttttagtcgttggaggattttttagggtaaggttttagagttattttttttagttttgaggtttataaattaatttattaggatattttaagatttttttattttttgaagttttttttaagtttttgtattagtattttagggaagagtttgtattttttttgttttttttgtaattttaaattatagtttttgattttgtttattttcgattttttaaaagtttttaaattgttggttttgcgttttttatattttaaaattagtattttttttttttattttttttttttttttttttttttttttttatgttttttggaaagtaattttgttgttttttattttagtaaacgcggggttatagagggatggtttcggttttgtttttatgtttagtttcgtttttgtttatcgtttttttttgtttagttgatttgtgattttcggtttttgtgttttttgttatagg

SEQ ID NO: 1780 - DNA, 5683 bp, Artificial Sequence
  chemically treated genomic DNA (Homo sapiens)
tttgtagtaggaagtataagagtcgagggttatagattagttaggtagggagggacggtgagtagaaacggggttgggtatggggatagggtcgggattatttttttatgatttcgcgtttgttgaaatgaaggataataggattattttttagagagtatgagagagagagagagagagagagagagaggtggaggaaagagatgttggttttaaagtgtggggggcgtaagattaataatttgggggtttttgggaagtcgaaggtgagtaagattaggaattgtagtttggggttgtagggagggtaggggaagtatagatttttttttggagtgttgatataaaggtttaaggaggattttagagagtaaggaaattttggggtgttttgatgagttggtttgtgaattttaaggttggagaggatggttttggagttttgttttgaagagttttttagcggttgagaggagcgggttggggtaggcgagcggggagagtgtaggtttcggggtttattagagggattgaagttttagcgttttaggtggatgtttcgggtagttttggttttcggcggtcgtcgggggcgatttatttgtgtgtatcggagcgcggcggtcgggagcggtggcgagggcggcgagggttggaggggcgcggggaatgtttgtgcgttcggagtagaggttgtttttggagagcgataggagttttgaattcgtaggttagttcgggcgtagcggttggtaaggcggaggagtcgcgcgtttttaaaggggcgttcgtatttttggggattttttcggttaatgggcggcggtcgggtaggaagcgggaggtgggggttagtttgggttttttttttcgtttttcgttgtttggcgcgtaattttttagttagaaagtgaagggggcgggggtcggggtttgggagtattagaattttttagaaaagtcggtgttcgtttacgtagttttggcgcgtacgggttcggcgttcgtatttttgcgttacgcgggttcggggtgattagtaagtatttcgaaaagggacggggttggggagattatttaggagggttcgcggggtggcgtaggggttttcgggcgagttgatttttcggaatgtttggttgatggcgagaggtggatattagagattgggttcgttttgtaaaaagaaaaatgggtcgacggggcgtaggggatattaagagagttattcgttaaagtatttgtttttcgggttttcgttgatttttttttatcgttttcgtggggtgaggatacgcgtttttcgagcgtttgttttgagttggttttacgttcgtttcggagggaggtgagcgcggcgtcggcggggtcggtaggttggtgcgtcgcgttcgttttcgttgttttcgggtttttttttgtcgcggttgttagggggtttatagagacgtttttttcgttgtcgcggcgttttttcggtcggtcgtttgggggcggtgtgcgtatttttattaaggggttcggggaggatagttgttttttattcgaattttaaggaaatttattcgtatttagtttttataagttaaattgaaattgtgttttgaaaaatagtttttgtgtttattcgtgttttttaacgtgatttttgtttggagaatttgtagaattatttggttttagagtttttagttatttatagagtagatttatagagtaataaattattttttgtttattattgtattttttttttttttttttaaacgttttttttatttttcggtttttgaattcgaggtgtgggttatatttttgtgggtgtatatattgttatgagtgtcgttgtttagtgtttttgttattgaagtttggtttttaagttattgttttaagttagtatgattttagttttttggaattttatttattttttcgggatgggacgttagtcgtttcgttttttttgttgtgatttagcgttatcgggttcgtttcgaggttagggtataggtagaagtttgattaaataaggattttagtacgggtagggggaaatttttggggtttattttttattttagtatttaaatttggtaggattttcgattgttgtaaatagttaagtgtttatatttattaaatagtagtttcgttttttttgcgtgggagtgttgtatgataagatggtgtgtgtgtgtgtgtgtgtgtgtgtgtattacggaaagagtgttttttagttatttaatatgtatataaaatgtttttaaaagatgatcggtatgtttttaaggtatatgtttgttggattttagatgttgggaggtagaaagaaaagtttttattggttgatgaataaaattagatttttgtttcgtaaattataggtaatgatttatttaagtagatttgaagattttggaatcggtatttatttatttttttttttttttttttttttttatagtatttattttgtttttcgaaaagtaattgggtttttttttttttttttttatttgttttatgatattggatagttagaaatagtttttggagggatgggtcgtttatggttttgggtttttttggtttattggattattgtgtataaattagatgggggtttgagggttgtaagaggtttataaaagtagaatgtattttgtatgaaaagattattttttttaggtttagttgtgtagatagagtagaaattagtatttattgtttttttaggatttatgttgttatggttgagggattgtaggaatgtttttgtagattttttggaatttggttttttttaataaaataaggataatagtttttaaattttattatgttttattaataagaaggtgatttatacggtggtaggaaagagtttttttattagagaaagttgataggtataggagttgtttattttaaatataaagtttttttttttattatgatattttagttgttttgggtggaaaggaaaggttatagaagagggagtgtttgcgttttttaataggaatttatttatatttttgttagttaatatgtgttgtaaatattttttaaattttatatatttttgtgtagttttgagagaagtagggatgggaaaagggaaaagaaaatttattttttttaatgtgagggtaatagtttattttgagtgtgtttttataatttggaagtattgtgattttaaggtaattaattaatatgggtcgaagtgatggattttttagggagttggtttagtttttttttttgttaagttgttatttttgaggattagttattgaaaattgtaaggtatatggtattttatcgtaggattttttttttttaagtttttttaattggaggtgggattgatttaaatatattggtagtaagtgtgaggaaagggttgttagttatagttagttttaaaattgcgtgtaattaaggagagtaatataattgagaaaaaatattttgtttatttagtatagaatagtaaggtgggttgtgattttgtgtaggaattttttaagtgttgtaaatttttagtagtggaatattttttataagtgtgaagtaatgaaaaattattgtattttagaatagtttaaaattatagtatttttaaattgaagatattataaatttatttttttttgaatatgttttttagattataattttaagttgttttattttaattgtattagaggttagagttaggaggaagttattaatagattttttttgttttttaattaaatattaatttaagtttttttttttttatgaggtgttttttatttgttttatgttgtgtgttttaaagtatatattatttttattataaaatttattatttaatattttttattatttagtttttaaaaattagtttttatttttttatatgtaaagattagaatttttttttggtggggggtgggatggagttttgttttgttttttaggttggagtgtagtggtataattttagtttattgtaatttttgttttttagatttaagcgatttttttgttttagttttttgagtagttgggattttaggcgtgtgttattatatttaattaatttttgtattttttagtagagttggggtttcgttatgttggttaggttggttttaaatttattattttaggtgatttattttttttggttttttaaattgttgagattataggcgtgagttattgtgtttaggtaaggattagatttgaagtgtttaaagttttgggtttgggaagagagagtttttatgtttaaatttttaaatttttttgtgtataagttaattatggtatagaaggacgggattatttattatttttttattagttttattattttatttagttattttttagtttttggtgggtaaatgtggtgagtgatttataaatattgtatttttttttaaagaattgaagtaatatttttatggaattgattttagtgggtaggggtaggtatattggttaagggtaaatattttttttttttttttttatttttttgttagtgattgatttaggaattggtatgtgatttaaatttgacgaggtttgttgaaggttttcgggaaaagttttttgttgtttttaaggaagagttatgtgaaattaggttttttttattttttttggatattaataagaatgtcgataagtgttgtttggtgttattggttattggggagttaagtttagtgtgaaattagtgttggaggaggaagaataaaagtatagaaagaattcgtatgttaggttatatttttgagttgttaaattttttaatttttaagggaattttatttttagatttttttggttatgtgtttattatttaagttaagttgttgttttttattttttagaatcgtagatattataacggtttttttttttgtgtttggatggtttttttatttatgttttgattaaatttttttttatttttttagaataagagaagtaaggataggttataggataaatatattgtaaaggttttttatttatattattaagatgttttttagaaaatttgtattatttattgttttgtttatggtatgaggtagtttttttttttatttttttgtttgtagttattttagttttatatatttttaattgtaggttggtaagggtgagcgttattttcgattttattgtgtttttgtattttttttttgggtaattttgagatgtagtttagtaggtttataaagaaaagaataattaggatggatggattttagtgaaggggtaggggtattgatttgttaggaaattaagggtatggaggaaagaagatgggaaaaggagatggtgaggttttatattgggtcgaaagatggaaatggggaagattagtaaggtaggaaggtgaggatatggagaataggtttttaatatgtaataatgataaatttttaaaagtcgtttttggtaaaagttttttttatattttggacgataggtgtaggttattgtagtgttgttgatggggaggattgtatttgggagtagtttttttggttttattaatgtttattttttattattttagtaaaaaatgttattttatggggtattttaaatatggtttggtttgggttttagcgtggaagtttttttaagtgtttgttat

SEQ ID NO: 1781 - DNA, 6485 bp, Artificial Sequence
  chemically treated genomic DNA (Homo sapiens)
  unsure 83: n is a or g or c or t
tgaggttattatgttttttttatgtttttaaagtttttttcggtttggtgttgtggtttaacgtttgtaattttattattttngggaggtcgaggagggcggattattttaggtcggagtttaagattagtttgattaatatggagaaatttcgtttttattaaaaatataaaattagtcgggcgtggtggggtatgtttgtaattttagttattcgggaggttgaagtaggagaattgtttgaattcgggaggtagagattgtggtgagtcgatattgtgttattgtattttagtttcggtaataagagtaaaatttcgttttaaaaaaaaaaaaaaaaatttttagattacgtttattttattttgattatgtaagtattaagtatttggtatagtaaaaattataagaaaaataatagtagtttttagtaagaattttggtattcggagattatgatgattgatattttgattttttattttattatttttttatttttcgtattttatttatatagtggttagtggagttaagcgatattattttgtagatatttttgtgttaattaagttgttataaaatgtttggagatattaagagatgtgttttgtgttcgacggaaaatagtttgaattttaattatattgaggtttatttaggtataggtagcgataatgttttagtgggtgtgggtgggggtgggggatagaggtttagtggaggtttgtaatatgtgcggtgattgtattttaagaaagaaattattacgtatgaggaagtgggttagatttagtatttcggagtgatagttagggatagtagaataattagggtgttttgggaggttgtttttgaattttttaaatttattttttttttgggaggtaaagatttgagtttaaggggtaggaggtggggggagtatttattttatgaggaatttatttagtttattttttggggatattatttaatttttggggattttggtttttttatcggtaatataggggtgggatgggaatgttaataattttttagattaatttttttacgttttattggggattacgggttggtattttttttatttagggcgtgtagttcgggaattttatttaggttattaggggtaaataaaggggagggggttttttttttcgaaagggcgtaaggaaattcgggggggggcgaggggataaatataagcgaagagacgtgtcgggatgggagataaggagtaagaagaaggggagaggggcgggaggcggagtagaggcggagagagagaggggggtagggagagaagagatgtttaggggggagcgtgacgggacgagcgttggaggagagaaaagagggcgaaagacgaagataatataaaataagaattggcgacgagaaagagagggggggagggagggggtacgaggagggaggaagggaacgagggtaggaggtaatagcgagcgatagaaagaagtaggaaagaaaaacggaaagagaaagaaagaaggggaaggcgggggggggagggggacgcgaaaaggaaaaaaagggggggagagcgaggaggacgaaagggagaaggagggagaaggggggatgaggaggggggggagtaagggcgacggagggaggacggaggcggcggagagaggaagataaggaagaggaacgaaagaataacggttacggatgggtcgggaggagagagagaaggggtgcgagggagagaagaagggcgcgcgcgggtaggtaagtttttgtatttttagtagagttagggttttattatgttggtttggttggttttgattttttgattttaggtgatttatttatttcggttttttaaagtgttgggattataggtatgagttatcgtgtgtggtttgaagtaggtatttttatttttattttataaatgaggaaattgagtttggatttagaattttttatttttattgtattgtattgttttttgtttaagaattatgtaattttggggtgtaaaatgttaataaaagtaaatgtaatattttttagtttgttttatttattatttattttttttagtcgtaagaatattttgtattagatttattgtagtaagttgtttgagaattgaggtgagtgttaataaatggattatgggttaggtatggtgatttacgttataattttagtatattttgatgtttaggtgggagaattgtttaaggtttggagtttaagattattttgggtaagatggtgagatttcgttttttatataatatttattaattatttaggtatagcgttacgtttttgtttttttagttattatttaggttttcgcggtttgatcgtttttttttatagttttaagtttttattcgttttgattatgttttttcgttttttttttttttttttttttttttttttttttttttgtttttcgtttttttttttttattttttttgtttttttatttttgtttttttttttttttttttttttgtttattttcgttttatttttttttgttttttttttttttttttattttttttttgtttttattttttttttttttttttttttttttttttttttttttttttttttttttttttttttttttttttttgtttttatttttttttatttttatttttttttttttatttttttgttttttaggtttatttttttttttttttttttttttttttttttttttttttttatttattcgtgtgttcgcgtttttttttttttatcgtttcgcgtttttttttttatttattttttttttttcgtttttgatattagtatttcgtattttattgatagttataaatagttggtgggtgattattaggttcgggggtttttttttagtaaattggggcggcggcggtagtttcggcgtaggtgtgttgggtttgagtcggcgcgggttcgatttagtagtagcggttcggatcgcgggtgggggaggggagggaggggttgggatcgggtaggggaggagggaggggcgggaggggaagggggagcgggggagggggaggggagggattagggggcgcgaagagggggaggagaggcgggttcggagtttttcgttgttggcggttatagggcggttggattaggaggtcggtgtttagtttaggaagggagttttaggttagggaggggtagaggttaggtttgaggtttggatcgttttgtgagcgaggattcggtttcgttcgaaggatgaagatttgtttttaaagatgataacgtataggaaaggtttattagtcgatttttttttgtttgggtttatagcgttttttaaatttttattatttttttttattgtttagtttgtttttttattttttttttgaggtcgttttttatttttgtgttatttaggatagggatttagttagaaatcggtagtatttttttttttgtggagtgatagtattttttttttattgtaatttatttttaggcgtattcgatagtttttttttgtttttttattttttttttttatttaagggattttttgtttttttagtttatttttagtttttttttttttggttttttggttatgtttgtttttttgttttttgttttttttttttatatatatttattatttttttagttattttagtatttttttttttaattttgggagatatttcgtttggttggacgggaaaattttaggatttaggttatattttttagtagatatgtttatttttggggaggaggaataggagagagtttgaggaagttttgggggatagggggatgatgggattaaggttaggttaggaagtttttgaggatagagattgtggggagattgggattgggaagaaagtaaaggagttagagttagggttaaaggaaaaggggggttagtagggaggtatttgcgggggaggtttagtagttgttttttttaagatagggatatatgggtttggttattttttttgttatatgtggaacggtaggagatggaagacggagatagaataagtaaaggagggttttgggtatagaggtttgtgtgtgtagttatttaagttattggattttagtagacgagtatttaagtttaggtttaatttagtgtacgtgtgcgtatatatatgtgtttcgtatttgatagtttatttaattcgtttaaattttttttttataatattaatttataataggagattttttttatgtgggtaatattcgtgtttttatttcgaaagggggaatgataagataggattttttaggggattatagaaagaaaagtaggaaagtaagtattttgttggattttagtagtaggtatgatgtttagggaaaagaaatttggatagttagggagtgaaaattttattaattttaaataagatttttgtgttttttttttagtaatataaatgttttgttagattttttttggaaaaaaatttttgtttttgtttttttttaggttttaggttgtttatgtttaggaaaagatggatttttttatttaaatttttttcgtggtgtgtgtgggtggaggagtggattttggtttaggtaggggttttagggaagagaaggcgttattttcgggggtttttattagtgtttggtggtttttttttttgattgggtagaagtggtttaggtaggcgtatgatttgttgttgtggaggggttgtgttttatcgttatatgtttttttatttatttgttttttagagggttgtttgttgtgtatttgggttttggagtttttttttattcggtgagtggttagtagggtgtggggttatgtgagggtagaaaggatagtaaagagaaatgggtttttagttgggggaggggtaggtaaattggaatttataggtattgatttttgtcgagaagagtgtagtttttttagaatgggaggagtagggtagagtaggggtagggggtggggtgttggtttttgagggattgattatttatttggtggaatatagtatagttttggttggttttaaggaaaggggatatgagtttagggagaaaataagagagggagttgtatttagggtttagtaaatatagtagtaagatggatatagttttaatttttatttttagttggttatttttcgttagtttaaggttttgaatttggtgttggggaagttgggttaggtaagttagggcgtaaggagagggtaatgggaggagggtttatttatgttgatagatttataggaaattttaatattgaattaggtgtaagtttttttgtataatttgtgaaaggaggaggaagttatgtggggggttttgtgaaggaatcggaaggggttttgttaagggggtagggaggtaggtgtgagttatgagatagatatgttagtgggcgtttaagataaggtaagtttttaaggtgggtattatttagtaggtgttcgtttttgggtagttggttttaggaaggaagttttagaattgttagtttattttttggttttagataatggagtattttaggatttggagtttagagaaaagttttagtggttttatgtgtgggggtagatagggaaagaatagaggttaattttttttatatcgttttttaattttgatttttagtggttttagttatagttttgtgtagtttttttttttagttttattttttatcgtagaagttattttttaatatattgcgttcgtttgttagttttttatttaggttttgtattttattttttatttttttttttaggttgaagttataatattttttttttttatttttattttagattttttttgatttaataattaaggttgtttagaatttaaggttaattaagatatgtgtgtatatatattatgttttgttgtttttagtaggggtaggtggtattaaatttatgttcgatttattgaggagttttgataaaaaggagatattatatgtttttttgtttttttttttttttttttttttttttttttttttttgagacggagttttatttttattgtttaggttggagtgtaatggtgcgatttcggtttattataattttcgttttttaggtataagcgatttttttgttttagttttttaagtagtttggattataggtatgaattattatattttgttagtttttttgtatttcgtagagtcggggttttattatgttagtgaggttggtggcgaatttttgattttaggtgatttattcgttttggatttttaaagtgttgggattataggtatgagttattgtattcggtatattatatgtttttattataagaaaatgtgagagaatttagggttttggtagttttaggttggttagtattttaagttttttttagtatttgtttattttgttaggtagtttttttttagaaatttggttaaatgtttattttttttgttatttttagg

SEQ ID NO: 1782 - DNA, 6485 bp, Artificial Sequence
  chemically treated genomic DNA (Homo sapiens)
  unsure 6403: n is a or g or c or t
tttgaaagtagtaagaagagtgaatatttaattaagtttttaggaagagattgtttggtagggtgaatagatgttggggagggtttgagatgttgattagtttggaattgttaaagttttgaatttttttatatttttttgtgatgaaagtatatggtgtgtcgggtgtagtggtttatgtttgtaattttagtattttgggagtttaaggcgggtggattatttgaggttaggagttcgttattagttttattaatatggtgaaatttcggttttacgaaatataaaaaaattagtagggtgtggtggtttatgtttgtaatttaagttatttgggaggttgagataggagaatcgtttgtatttgggaggcggaggttgtggtgagtcgagatcgtattattgtattttagtttgggtaataagagtgaaatttcgttttaaaaaaaaaaaagaaagaaagaaagaaagaaagaaagtaagaaagtatatggtgttttttttttgttaggattttttagtgaatcggatatggatttggtgttatttatttttgttgagagtagtaggatatgatatgtatatatatatattttaattagttttaaattttgagtaattttggttgttaggttagagaaaatttgggatggggatagagaaggaaagtattgtggttttagtttggagaagagagtggaaaatgggatgtagggtttgggtgaggaattggtaaacgggcgtaatatgttgaggggtaatttttgcggtggggagtggggttggggaggggaattgtataaagttgtaattgggattattagaggttaggattaaaaggcggtatgggagaaattaatttttattttttttttatttatttttatatataaagttattggagtttttttttggattttaagttttgaaatattttattatttgaggttaagagatgggttaatagttttgggattttttttttgagattagttgtttaggaacgggtatttgttgggtgatgtttattttaggggtttattttgttttaggcgtttattaatatatttgttttatagtttatatttgtttttttgtttttttggtagaatttttttcggtttttttataggattttttatatggtttttttttttttttataagttgtgtaaagaggtttgtatttgatttaatattgggattttttgtaggtttgttaatatgagtgggttttttttttattattttttttttgcgttttggtttgtttggtttagtttttttagtattagatttagaattttaagttaacgaggaatgattagttaagaatggggattggggttgtgtttattttattattgtgtttgttaagttttaagtgtagtttttttttttattttttttttgggtttatgttttttttttttagggttagttagggttgtgttgtattttattaagtaagtgattagttttttagaaattagtattttattttttatttttgttttgttttgttttttttattttgggaaggttatatttttttcgataaaggttagtgtttgtaggttttagtttgtttgttttttttttagttgggagtttatttttttttgttgttttttttatttttatataattttatattttgttggttatttatcgggtggagaagggttttaggatttaagtgtatagtaggtagttttttggggagtagatgggtaggaagatatgtggcggtggggtatagtttttttatagtagtaggttatacgtttgtttgggttatttttgtttaattagagaagggagttattagatattggtgaaggttttcggaagtgacgtttttttttttttggagtttttgtttggattagggtttatttttttatttatatatattacggagaagatttggatagggggatttatttttttttggatatgggtaatttgggatttggagggggataggagtagaagtttttttttaggaggaatttggtaggatatttgtgttgttggggaagaagtatagaggttttgtttaagattggtggggtttttattttttggttatttaaattttttttttttggatattatatttgttgttgaaatttaataggatgtttgtttttttgtttttttttttgtaattttttagggagttttattttgttattttttttttcgaagtgggaatacggatattgtttatatgagagaaattttttgttatgggttggtgttatggggaaagggtttggacgggttgagtggattgttaggtgcggggtatatgtatgtgcgtatacgtgtattgggttaagtttgagtttaggtgttcgtttgttggggtttagtggtttagatggttatatatatagatttttgtgtttagggtttttttttgtttgttttgttttcgttttttattttttatcgttttatatgtgataagaggaataattaggtttatgtgtttttgttttaggaaagatagttgttggatttttttcgtaaatatttttttgttggtttttttttttttttggttttggttttagtttttttgttttttttttagttttagtttttttatagtttttgtttttaggggttttttggtttgattttgattttattatttttttgttttttagaatttttttaggtttttttttgttttttttttttaaggatgggtatgtttgttgagaagtgtggtttagattttggaattttttcgtttagttagacgagatgttttttaagattaggaaggagggtgttgggatagttgggaggatagtgggtgtgtgtgggagggagagataggagatagggaggtaggtatgattagggaattaagagaaaggaggttgggagtgggttggagaggtagagggttttttgggtgaaggaagggggtgagaaagtaagaggggattgtcgaatgcgtttgaggataagttataatgagagggagatattgttattttatagaagggggaatgttgtcggtttttggttaggtttttgttttgggtaatataagaatgaggagcgattttagagagaaggtagggaggtaggttaggtagtgagagagggtggtgagggtttggggggcgttgtgggtttaggtagggggagatcggttgatggattttttttgtacgttgttatttttaaagataagtttttatttttcgggcggaatcgggttttcgtttatagagcggtttaggttttaggtttagtttttgtttttttttagtttgaggttttttttttgggttggatatcgattttttggtttagtcgttttgtggtcgttagtagcggggggtttcgggttcgtttttttttttttttttcgcgttttttggttttttttttttttttttttcgttttttttttttttttcgtttttttttttttttttgttcggttttagtttttttttttttttttttattcgcgattcgggtcgttgttgttgggtcggattcgcgtcggtttaagtttagtatatttgcgtcgaagttgtcgtcgtcgttttagtttgttgaggaggagttttcgagtttggtgattatttattaattgtttataattattagtggaatacgagatattaatattagagacggaaaaaggaagatagatgggagggaaggcgcgaagcggtgggagggaggaggcgcgaatatacgagtagatgggaagggagaaagagaagaaaaagagagaaaaaagaagaataaatttaaaagataaagaaatgagagagggaggatagaaatggaggaaaataagaatagaaaagaaggaaaaagaaaaaaaaaaaagaaaaaaaaagaaaagaagagaaaagaaaaaaaagaaaatggggatagaaaaaaagtaaaaaaaaaaaaaagaaatagaaaaaaatggaacgaaagtaggtagggaaggagagagaaagaaaaataaaaataaaggggtagaaaagataaaaagaaaaaagcgaaaaataaaagaaaaagaggggagaaagaaaaaaaaaaagagaacgaagaggtatggttagagcgagtaaaaatttagaattgtagagaaaggcgattaagtcgcgggaatttgaatagtagttgggaagataggagcgtgacgttgtgtttgggtagttggtaaatattatataagaaacggggttttattattttgtttagggtggttttgaattttaggttttaagtaatttttttatttaagtattaaagtgtgttgggattatggcgtaagttattatgtttggtttataatttatttattgatatttattttagtttttagataatttgttgtagtggatttaatgtagaatgtttttgcggttgagaaagatagatgatgaatgaagtaggttgagaagtgttgtatttgtttttgttggtattttgtattttaaaattgtatggtttttaaataggagatagtatagtatagtaaggataaaagattttggatttagatttagtttttttatttgtaaaatggaaatgagagtatttattttaggttatatacggtggtttatgtttgtaattttagtattttgggaggtcgaggtgggtggattatttgaggttaggaggttaagattagttaggttaatatgataaaattttggttttattaaaaatataaaaatttatttgttcgcgcgcgttttttttttttttttcgtatttttttttttttttttttcggtttattcgtggtcgttgttttttcgttttttttttttgttttttttttttcgtcgttttcgtttttttttcgtcgtttttgtttttttttttttttatttttttttttttttttttttttttttcgtttttttcgttttttttttttttttttttttttcgcgtttttttttttttttcgtttttttttttttttttttttttttcgttttttttttttgtttttttttatcgttcgttgttgttttttgttttcgtttttttttttttttttcgtgttttttttttttttttttttttttttcgtcgttagtttttgttttgtgttattttcgtttttcgttttttttttttttttttaacgttcgtttcgttacgtttttttttgagtattttttttttttttattttttttttttttttcgtttttgtttcgtttttcgtttttttttttttttttttattttttattttttatttcgatacgttttttcgtttatgtttgttttttcgttttttttcgggtttttttgcgttttttcgaggagggaggtttttttttttttatttatttttaatggtttgggtggggttttcgaattgtacgttttggatggaaagggtattaattcgtggtttttagtagagcgtaggaggattgatttaggaggttgttagtatttttattttatttttatgttgtcgatgaggaaattaaggtttttagaagttaagtagtatttttagggaatgggttgaatggattttttatgagataaatgttttttttattttttgttttttaagtttagatttttgttttttaggagggaggtgagtttggaggatttaggagtagttttttagagtattttgattgttttgttgtttttgattgttatttcgaggtgttgagtttggtttatttttttatgcgtggtgattttttttttggggtatagttatcgtatatgttataggtttttattgggtttttattttttatttttatttatatttattggagtattatcgttgtttgtgtttgagtgaattttaatgtgattagggtttaagttgtttttcgtcgggtataaaatatattttttaatgtttttaagtattttgtgataatttagttggtataagggtgtttatagggtggtgtcgtttaattttattggttattgtgtgagtggggtgcggggggtgggggggtggtaaggtaagaagttaaaatgttagttattatggttttcgagtgttaggatttttgttgaaaattgttgttgttttttttatagtttttgttatattaaatatttagtatttgtataattaaagtaaaataaacgtaatttgggaatttttttttttttttttgagacggagttttgtttttgttgtcgaggttggagtgtaatggtataatatcggtttattataatttttgtttttcgggtttaagtaatttttttgttttagtttttcgagtagttgggattataggtatgttttattacgttcggttaattttgtatttttagtagagacggggtttttttatgttggttaggttggttttgaatttcgatttgaggtgattcgtttttttcggttttttnagagtggtgggattataggcgttaagttatagtattaggtcgggaaaaattttaaaagtatagaagaggtatgatgatttta

SEQ ID NO: 1783 - DNA, 13606 bp, Artificial Sequence
  chemically treated genomic DNA (Homo sapiens)
  unsure 4649, 7634, 7657: n is a or g or c or t
gagttcgagattagtttggttaatatggtgaaattttatttttataaaaaataaaaaaaaattagttaggtatggtagtgggcgtttgtaattttagttatttgggaggttgaggtatgagaatcgtttgaattcgggaggcggaggttgtagtgagtcgagattatgtaattgtattttagtttgggtaatagagcgaggttttgttttaaaaaaaaaaaaaaaatggaattaattaagtttttatggtaaatagtggggggaggggttggggttttttaagatagtggtttttaagataagtatagggatttggggttatttgggaatatgttagaaatgtaaatttttaggttttattttaggtggattgaattagaagttttgggagtaaaatttagtaatttgagttttaataaggtttttgggattttgggaagtttgagatttattgttttaggttttcggtttttaataattagttttttaggagaatttagtttaagatttggggatatgttagttgggcgtggtggtttatttttgtaattttagtattttgggaggttgaggtaggcggattatttgaggttacgtattggatattagtttggttaatatggtgaaatttcgtttttataaaaaaatataaaaattagtcgggtgtggtgtgtgtttgtaattttagttgtttaggaggttgaggtaggagaattttttgaattgggaggtggaggttattatgagttaagattatatattgtattttagtttgggcgatagagtgagattttgttttaaaaaaaaaaaaaaaaaaaaagatttgggggtatgtttattttttttttttgtgttgttttattttaaagtttagttatagggcgtaattagatttagtttgatttagagtaaaaagtatttattgagtgttttttgtgtgtagattttggaaatgcgggtaaatggtataatagtagtaggttaatgagtagttgagattttaaagaggagtggaaggtattgggtgaggggagagtgaaagaaagaaaaggttagaattttatttgtttattttttttttattttatttatttttttttttgtttcgaggtttttattagaataaatgattgtggtttaaattgttttgaggttggaggtagaaattaagtttttatttatttttgttggttatggggattttaagttagttaatagttataggtttttgattttttatgagtaattaaaagaagatgaggattatgtatataggtatatataaatattttttgcgattttagatgttagggtagggagattaagagaaggaatgaagttttagaaggttggaagttttttgggtaaaatgagtttagtagataataagtaggaaaagttttttaataggggagggcggggttatttttggtttattttatttttttgagatttagaaattgtggttagaggaaataaagggtttttaaggtaaattataaaagtttttgagaatgaaatttgagtttggaaagagagtagagaatgagggatggatattagatttaaagggtttttttatataggtaaatgggggttagggggttgggagggatgtgagttatgtttagtttttttttttgggttttttttttattataggtagtttttaggagtagaatttttgttattgttttagtttgagtagttgatttttggtttttttttgttttattttttgaggaataagtttttttttgatttttatagagtttttttttttgtttttttgtaaggttttttttttgtgtttgaaaggttttgggtttaaggagtagatagttttgtaggtttaattgtagtgatttatattggtttttttttaggttttgggtgcgggggttgagattttaagataggaatttgggaatttggtataggtttatagatgatgatattaggtagataggttgtaaaagtggtattgagggattggattttgaggtaggggatgttataggattatgtttttattttgttatttgagggttttttatggataagagattagaagagattaaatgtaaaaatatttgagtagtgattttttggagaggagttagtggtttttgataggtttagtttttattaatgagatttgggagtggtttttgtttgttttttgtttttgttgaatttatattggtttgttgtaggggattggaaagatgatgtggaagaatgagttcggattttagttgatttattttagggaaacgaaggttgggtaaaagttagatatgtagaaatttacgtatttttaggtttaattataatatagagattttgtatttttttagatttaatggttttgagaaggatttagaaggagtttttaagattaattattatttataaagtttttattttaggattttggtaattgaatttttttttttagttattagttttttggaatagagaaggtagtttttgaaataggtgtttttttttttttttattataagttatagtgtttaggatgattattgtttttagattgtgtgatttgttttggtaaggaaattttattgtggggggaggaaatgaggtagtcgtgatataaagtgatggatgagttttttgtttagtagagagagagagaaagtcggtaggttgtgtagaattgagtggtttttgggtttaaagggtttttttttggttaagttttattttaaagtttaggaagtttatagtttggcgttatggaagagagataaaatcgtagtatttttttttttttttttttggatattattatttttgttttgatttagattatcgttggttttttttattgttttttagttttgtttttgtgatgtagagtataaatgtattttatgtattgggatttttttttagttttttgagtagtttaattttaagggattagttttatatagggtagagtatagattttgagtattatatattgtagttttgttttttagggtttcggttaaatttgattatcgaggaggtggtatcgattggtagatagttatttttagtgtattttattttatttattgtattgattttgtatattgtagttttttgttttatattgtagttgttgtttgttttttgtgagtttagattgaatataggttcgtttattgtatggaggtttcgtacgttgtagttttaattttttattatagttgttattgtatattataggttttttttatttatggtatgtttttaatattattattgtattttgtacgttataggttttattttagttgttttttttatttttatggttttagggattttaagagaggtattttttttttcgttaagtattacgaattttagtattttttgtgaaagaagtggttttaatagtattgaggatgtaggtggttgagattaagatatgagtaagggtagtttaatttgggtaagttgtggtttagaattttatattcgttaagtgattttgtttagtataaattgggcgattagtcgagtagttttttttaatatatatatatttatatatatatatatttatatatatatttttttttaagagtagattatgtagttagggttttattttgagagtcgtgggaaggttgtggttttcgttggtaaaattgggttaatgatagtaggggaatcggcggggttaggggggtgttggggtaattagggttcggtttggcgttaggagattttgagatgaaaggtgttttggcgttattgggttggttttatgtttatgaatgtaggtgtgtggtgtgtgtatgtgtgtgttgggggtggggttggtatggtggagattttttttttgggttgggttagggggtttatttgtatgtagtttatcgttttttttagattgattttggtattatttggatttttgtgggagtaaatatggggggaaatattattattcgggagttaggaattgagggggtatggtagattttgtttttttttcgagtttaggagagggagtagattgttgggggaaatggttggtgatagagaatagaaagagtttatatggagaagggtgacgttggaaaagggaggtagtggatcggtattgatgttagaaatgagaggggagggaggtaatagggaatgaatttttataaggatgaaaaacgtaagatgattgaagttaaaaggatattaggggttatttgtttagttttcgtagttgaagtttgaggaagttttgttttcgatagtagtggcgatttgttaaggttatatagtgagttatcggcggagaagggattcgaatttttaaataaattatatttgtaagcgtttggtgtttagatttttttttcgatgtataaggtataggttgttcgtcgatatttttttttttatttttacggtgtatattcgaaaattttttaattttttcggtaagtaaaggttattttttaatgatattttttttaaaatatgttattaagtatttatttttgcgggagtcgttcgggttggggagggcgagttcgagcggggcggggtagaggcggtcgaggggcggtcgggtttttggcgggggtttcggggcgcggtagggggcggggggcgggggcggncggcggcgaggcggtttgtagggagtagtcgcgagtcggtcgggcgcgtcgagttcgagttttagtcggagcggggcgggggagggaggagttagagcggtcgtcgtttttgtcggaggagtcgcggggtcgttatattcgtttttcgtttttttcgggtttattggtatttatattcgggcgtaggaggcgggcggttcgggttttatcggttttttatggacgtttttagtacggggcgttgagattttcgcgtcgttgtttatttcggttcggcgcgttacgtcgaggtaaggaggagggagcgagggggtattaatatgtaaatgttttgcgattgattatgtaaagtcgcggggtttcgtggttagtttttaggcgggttaggggcgtttagggggtgtttgttgttagttttagttttttttggcgttttagtgattttgttacgagttcgggagtttgtaattgacgttttggggaagggaggtgttgttaggaggtcgttgggtttcggggttcgtaggcggagatggcgttcgagtttttttttggagggttcgttcggtttttgttcggttagtttgttgcgtattttcgggtcgggtttcgttgtcggtcgtcggagttttttcgttcgtcgcgtcgcggtttgtttacggtgcgtcggaggtttgtttttttagtttttatttttagtttatgaggttcgagtggtttttgtaaagttgtttttagttgcggagggtagtatgagtgcggtggcgcgggtgggtttgtacgggttcggggagagggaagttttttcgttttattcgtttttcggttgagtatggttgtttggttgtaatattgttaattgtaaaaacgcggttgttgggggggaatgtgtgtgtggaaggggtgtatttggtggtgtttagatgattaggagagttgttggttggggaggagagggagaaatggatttgtgtgtgtgtattttattttgtttttttttttttgtaacgtgtttttggtgttttttttttatttggggtttttttttgtttagcgtgaaagaaaggtttggggggatgataggggtaattgaaagaattatcgttttaggggtgggggtgggggatatagaaggaaagttagtgaggtgggagtttgttttttagtgttggttttggttttaggagggggaggggatgaagggggttgttgtttaaaatgaggggggaagtaaaagtgatacgtagatatagagatatgtttatatagatagttatatgtatatttagggatatttaggtagatttaaggataggagttattggatatatttatatggggataagggaagagataggttgttgttgtatcgtggagttttgaggggtgggatatatttatgggagattaagagtatggggatcgatttatgtatatatttacgtatagggttatacgtagatgttgttatatattggggtaaggaggagttgttgttatttatatataaaaagttattgttatatgtatgtatgtatatagagtaattgtatatagtagtataattataaaagattttgttatttataggtatatacgtgttcgtatgagtttagttatatagatattattgtttgtcgtgatagtcgttgttatttagttagatgtaaatatagttatatattaatatatgtatatataatttagtaataagtatttttttggattttttattgtggagttttgaggttttgtaggtaataaaatttttgtttttaagaatattaaatttggttgtatgaaaaagtgtttttgcgtaatggtgtaaagtatgtatttttaatgatacgtttttggtttttatcgtttgagatattattttattagatagtgagtttttggagatttgggagaattatttaaagagttttggattttacgtagagtttagtataagggttgttttgtaaatatttgttagttgattgattgtggaatttgtagatataggtgtatttatttgtatatggttttttgaatttaggtgtagaacgagtttataaggtttaggtttttatagttgtaggtttatattaatagtcgtgtttatataattttagatgtatataattgtagtttgtgtagtcgagtatatatttagatgtatataattataaattttttttttttagtttttttttttttttttttttttaggtttagttattgtgcgggaatgggttgtttttttttttttttttttttttttagagggatagagaaataagagtaaagatagtgggtttaggggggttttagagggtcgagttatgggtttaaagtagtgtttagtgatttttagaagttaggatttttttgattgttggggaaggggagagttgtttttttttttattttaaaagtttaggggtgtttaattgtttttgttttgagttatttgtttgggttttttttgggaatagttagttatttttagttgagtttttgcgttttattttgagtttggtttttttttttatttgtatttttttgtttaaatttggaagttttttttaagaggttatcggttggcgagtgtttgtgtgagtgatatgtatttttgatttggaatttttttttaattttgtttttttgttgttttgttttgtagtgtttgattttttttttttttttttttgtttttttgttagtttgtaatttttttttattttgttgttattttcgatttatttttgtttttgttttagagttggggattggtagtaatgttttttatatttttttagttgttaatatttaagtttcgtttttttgttttttttgcgtagtttttggggttagtttgaggttggggtggggggcggggggtttagttggttgtttaggattttttgtatttttttagtgtcgtagttgtggttagtaagttttaggggttgggaatgggggaggggggggggttanttattgtttatgttgattttttnggtttgtatgtttggagatattagttttgtgggtatttttagggtgtaggttgtagttagttagtagtttttaaataagttatgaagaggttttttttatattggtttaagttggaaaagaatcgtttttatgggtagtggcgggagttggtaggattttgttgagttgggtttattgtagggtttataatggtttttttttatatttttggtagttgaggtttattttagagatgtttaatagttgtgttttttttgtttagttttagggtttggttttgagggtatagttgtttagattaagtatgtattaagcgaggtttttttattcgtgagtgtaggttttagtttagaaggggtattttttttggagagggaatttgaggagggggaatttaggtaggagatatcgagttcgggggtattaagtatttttcgttatgtttttttttagttttggattatttggaggtggaggtatttggtagagaatttatagggtagttatagaggggaaagattgaggtttggttttagggaatatatagttggatgaaagaataaggtattgggtcgggtatagtggtttatattcgtaattttagtatattgggaggcggaggtaggtagattatttgaggttaggagtttaagattagtttgattaagatggtgaaattttatttttattaaaaatataaaatttagttgggtgtggtggcggggttttgtaattttagttatttaggaggttgaggtaggagaatcgtttgaatttaggaggtggagattgtagtgagttgagattgtattattgtattatagtttgggtgatagagcgagatttcgttttaaaaaaaaaaaaaaaaagaataaggtattatttattaagtaggtgatatattattatagttgagaatagagatgatggtgatgattatgacggttatgattgatttggattgtttaggtttgaattttagttttgttatttgttggatgtgtgattttgagtaagcgatttaattttttcgttgttttatttgtaaattggggatgattatatttattttatttagtttttttgaggaaaaatgtttttaaaagtgtttagtttataataaattgtatatgtgagcggttgtgatgggtgaaggaagttgtgggtttggggttttttagattttttagagaagtttcgtggagaattgggttttttagatattagtgagattggggtttggggtagtgggtttttaatttttagtttttttatcgttatgtaattttttttttttagacgaatttttgtagcgtggaattagtgtatggtatttaaagatttaaggtaggtttttttgttttatttttttttgattttcgttttttagtttataaggagtttttggttttttagtttgggatatattttattagttaggggtatttgtataaatttttgggtattattgtatttttgtttagggtttgagttttgggggtgggagagagagaataaggaaagtcgtttttttttttatgtgtgggtttaaagaggaggtagtgtttttttttttttttgggagtttagtattggttaattaggatttagttttggttgataggtattagatttttttgttttttatggagtggtatttagtgtgaaaggtggtggtagagagaaattgaagtattgagtaatgattagtgtggtgggtatagtattttgagatttagtatttgttttgggttgtttttttgtttttgtgagtttggtgattaggattttttttttaaattttttttatttagttttgttttttaaggtgaaggaaggataatgggaggatattttgtaggggtgacgggaagtttttggagtgggaattaattttaattttagttttcggttgggtatagtggtttatgtttgtaattttaatattttgggaggttaaggcgggaggattatttgaggttagtagtttatgattagtttggttaatatagtgagattttatttttaaaaataattttaaaaagttagttaggtgtggtggcgtatgtttgtgttattagttatttgggaggttgaggtcggaggatcgtttaagtttggaaggtcgaggttgcggtgagttgtgattgtgttattgtattttagtttgaataatagagtgagattttttatatatatatttttttaaaatagatagaaaataaaataaaaattttaattttagtttttatggttgtaaaggtgtttaggggattttggagaattgttgtgttttttggggagggaggtaagtatgatcgtggtgggaagattattggttgggagttgggacgtttggttgttgatatttattagtcgtatgattttgggtttgggtttttattatttagagataatggtttttgttttatttaggttgagggtaaataatataaggtgggatgatttttgtgtttaatttatgttgtattttggtatggtgagtaatgtttgtggatttttttttttttttagggtttggtatatgttagggtggggtatatatatgttgtttggaattagagatagtttttagttttttattgaagtatttggggttggtgtgtggtgggggtatatgtggttttattttggtgttatttggtaggttaaagttggggttatagggatttttttttcggtatgttattgcgtgaggtggtttagagggagggttagaagtttgttgggtagataagggaagtaagatgggtgttattggtgtttaggaaatattatttttgtttcgttgttttgggggtgggtattaaaggttgatattaaagttttagttatgttttttagtagtggttaagagtagaatgattggattaagtttttggtttattttttttttttttttttttttttttttaaagaagatatcggtttttggtttttagagttttagttgtttgttttttttttttttttattaggtatgggggtggggaaataggggaatcgaggttttggtgtttttcggtatttttgtatatattagtgagtgggtgtgttgtgtacgtatttatgtgagagtgtttttgtgtatgtgtgggttggggagggttttgaatattttttggaacggtatttagagttttgtggttttgcgtatgcggggtgagtgtgtgtgtttgtacgtgttcgtgtgtgtgtcggagatttagttgtatttacgcgcgcgttttttttttttttttttttttttttttttttttttttttttttttttttttttttttttttttttttttttttttttttttttttttttttttttttttttttttttttttttttttatttttatatatataattttaatttttttttttttttttttttttttttttttttttttatttttttttttttttttttttgtttttgtttttttgtttttgtttttgtttttttttttttgtttttgttagttttgtttggttaggggttagttttagtttttggggtgtttgggagaatatttttttttttttttttttttttattattttttttttttttaggttatgttttttagggtttgtaggtaattttttttattgttttagatgagggagtgaggagggaggattttaagttttgtgtttatggtgttatttgtagtaagtgttttggtttcgtgatatttatgtttttagtatttagttgttttagtttttagttttaattattcgttggttgttgggggagggtggggagaatgtgtcgtgtttagtttgggggtgtttttgtttttgtttttttggttatttggattttttgtttttatttttgaggggaattgggtagggggggcgtgaagttttgtgggttgataaggaggggttgagttttttagtatgggtgtgggtatgattatttattagtggttatgggggatggatgtgatttgggaggagatttttagatttgggtatttattttgatgtttggttggagttggttcgggtaggaggagggagaggagagtagtaggtgggtgaggttatgggggagtcgagtgggaagtagtttttgatgttaatattgggtatttggtttaagttaaggttgttgtttatgtttttttgtttttgatttgtagggggggttttttgttatatttttttggggcggggtggggaggattttttgtttaagtaattaattttttttttatgaggatttttattttattttttattttttagtttttaaggttttatagtggttaggtgatgagttattgttttttagttttagaatttgttttttgggggtttagtgagagtttattaaggggtgtcgtttttttttttttcgttttttttatgtttgttaggttggggttttgagtttgtgtgtatttttttgttatattatatttgttaaatagtattttttttttcgtttttatttttttttttttttttggtattaggataatagagagttgggtggggtagttttgtttaatttatatttgagaatagaatagggggtatgggaaaggatagggagtttcggttttagagaggtttttgttttttagtatgggggtatatgtcgttgttgtagtattgttattattatagatttttaggggtttttggtgtgggtggttgtttgtggtgttcgtgttggtatgggggggtagtgttgtttatagacgtttgtgtttatgtatgtttatttatgtgtttgggttacggtgtttcgttttgttgttggttttgtttaattttttgatttatttttttttttttttttattttggttgtttattagtttttgggggtggggttagggggtttaggggtgaggttttttatgtagtagttacgtgatagaggttgaggtcgtatgttggggagttgtattttttgttttttttttattcgttatatttgtttgtgtgtatatagatagtaagttataggtttgtagtttagggttagaggtgtaatgtcgtaggaatggtgggttcggtttggtattgttttggattttaggtagtagaataaggttagtattagggttaggttgtgaggtttattttatagttatttgtttattagttgtgtgaatttgagtgaatgattaagttttttgagatttagtttttttatttgtgaagttttcgtgttttttttggagggtatagattttttttttagttaatatgtgttagttttttttttttttttttttgttattttggtcgatagtagtttagttaaattaattgagaagtttggttttttgtttgggaagtgggattcgagattttgcgtgggaagttttggagtttttgaggggttagagttggggattataatttggttggtagtatgggaggttagttttttatagtttttaatatttttttttattaaggtataaagatgggtatttatgtttattgcgtgtcgttttatgttttattttttttttatagatattttttttgtttatgttgaaaattgtttgtttttggtttttttttgtttttataatatagatgagttttaggaaagtttttttagaggggtggtaataatagttagtgtttaatagttgtttattaagggttaggtatttgtttgaatatgaagattgagatatattatttagtatatgaatgattttattttttttttttatttttttttatgtttggggtttaggaggtggatttttaatttcgtttgttgtatttgttatttaagggattattttggttttttttttatgtttgttttttttgttttttgttgttttgttatgggattttaaagttttaaatgttgttattaaagggattttatttatttttttatcgtgatatttttttatttttgttttttttttttttttatagg

SEQ ID NO: 1784 - DNA, 13606 bp, Artificial Sequence
  chemically treated genomic DNA (Homo sapiens)
  unsure 5950, 5973, 8958: n is a or g or c or t
tttgtggagagaagagagaggtaggggtaagaaggtgttacggtaggaaggtgggtaggatttttttggtggtaatatttggggttttgggattttataataagatagtagggggtaggaagggtaggtatagagaggggattaggatgattttttagataataggtatagtaggcgagattggagatttattttttaagttttagatatgggaaggaatggagggagagaatgagattatttatgtattaagtaatatgttttagtttttatatttagataaatgtttggtttttaatgagtaattattaaatattagttattgttattatttttttagaaaagtttttttgaaatttatttgtattataggggtaagaggggattagagataagtagtttttagtataggtagggagggtatttgtgaaggaaggatgggatatagagcggtacgtagtgagtatgaatgtttatttttgtgttttaatagagagagatgttgaaagttgtagggaattgattttttatgttgttagttaagttatgatttttaattttggttttttagggattttagagttttttacgtaaggtttcgaattttattttttaggtagaggattagattttttagttggtttagttgagttgttatcgattaggatggtaagggggaaaggaaaggaaattaatatatattaattggagagagaatttgtattttttaaagagggtacgagaattttatagatgaggaaattgagttttagaaagtttggttatttatttaagtttatataattagtaagtaggtggttgtgggataagttttatagtttggttttaatgttagttttgttttgttatttggagtttagggtagtgttaagtcgggtttattatttttacggtattgtatttttgattttgggttgtagatttgtggtttattgtttgtgtgtatataggtaggtgtggcgggtaggagggggataaagggtatagttttttaatatacgattttaatttttgttacgtggttgttgtataggagattttatttttaggttttttggttttatttttaggagttgataagtagttagggtgggaagagagagggagataagttaggggattgggtagggttagtagtagaacggggtatcgtggtttagatatataaatgggtatgtatgggtataggcgtttatgggtagtattgtttttttatgttaatacgggtattataggtagttatttatattaagggtttttgggagtttgtggtggtggtagtgttgtagtagcgatatgtgtttttatgttgaggggtagaggtttttttaggatcgggattttttgtttttttttatattttttgttttatttttaggtatggattgagtagggttgttttatttaattttttgttattttagtgttaggaaggagaggaggagtgaaggcgggaaggaaggtattatttggtaggtgtgatgtggtagaggagtatatatagatttagggttttagtttggtaggtatgggggagacgggaggaggggaggcggtattttttggtgagtttttattgggtttttaggagataggttttggagttggggggtagtgatttattatttagttattgtgggattttagaggttagagaatgggagatggggtggggatttttataagggggagattggttatttaaataaaggattttttttatttcgttttaaaagaatataataggaaattttttttgtaggttagagatagaaagatataaatagtagttttgatttgggttagatgtttagtattaatattaaagattgttttttattcggtttttttatagttttatttatttgttgtttttttttttttttttttgttcgggttagttttagttaggtattaaggtgggtgtttaggtttggaggtttttttttaggttatatttattttttatgattattggtgggtggttatgtttatatttatgttggagaatttagtttttttttattagtttatagaattttacgttttttttgtttaattttttttaggaatggaggtaggagatttaagtagttaagaaagtagaagtaggagtatttttaagttgggtacggtatattttttttatttttttttagtagttagcgggtaattggagttgggagttggggtagttgaatgttggaggtatgaatgttacggggttaaggtatttgttgtagatggtattatgggtataaggtttggggttttttttttttatttttttatttaaggtagtagaagaagttgtttgtaagttttgaagagtatggtttaggaggggagggaatggtggagggggaaagaaagggagggatgtttttttaggtattttagaggttggagttagtttttaattaagtagaattggtagaggtagagagagagagatagagatagagatagagagatagggatagaaagggaggagggagggaataggaaggagggaggaagggggagggaagagagaaagattgagattgtgtgtgtgagagtgagagagggagggagagaaggagggagagagagagagggggagggggagagagagagggagagggaagaggaagggagggagggagagagagagggagggagagagggagggagagagcgcgcgcgtgaatgtagttgagttttcggtatatatacggatacgtgtagatatatatatttatttcgtatgcgtagagttatagggttttgggtatcgttttaggagatatttagagttttttttagtttatatatgtataaaaatatttttatatggatgcgtgtataatatatttatttattgatgtgtataaaaatgtcgaaagatattaaagtttcggtttttttgtttttttatttttatgtttggtaaaagagaaaaagaaataggtagttggggttttgggagttaagagtcgatgttttttttagaagaggaaaagaggaggaggaggaggtgggttaggggtttggtttaattattttgtttttggttattgttgaggggtatggttgaggttttggtattaatttttaatgtttatttttaaaatagcgaagtaaggatagtattttttgggtattagtaatatttattttgttttttttgtttatttagtaaatttttgattttttttttggattattttacgtaatggtatatcggaggggaggtttttatgattttagttttggtttgttaagtgatattaaggtggaattatatgtgtttttattatatattagttttagatattttagtgagagattgagaattgtttttggttttaggtagtatgtgtatgttttattttggtatgtgttaggttttgggaaaaaaggagaatttataggtattgtttattatgttaggatgtaatatggattgaatataggggttattttattttgtgttatttgtttttaatttgagtgagataggaattattgtttttagataatgaaaatttaggtttaaagttatacgattagtgaatgttaatagttaggcgttttaatttttagttagtgatttttttattacggttatgtttgtttttttttttaagagatataatagttttttaaagttttttagatatttttgtagttatgagaattagagttggggtttttgttttgttttttgtttgttttgagaggatgtgtgtgtggggggttttattttgttgtttaggttagagtgtagtggtataattatagtttatcgtagtttcgattttttaggtttaagcgatttttcggttttagttttttaagtagttggtaatataggtatgcgttattatatttggttaattttttaaagttgtttttagagatggggttttattatgttgattaggttgattatgaattattggttttaagtgattttttcgttttggttttttaaaatattgagattataggtatgagttattgtgtttagtcgagaattagagttgagattggtttttattttaaaggtttttcgttatttttatagggtatttttttattgttttttttttattttgaggggtagggttaaataaaaggggtttggagaggggattttgattattagatttataaaggtaaagaggtaatttaggatagatgttggattttaaagtgttgtgtttattatattggttattatttagtgttttagtttttttttgttattattttttatattaagtattattttatggagggtaggggaatttggtgtttattagttagagttgggttttggttgattaatgttgggtttttaggagggaggaagggtattgttttttttttgagtttatatataagagaggggacggttttttttgtttttttttttttatttttagagtttagattttgaatagagatgtagtgatgtttaaagatttatgtaggtgtttttagttggtggggtgtgttttaggttgaggggttaagggttttttgtaagttgaagggcgagggttaaaggagggtggggtagaggggtttgttttgggtttttgggtgttatatattaattttacgttgtaaaaattcgtttgggaggaaaagattatatgacggtgagaaggttggaaattggagatttattgttttaggttttagttttattgatgtttaggagatttaattttttacgaagtttttttaagaaatttgggagattttaggtttatagttttttttatttattataatcgtttatatatatagtttgttatgaattaagtatttttaaaaatatttttttttaaaaaagttaaatgaggtagatatgattatttttaatttatagatgaggtaacggggaagttaaatcgtttgtttaaagttatatatttagtaagtgatagagttgggatttagatttaggtagtttaggttaattatggtcgttatgattattattattatttttgtttttagttgtgatggtatattatttgtttgatagataatgttttgttttttttttttttttttttgagacggagtttcgttttgttatttaggttgtagtgtagtggtataattttagtttattgtaatttttattttttgggtttaagcgatttttttgttttagttttttgagtagttgggattataggatttcgttattatatttagttaagttttgtatttttagtagagatggggttttattattttggttagattggttttgaatttttgattttaggtgatttgtttgttttcgttttttagtgtgttaggattacgggtgtgagttattgtgttcggtttaatgttttgtttttttatttagttatgtgttttttgagattaagttttagttttttttttttgtagttgttttgtgggttttttgttaagtgtttttatttttaaatagtttaaggttagaggggagtatagcgagaagtgtttggtgttttcgggttcgatgttttttgtttgagttttttttttttaaattttttttttagaagaggtattttttttaggttggaatttgtatttacgggtgggagggtttcgtttagtatatatttagtttaggtagttgtgtttttagaattaggttttgaggttgggtaaaaaggatatagttgttgggtatttttgaggtgggttttagttgttaggggtgtggagaaaggttattgtgagttttgtagtggatttaatttagtagggttttgttagttttcgttattgtttatgggggcggtttttttttagtttgggttagtgtggggggagtttttttatggtttgtttaagagttgttagttggttgtagtttgtattttgagggtgtttatagaattggtgtttttagatatgtaggttngaggggttagtatgggtagtggntgattttttttttttttttatttttagtttttaaaatttgttggttatagttgcggtattaaggaagtgtaggaagttttgagtagttagttgagtttttcgttttttattttaattttaagttgattttagaggttgcgtagggggggtagaggggcggagtttgggtattaataattggaaaagtatgaagaatattgttgttagtttttagttttgagataaggataggggtagatcgggggtagtaatagggtgagagagagttatagattggtagagaaataaggagagagagagggagaattagatattgtaagatagagtaatagagagatagagttagagagaaattttaagttaaaagtatatattatttatatagatattcgttagtcgatggttttttaaggaaagtttttaagtttggataggagggtataggtgggaaaaagggttagatttaaggtggggcgtaggaatttagttggaggtgattgattgtttttaggaaagatttaggtaaatgatttagagtaggggtagttagatatttttgagtttttagggtagggaggagagtagttttttttttttttaatagttaagagaattttagtttttagaagttattggatattgttttgagtttatgattcggttttttggaatttttttgaatttattgtttttgtttttgtttttttgtttttttaaaagaaagaaagaaaaaaaaaaaatagtttattttcgtatagtggttgagtttagaggaaaaaggggaggaggaagttgaaggggaaaaatttgtgattgtgtgtatttaagtgtgtgttcggttgtataggttgtagttgtgtgtatttggggttgtgtggatacgattgttggtgtggatttgtaattgtggggatttgggttttgtgaattcgttttgtatttgagtttaggggattatgtgtaaatgagtgtatttgtgtttgtaggttttatagttaattaattaataagtatttatagagtagtttttgtgttaggttttgcgtgggatttagagttttttaagtgatttttttaggtttttaagagtttattgtttagtagggtggtattttaagcgatagagattaagaacgtgttattgggaatgtatgttttatattattacgtaggaatatttttttatatagttaaatttaatatttttgggagtaagggttttgttgtttatagaattttagagttttatagtaaagagtttaggaaaatatttgttgttaagttgtgtatatatgtgttggtgtgtaattgtgtttgtatttgattgagtgatagcgattgttacggtaagtaatgatgtttgtgtgattgggtttatgcgagtacgtgtgtgtttgtgagtgatagggttttttgtaattgtgttgttgtgtgtaattgttttgtgtgtatgtatgtatgtgatagtgattttttatgtgtgggtgatagtaatttttttttgttttagtgtgtgatagtatttacgtgtgattttgtgcgtgggtatgtgtatggatcggtttttatgtttttggttttttatgggtatattttattttttagagttttacggtgtagtagtagtttgtttttttttttgtttttatgtgggtgtgtttagtagtttttgtttttgagtttgtttgggtgtttttggatgtgtatgtggttgtttgtgtggatatatttttgtgtttgcgtgttatttttgtttttttttttattttggataatagttttttttatttttttttttttttggagttaaagttagtattgaggggtaggtttttattttattggttttttttttgtgttttttatttttatttttggaacggtggtttttttaattgtttttgttatttttttaggttttttttttacgttggataagggagggttttagatggagaaggggtattagagatacgttgtaaggggagggaaataaggtggggtatatatatataggtttattttttttttttttttttagttagtaatttttttaattatttaggtattattaagtatattttttttatatatatatttttttttaataatcgcgtttttgtaattagtagtgttgtaattagatagttatgtttaatcgggaggcgggtgaggcgggggaattttttttttttcggattcgtgtaagtttattcgcgttatcgtatttatattgtttttcgtagttggaggtagttttgtaaaggttattcgggttttataggttaggggtgggggttgggggggtaggttttcggcgtatcgtaaataaatcgcggcgcggcgggcgggggagtttcggcggtcggtaacggggttcggttcgggaatgcgtagtagattggtcggatagaggtcgggcgggttttttagggggaggttcggacgttattttcgtttgcgaatttcggggtttagcgattttttagtaatattttttttttttagggcgttagttgtaagttttcgggttcgtgatagggttattggggcgttaggaaaggttgaggttggtagtaggtattttttgggcgtttttagttcgtttgggagttggttacggagtttcgcggttttgtataattaatcgtaaggtatttgtatattaatgttttttcgtttttttttttttatttcggcgtggcgcgtcggatcgggatgggtagcgacgcgggggttttagcgtttcgtgttgggggcgtttatggggggtcggtggggttcgggtcgttcgttttttgcgttcgggtgtgagtgttagtgagttcggggggggcggggggcgagtgtggcggtttcgcggttttttcggtagaggcggcggtcgttttggtttttttttttttcgtttcgtttcggttggggttcgggttcggcgcgttcggtcggttcgcggttgttttttgtaggtcgtttcgtcgtcgntcgttttcgtttttcgttttttgtcgcgtttcgggattttcgttagaggttcggtcgtttttcggtcgtttttgtttcgtttcgttcggattcgttttttttagttcgggcggttttcgtaggagtgggtatttggtgatatattttggaaaagatgttattaaaaaatagtttttgtttgtcgggagaattggggggttttcgggtgtgtatcgtgagggtggaggaggaagtatcgacgagtagtttgtattttatatatcggggagaaagtttaaatattaaacgtttgtaggtgtagtttgtttgggagttcgggtttttttttcgtcggtaatttattgtgtgattttgataaatcgttattgttgtcgggggtagagtttttttaagttttagttgcgagggttgggtaggtgatttttgatgtttttttaattttaattattttacgttttttatttttgtgggggtttattttttgttatttttttttttttttatttttaatattaatatcgatttattgttttttttttttaacgttatttttttttatataggttttttttattttttgttattagttattttttttaataatttgtttttttttttgagttcggggaggggataagatttgttatatttttttaatttttagttttcgggtggtggtatttttttttatgtttgtttttataaaaatttaaatggtattagagttaatttaaggaagacggtgggttgtatataaatggattttttaatttaatttaaaggagaggtttttattatgttagttttatttttagtatatatatatatatattatatatttgtatttatggatataaaattaatttagtgacgttagagtattttttattttaggattttttagcgttaggtcgagttttaattattttagtatttttttggtttcgtcggtttttttgttgttattagtttagttttattagcgggggttatagtttttttacggtttttagggtggggttttggttatatagtttgtttttggggaggggtgtgtgtgtgagtgtgtgtgtgtgtaagtgtgtgtgtgttagggggagttgttcggttaatcgtttagtttatattgggtagagttatttggcgagtgtgggattttgagttatagtttatttaagttgggttgtttttgtttatgttttagttttagttatttgtatttttagtgttgttggaattattttttttatagggggtattggagttcgtaatgtttggcggaggggagggtattttttttggggtttttggaattatggagatgagaagagtagttgggatgaaatttatggcgtgtagagtgtagtggtggtgttgagggtatgttatgggtgaagggagtttgtggtgtgtagtggtagttgtaatggggaattgaggttgtagcgtacggagtttttatgtagtaagcgaatttgtgtttagtttgggtttataggagataagtaatagttgtagtgtggggtaggaggttgtagtgtgtagagttagtgtagtgagtggaatgaggtgtattgagggtggttgtttgttagtcgatgttattttttcggtgattaggtttggtcggaattttggggagtaaggttgtagtatgtagtgtttagggtttgtattttattttgtatggaattagttttttggaattgggttgtttaaggagttgggagggaattttaatgtatgagatatatttatattttgtattataaaggtagaattaggaggtagtggggagggttagcggtaatttggattagggtaggagtgatggtgtttagagggggaggaaggaaggtgttacggttttgttttttttttatggcgttaagttgtggattttttgggttttggggtgggatttggttaaggggaagttttttggatttaagagttatttagttttgtatagtttgtcggttttttttttttttttgttaagtaaaaggtttatttattattttgtgttacgattgttttattttttttttttataataggatttttttgttagggtaaattatataatttggaagtagtggttattttaaatattgtggtttatagtgggagagagggaaagtatttattttagaagttgttttttttgttttagaaggttggtagttggaaggagggatttagttgttagggttttgaggtaaggattttgtaaatggtaattaattttgagggttttttttggattttttttagaattattgagtttaaagaaatatagggtttttatattatagttaagtttgggagtacgtggatttttgtatatttgatttttatttagttttcgtttttttgaaataaattagttgaaattcgaatttatttttttatattatttttttagttttttgtagtagattagtgtaggtttagtaagaatagggagtaggtagaaattatttttaaattttattaatagagattgggtttgttagggattattggtttttttttaaggggttattgtttaggtgtttttgtatttgattttttttgattttttgtttataaaaagtttttaaatgataaagtgagaatatagttttatggtattttttgttttagggtttagttttttaatgttatttttgtagtttgtttgtttgatgttattatttgtagatttgtgttagatttttaggtttttattttgaaattttagttttcgtatttagggtttaggggagagttaatgtaggttattgtagttgagtttgtagggttgtttgttttttgagtttagagttttttaggtatagagagaaagttttgtagagaagtaaaagaaagggttttgtgagaattagagaaaagtttattttttaaaaaatgaagtagggagaggttaggagttagttgtttagattgagatagtaataggagttttgtttttgagaattgtttgtgatggagagaaggtttaaggagaggggttgggtatggtttatattttttttaattttttaatttttatttgtttgtgtaagggaattttttggatttggtgtttattttttattttttattttttttttaggtttaggttttatttttaggagtttttgtgatttgttttagggattttttgttttttttggttatagtttttgggttttaggaaggtggagtaggttagggatgatttcgtttttttttattgaaagattttttttgtttgttatttgttaaatttattttatttagggaatttttaattttttgggattttatttttttttttggtttttttattttagtatttgagatcgtagggagtgtttgtgtgtgtttgtgtgtatggtttttatttttttttagttatttatgggaagttaagagtttatggttgttaattaatttggggtttttatggttagtaaaaatagataagggtttaatttttatttttagttttaaaataatttaagttataattatttgttttaataggagtttcgggataggaagaaaagtaggtaagatggagaaaggataaataaataaaattttaatttttttttttttttattttttttttatttagtattttttatttttttttgagattttagttatttattagtttattattgttgtgttatttgttcgtatttttagaatttgtatataggaggtatttaataaatgttttttattttgagttaaattaaatttgattacgttttgtggttggattttgagatgaagtagtataaagggggaaggtagatatgtttttagatttttttttttttttttttttttgagatagggttttattttgtcgtttaggttggagtgtagtgtgtgattttggtttatggtaatttttattttttagtttaaggaatttttttgttttagttttttgagtagttgggattataggtatatattatattcggttaatttttgtatttttttgtagagacggggttttattatgttgattaggttggtgtttaatgcgtggttttaagtgattcgtttgttttagttttttaaagtgttgggattatagggatgagttattacgtttagttgatatgtttttagattttgggttagatttttttagaggattgattgttagggatcgaagatttaaagtagtgggttttaggttttttagaattttaagggttttgttaaaatttagattgttgggttttgtttttagagtttttgatttaatttatttgggatggggtttgggaatttgtatttttaatatgtttttaggtgattttagatttttatgtttattttgagaattattgttttagagaattttagtttttttttttattgtttattatgaggatttgattggttttattttttttttttttttgagatagggtttcgttttgttgtttaggttggagtgtagttgtatgatttcggtttattataattttcgtttttcgggtttaagcgatttttatgttttagttttttaggtagttgggattataggcgtttattattatgtttggttaatttttttttattttttgtagagatggggttttattatgttggttaggttggtttcgaattt

SEQ ID NO: 1785 - DNA, 5520 bp, Artificial Sequence
  chemically treated genomic DNA (Homo sapiens)
taggtgtagtggtttttatttgtaattttagtattttgagaggttaggcgggaggattatttgagtttaggagtttaagattagtttgggtaatatggtgagattttatttttataaaaaaaaaaaaaaaaaattaattagttgggtatagtgttaagtgtttattgttttagttatttaggaggttgaggtaggaggattatttgagtttaggaggttaaagttttagtgagtggtgattgtattattgtattttagtttaggtaatagagtgagattttggtttaaaaataaaataaaataaaatttaaaagatgggattattgtagttatttttgtgattttagaaagataatttgatgaaatgagggaatggttggtagtttttaggttatgttaaaggattgtgtgtttttagaagagtttttatttttatatgtttttgggtgggaaaataggagatggtgggaaaagagagatttaagagattaatagggtagtcgtagttttttggtaggaagttttgttttagttggatttttttaaagttttgttggttttagtatttcgattttatttatagtaaatggagttttaaaattttttttttttattattttgtgttttattttttgattttagatgtttaattagagttattaattttatttaattagagattttgtttggtagatatagaattgttatattttttatagtttatattttttttttttgtttaaaagtaaggtgtttggggatttagaaattaggttaggtttttataattttattaaaatagtaattgttaggttttttatttagtaatatttagagatagggttaaagagtgggaaacggagtatttagggttttagttagtagagtttagatgttttttgtagttaagatttttggatttagaattagaaagttgttaagtaggaaggagtgcgttgttatgaagaggtagatagaagttagagttagtgtgtttggaatgtattaggtagatgaatgggaagatggttgggatggagttggagggaggagggaagttagtagttaggggttaggatatttatggttttaaaaagtattttataaataagaagttaggttagtttatttatgaagagggatagttttattagattatgtgttagagtttttagattttggggagcgtgagaaaagtgtagatttagttggttttagtattagattaaggaggttttaggtgggtaaggttagttgtattttttataaaatgttttagaaatttttgtagtttattaaagtgaatagtttttttggatttaattatttgtaaggtttattttagttagagtgttttattattttaaatgttgggaaattaagcgaatttttttttatttgtaagtttttaatagtggtttttaatagtgttattgtagtattagaaattgtagggaaggtgttagggttgatttttatgaagaaataggagaataggtaggtagatattggggaggtttatagaatgtcgtgattagaatttataaagaggttggtaggatataaattaattaaataaacgttagtttaaaaaaatttattatatttgtgagtgagagaaagttattagtattgtttttaaaaatgagtttagggtttttggtgatatttaatcggtgggttattaggagtgttttaggtgattaggagttggtttcgatttagttttttttgtgttgttttttttttttttttagagtttttttttttttttttttattaggtagggatgagtaagaggaatggtttatttttgagagttggggtttatagtttaggttagttttttagtttttttatttattagttaagataggaggtgaggattgagatgggatgaatttagtaggcggttatgggttaaaggtcgttatgaatgtaatgtgtttagtatagtgtttgttaaaaggtaatattttttttttggtttgaagattaaataagtagattgtatttaggaaagttagaagaattttttagttgtttggattagaaggtgttagtttaggggttgaagaagacgtaatgtttagagtaaaaagcgtttgtagttttttgaagggttgggtgttttggaatagatgagggggcgaaatggggttggggattagggacggatagggtgggtttagtatttgtttcgttttcgaagggttgttttaatattgaaaaatatttaattagtttttttttagaaagattggaatattttaaaattttttattggaggtttcggaggaggtgggttttagttgaaaaggaaatgtggaggcgtgggcgttttcggtttgtattttgtattttttatattttggtttttttatagatttttgaagaataggttagaagaaagggttaaagttttaaaaggggaataattattgcggggtttagggaggaggataatgttttttgggttgtcgtattttgattttcggggtttcgaattttttcgtttttggttaggtttgttagttatagggtgagggttttttttcgtcgtaatttgttatttttatattaatgcgggatcgtttttttttttttttttattttttattttattttgtcgtttttttttttttaattttcgtttttgattggttgagttttcggtttttcgtttttttttttttttattttcggtgaaaattgcgggtttcgagttgggttaagtaattaggaggcggggcgcgtttggaggaggttgtagtagcggaagatttagtttaggtgggaattggagtcggtgggatttggggttcggggatcgtcgttaggcgtttatgtaagattttttaatattaggtttcgggttacggttcgagggcgtttagggaagaagggcgtagagtttagggaggggtttgttttttaggtaggggcgggagggggatgtttttgtagggtaggggtcgcgtggtattttgatgtttttcggggaaggcgttttcgggttttcgttcgttgggggattggtgtttggggttggggcgttggagaatagggaggaagggtattaaggatagtttgtgggtttatattttatttagacgtttttaaatttagttcgtagaggcggggaggaggacggatgaaattgcggggagaggatggaggatggcgagttagagggaatttgtcgggtgatttcgcggcgggttgggtgcggggtatcggaggagaaggaagtcgtagtgtcgtaggcggggattgggtggaaggcgggcggacgggggaggggagagttggaaaaggatgagagagggggaagggggatttatttgggaaaggagaggattggaatacggaaatggattaaggatgaggttcgtcgggggtttgagagggaggaagagtagattttttttgggtttggagtcgtttgaggatatagattagaggaaatgaatatagattgtatttttttagtcgttttttattttttttttggtttttttattttttttagttttagatttatttttttttttttttgttttggttattgtttttttttttttttttagattttaagttcgtataatattttaaataagagttttcgatttaaaagttagatgtcgattttttttttttttggatttggtttagggtagtagttttatttcgggatagagagagtattgattgtagttgtagtcgtcgcgggattttagttttattcgttaaggggttgagcgttagggattttgaattcgtttagtggtgcgttttgcgtattcgggcgtatttaatcgaggtaatgttttgcgcgttttcgcgggtgtacgttttttttgtggttttttttgggcgagtattgttttgtagataggttagattatcggtttcgcgtcgtttcgttaagggttggtttagttaaggttgtaaaaaataaaaaaagattaggtagatagtttatttagggtggttattgaaattgggttggaaaattgtagttttaggaattttagagagttggatattgggaagtatttttggtttatatataatcggagattattatgttttttttttttttaggaatacgattagtttgtgttttatttagataggaatagatgttttttatttgggagtatttttagttatggtgaatggtatttagttatttattggggatggcgagtgatttagggatttgtgttttacgtatatgaagtagttatcgttagatgttggttgttttttttaatttttattataattcggtgggtatgtaagatttagagagatttatttatttatttataataaatatttttggagtgtatgttatatgttagtaatttgtaaacggaaacggttttgagtattggggatttttttttgaataggaaatgggaagtttttaaatggggagtttttgtttaatagatatagagttttattttgaaagataaaaagagtttcggagatgggttgtatagtaacgtgaatgtatttagtattgttgaatatattgaatttaagtattgaatttaaatggttaaaatagtaattattatgttttttgtattttattacgattaaattttttttttaaatacgaagttttagtttttataggttttatattattatatattatgttaatgtaagaagaggagaaagagtggtaaagttatttaaagttatttagttagtaagtgttttatggttaagcgtagaaatatatcgtgattgggtttgttttttttttttttttgttttttttgagtaggaaagagttagtggtagtattatgtttagtgagatgtagggacgagagggggaatggagagagggatttagatgattgttatagttattatgttatgtttttagggatttttagttttggtggtaagtgtggtatagtttggttgatttttattttgtttttattttagatttaggattgagattttagaattatgaatttggttattagtatcgtttttttgttaataggtattcggtatggggtaggattggggttttaggcgttttggtttttttttttttagagaagtagttttttttttatagttttagaaaagcgtaggtgataaagagagggtttttttttattttgaagttagttaatttatcgcgttgatattttgacggtttgaggtggtttttgaaaatatagtttgttgagtttttttttatattattgaattagaatttttaattgagaattcggaattagtattaattttttaagattttttgtttttgaaatatattgataggatttaaggtttaagtagagtggggagggaggttggggtttgtaaaggagaagtgggatttttggggtggggaaaggtatttagagagtagatttcggttttttttttagttaggtttatttttttattttaggtgggtgggaggtttttgtgtcgtaggtttttttagtttgaaggaggtattgttggtgttagt

SEQ ID NO: 1786 - DNA, 5520 bp, Artificial Sequence
  chemically treated genomic DNA (Homo sapiens)
attggtattagtagtgttttttttaaattggaggggtttgcggtataggggttttttatttatttgaagtggagagatgggtttggttagggaggggatcggggtttgttttttgagtgtttttttttattttagggattttattttttttttgtagattttagtttttttttttattttgtttgagttttggattttattaatgtgttttaaggataggagattttagggagttgatgttggtttcgggtttttagttggggattttagtttaatagtgtgaaggagggtttagtaaattgtgtttttaaaaattattttaggtcgttagaatattagcgcggtggattggttgattttaggatgaaaaagagttttttttttgttatttgcgtttttttgagattgtgagggagaagttgtttttttggagggaaggaagttagggcgtttggagttttagttttgttttatgtcgggtatttgttagtaggagagcgatgttgatggttaggtttatggttttgggattttagttttggatttggggtgggaataggatgggaattagttaagttgtgttatatttattattagggttgggggtttttgggaatatggtatagtggttatggtagttatttaagtttttttttttattttttttttcgtttttgtattttattgaatatgatattgttattggtttttttttgtttagggaaagtaaggaaggagggagaataagtttagttacggtgtgtttttgcgtttggttatggagtatttattagttgggtgattttaagtaattttattatttttttttttttttttatattaatatagtgtatggtaatataagatttatgagggttgaggtttcgtatttaaaaaaaaaatttaatcgtggtaaaatataaaaagtataataattattattttaattatttaaatttagtatttaaatttagtatatttagtagtgttggatatatttacgttgttatgtagtttattttcggaattttttttgttttttaaagtaaaattttgtatttgttaaataaagattttttatttagggattttttattttttgtttagaagaaaatttttaatgtttaaaatcgttttcgtttgtagattattggtatatagtatatattttaaagatatttattgtgaatgaatgaatgaatttttttgaattttatatatttatcgggttatgatgggggttaagaaaaataattaatatttggcgatgattgttttatatacgtgagatataaatttttaagttattcgttatttttagtggatggttagatattatttattatagttaaggatgtttttagatagggagtatttatttttatttggataggatataagttaatcgtgtttttggaggagagaaagatatagtgattttcgattgtatgtgagttaaggatgttttttaatgtttagttttttggagtttttgggattgtagttttttagtttagttttaatagttattttggataggttgtttgtttggtttttttttgttttttgtagttttggttgaattaatttttggcgaggcgacgcggagtcggtagtttagtttatttgtagagtagtgttcgtttaggagaggttatagaaggggcgtgtattcgcgagagcgcgtagggtattgtttcggttgagtgcgttcgggtgcgtagggcgtattattagacgagtttagggtttttggcgtttagttttttgacgggtgaggttaggatttcgcggcggttgtagttataattaatgttttttttgtttcggggtggagttgttgttttgagttagatttaggaggaaggggggtcggtatttggtttttgaatcgaggatttttgtttgagatgttgtgcgggtttgggatttaggaggggaagggggagtaatggttagagtaagaaagggaagaaatgggtttggggttggagagggtagaagagttaggggaggggtggagagcggttggggaggtgtagtttgtatttattttttttggtttgtgtttttaggcggttttagatttagagaaggtttgtttttttttttttttaagttttcggcgggttttatttttaatttattttcgtattttaattttttttttttttaaatgagtttttttttttttttttttatttttttttagtttttttttttttcgttcgttcgttttttatttagttttcgtttgcggtattgcggtttttttttttttcggtgtttcgtatttagttcgtcgcgaggttattcggtagattttttttagttcgttattttttatttttttttcgtagttttattcgttttttttttcgtttttgcgagttgggtttggggacgtttgggtggaatgtagatttataggttgtttttggtgttttttttttttgttttttagcgttttagttttagatattagttttttagcgggcgaaagttcgggagcgtttttttcgaaagatattagggtgttacgcggtttttgttttgtagaagtatttttttttcgtttttgtttggaaagtaggtttttttttaagttttgcgttttttttttttgggcgttttcggatcgtggttcgaagtttagtgttgggaagttttgtatgggcgtttgacggcggttttcgagttttaggttttatcggttttagtttttatttggattgggtttttcgttgttgtagttttttttagacgcgtttcgttttttggttgtttgatttagttcggagttcgtagtttttatcggggatggaggagagggggagcggggagtcgggggtttagttaattagaggcggagattgggggagaaaggacggtagggtggggtggggggtggggaaggaagagaaggcggtttcgtattggtgtgagagtggtaggttgcggcggaagggggtttttattttgtggttggtaggtttggttagggacgggagggttcgggatttcggggattagggtgcggtagtttaaagaatattatttttttttttgagtttcgtaatggttgttttttttttaaggttttaatttttttttttgatttattttttaggagtttgtgggaaaattaaagtgtaagaggtgtaggatgtaggtcgggagcgtttacgtttttatattttttttttagttggagtttatttttttcggagtttttagtgagaagttttggaatattttagtttttttgaaaggaagttggttgggtgttttttagtgttggagtagtttttcggaagcgaggtaggtgttggatttattttgttcgtttttggtttttagttttatttcgtttttttatttattttagagtatttagttttttagggggttgtaggcgttttttgttttgggtattacgttttttttagtttttgggttggtattttttggtttagatagttggaaggtttttttggtttttttgagtatagtttgtttgtttggtttttagattaggaagggagtgttgttttttagtaggtattgtgttgggtatattatatttatggcgatttttaatttatggtcgtttgttgggtttattttattttaatttttattttttgttttggttggtaagtgggagagttggagaattgatttgggttatggattttagtttttaagggtgagttattttttttgtttatttttgtttagtgggagaagagagagaggaattttgggaaagaggaggagatagtataaaaaggattgagtcgaggttaatttttgattatttggggtatttttgataatttatcgattggatgttattagaagttttaggtttatttttagagatagtgttgatgatttttttttatttataggtgtagtgaatttttttgaattaacgtttatttgattgatttgtattttgttagtttttttatgaattttgattacgatattttgtgggtttttttaatgtttgtttgtttgtttttttatttttttatggaagttagttttggtattttttttgtagtttttgatattgtagtggtattgttggaagttattgttggaagtttgtaagtgggaggagattcgtttggttttttagtatttagggtgatggaatattttaattggaatgagttttgtagatggttaagtttaaaggagttatttattttggtaaattgtagaggtttttagggtattttatgaaaaatgtagttggttttgtttatttaggatttttttaatttagtattagagttagttgagtttgtattttttttacgttttttaggatttggggattttaatatatgatttggtaagattgtttttttttataggtgagttaatttggttttttgtttgtaggatattttttaaggttatgaatgttttggtttttggttgttgattttttttttttttttaattttattttagttatttttttatttatttatttgatgtattttagatatattggttttggtttttgtttgtttttttatggtagcgtatttttttttgtttaatagttttttgattttgagtttagggattttaattgtagaaggtatttgggttttgttggttgaggttttggatgtttcgttttttattttttggttttgtttttgagtgttgttgggtggaaggtttagtagttgttattttgataaggttatgaggatttggtttaatttttgggtttttaagtattttgtttttaggtaggggaggggagtatagattgtagaaggtgtggtaattttgtgtttgttaagtaagatttttgattggatggaattaatggttttgattagatatttgaggttaggggatagagtataaggtggtggagggaggagattttaaaattttatttattgtggataggatcggagtgttgaaattagtaaggttttagaggaatttagttaaggtaagattttttgttagaagattgcggttgttttgttggttttttagatttttttttttttattattttttgtttttttatttagaaatatatggggataaaaatttttttaaaaatatatagttttttagtatgatttagggattgttagttatttttttattttattagattgtttttttagaattatagaggtgattatagtggttttattttttaaattttattttattttatttttgagttagggttttattttgttgtttaggttagagtgtagtggtgtaattattatttattgaagttttgattttttgggtttaagtgatttttttattttagttttttgagtagttgggataataggtatttgatattatgtttagttaattaattttttttttttttttttgtagagatgggattttattatgttgtttaggttgattttgaatttttgggtttaagtaattttttcgtttggttttttaaaatgttgggattataggtgggagttattgtatttg

SEQ ID NO: 1787 - DNA, 7312 bp, Artificial Sequence
  chemically treated genomic DNA (Homo sapiens)
attatggggattataatttaaggtgagatttgggtggggatagagttaagttatatttaaattatatatacgtttaagatgatagttttttatgtttgattttgtaatgatataagttaagggaaaggtatagaaggatttatatttttatttaggcgtttgtatatattttgtttgtaattttagtgggtttttagagattaatttataattattttttttaataaaaaaaaaaattttgagtgtttcgtatagaatagatattagattaaaaagatgattataggttgggtgtggtgatttatgtttgtaatttaagtattttggggaggttaagataggagaattgtttgagttttgggagtttaagattagtttggttaatatagtgagatttaagttttataaatagtaaaaaaaaaaaaaagaaaaaaaaatttagttaaggttgggtttagtggtttatgtttgtaattttagtattttgggaggttaaggcgagtggattatttgaggttatgagtttaagattaatttgattaatatggtgaaattttgtttttattaaaaatataaaaattagttaggtgtggtggtaggtgtttgtaattttagttattcggaggttgaggtaggagaattatttgaatttaggaggcggagggtgtagtgagttgagattgtgttattgtattttagtttgggtaatagagtgagattttattttaaaaaaaaaaaaaattagttaagtgtggtagtatatatttgtagttttaattatttagaaggttgaggtgggaggattatttgagtagaggaggttaagggtttagtgaattgtgattattttattgtattttagtttgggtgatagtgtaagattttggtttaaaaatatagatgattatatatgattattattttaggagtttagatttggatggagtatgggtaggatttagtatcgtaaaaaatgttttttgtaaaatgattaatttatttttagtatgaaggtgtggataatgtacgttgagagtaaagaagaattattaatttatttcggtgttatgaaggaagtttttaataaagtgatagtggtataaagtttttgaaagttaagaaggtaaagggggtttttagggatgtaaatgtatatttttttgttttgtttttgtttttgagacggagtttcgttttgttgtttaggttggagtgtagtcgtacgatttcggtttattgtaagtttcgtttttcgggtttatattatttttttgttttagtttttcgagtagttgggattttaggtgttcgttattgtgttcggttaatttttttggtattttttagtagaaacggggttttatcgtggttttaattttttgatttcgtgatttattcgtttcggttttttaaagtgttgggattataggcgtgagttatcgcgtttggttgtaaatgtatattttttgtatatggcgttttttagtattttaaagaaaaatttttatttcgggtcgggtacggtggtttatgtttgtaattttattattttgggaggtcgaggtaggtagattataaggttaagagattgaaattattttggttaatatagtgtaatttcgtttgtattaaaaatataaaaattagttgggcgtggtggtttacgtttgtagttttagttatttaggaagttgaggtaggagaattgattgaatttgggaggtggaggttttagtgagttaagattatattattgtattttagtttggtgaaagagcgagatttcgttagaaaaaaaaaagaaaagaaaagaaaaagaaaatttttattttaaattatgatttataatttttttagtagtttagtttttttcgttttattttttagttttatttttttttattttttttgatattttttgtatttttagttatattgtattttatggggttaggttttttttgttgtaagattgttttagttgttttttttatttaggtgtatttgttcgggatttttttatttttttatgaggtttttagtttaaatatttttttggagtaagttttttttatattttatattaaattagttgtttagttataattttattattttgttataatttggtgtattgtaagtgaatttatttattttaatggtgtttttgtgtgtgtgtgcgtgtgtgtgtgtgtgtgtattcgacgtgtatttatttttgttttttttggtttgttttgtttattgttattgtttttggaatagtgtttagaatatatagtagatgtttaataaatagttgtcgaatggagtggataaacgaataaaggtatgtgtaatatagtgttttttgaatgaggatgtggttcggagatatgaaaatgtattatatgtttgaggaatagtaagcggtttgttgtggttgtgggtaagggtaagtttgggtggaagacgaggtggggagggttgggagagttttatagttggaggttgattggatagtttagaattgaatggttttttatattttggtaataggagttatggattatttttaaggagagaatgttatgattggattatgatttttaaaaagttattttagttatagtatggagtttgggtaatggaaaataagttggagtgtgggtggaggttgggtggggggattgtagattgtttaattagagtaagatttgatgatagattgatttagtgtaatatttggagggtagaaatggaaagtgagaatagagatatttttgaggtaaaattgttgggttttggggaataattagatttagggttttgagagagaaggtgaaggttggaaggagataaggtacgtattcgggaaggagtagaattagtaattttagttttggatatgttgtttgaggagttcggtaaatatgtttttttgaatttttaggaattgtgttattattatattgttttttttattttttttttttttttttttttgttttgaattatttttataagttaagatcgttttttgttttttagttcgttggggagttaggttagtaggttttatatttttgaggaagggatagggttttggtttggagggtttagtagaagttattttaggggagggttcgataggaaggaaggtaggtttgtcggaggggtatataggagttttttttttcgttatagtgtttagggttaattgttttagtttttaggttgggttaataggatgggatagtttaggcggaaggaaatttgtggggagggatatttcgtagatagaagtagggatatggggtggggagaggtaggaagagttgtcgggttgttgagttggcgtttttttagtagatttaggaggggcggtgataggaggttattttttttttattttcgtagttttgggtttttttggttttggttaatagtattattattattattattgttgttgttcgttagtttgggttttagatatattagaaaaaaattatcggaagatacgtatagtattggtagtttttaaaagaattaattttttttttgtgtttattttgtgattattgggatagaaatgttatttgtattattagttttttatttagttatagagacgtgagtgttcgaaggagagatagtgatttttgttttaaatttagtttgtttaaatcggataagattttcgatttgttttaagtttcgttattattgtttttttttttaataatagttgttgtgattacgtataaacggttaaacgggggtaaattcgtgttaaagtagggttatgggtttttttgattagaaggtttagttttagtttttaggcgtagtatacgggcggtttttttttagaaatttagtttgttttttattagttggagtgggtgggtggggcggtagtggtgttagttttagggaacggtcggtaaatttatttttaggcgtgttttagcgggagtttggagattttaggagagttttttttataagcggtttttaggtaggacgtttttagaggttttggtttaggggtgggggtgaggtggggtttatttttgaaatagttataatttaaattttagttatatcgagtttaaattcgatttcgtagtcgagtgtcggcgttagagaaggataaaaattcgggtttacggttttttattacgtttttggttcggttttttgggtttttaggagtttttacgttattttttgggttgtttaggaggaaggatgggcggggcgggtaggcgttgcgggcgttgtagatggggagggcgagttcgcggtacggcgtgagcgggggagaggcgcgcgagtaggtgtcggtttcgtgatagggttttttatttcgcgttttagtgtttttcgaggtttagtgaggtaaaatttagtaaatgttttagaaatgtagtttagtcggttatcgggttttgtttttttattagacgcgtaagaggatggcgtttttaatgtaaattttttggtttcggttttttggttggtagtcgtcgcgtttttcgtttgtttggcgtttcgtttatttcgtggcgggttgagacgaggttcggcgcggaggggacggggcggagcgggtatttttttttattttttacgtggggttggtttttcgtagtgtttgggcgcgttgtagtcgtcgcgttttttcggtcgcggtatcgtttttttaggtaggggcgggggacgaggggtaaggagtgggcgaggggtgggcgaggggcggggggcgttatttaattaggtggtttttggagtttttcggggtagggtagagggaatacgttgtcggggattgtgtatacgttttattgatattagttttacgttgtcgggtagtcgtcgattacgcgtggtttcgcgagtttattggtcggcgttttatatatttttgtcgttgattggtcggttttaggtttcgtttttattttcgttcgcggcgcggggtaggttgagcggttatttgaatggggagggggtagacggcgttgagcgcggcggcggcgggagcggcgtcgagtgttttcgtgcgttcgtttgtggttaagtagttagtagtttagtagttagttagtttgtcgtcggcggttaagtagttaattatgtttaatttcggtgtttttttttagtagattgcggtaagttatttggggatgtttttgtgttttttcgtttggttttgtttggggggttaaagggggcgcgaatttcgagtttcggatattagttatgtttgagaattggggttgtagcggagtcgtggggaaggaaagggttttttgtttgtagattatgggtattagtgagggcgtgtgtgttggggagggggtcgaattagggggttgggatttttagatagggataggggttttgttttagatgtattgaggggaagggataatttcgtatggagattcgagagggttggtgaggaggaggatgacgagcgggggaggagtggggagggggtcgttgttttgtagcgaggttggggtatagtgtggaacgagagtcgcgggagggataagggggttatttttatttggtatcgaggagagatgttcggtttggtttaggaacgcgagttaggggaggaaggggttgttcgtaagtattcgggaggcggggtgtttataggagaggcgagtgggttatttattttgggggtttgaatttacgtttggaagacgggggttgtttagtagatagttcggggttgggggaaggggcgtttgtcgtcggagcggggggatgatacgagggttcgtcgatagttttgggggacgagttgtttttttagacgtttggagggggatttttattttaggggtaggtggtcgttttttgacgattttttggaagaggcggggagtcgtttttggggtaggagggtgggaagcgggatttagtagcgggggcgggaaggtgggcggggggagttgggtcgcgagacgcggtgggtcgcgcgtttggagttcgggtttgtgggggttgtacgtttgggaatttatggagacgcgcggcgggaggggttttggagttgttcggaagttacggggagggggcgtcgcgtttatagggagagacggggtggtttgaggttttttgtcgattttaaagaattttacgtaaagatgttttttggtatttttatataatttttattttgacgcgagcgagtttggataaattttttttaatggaaaataggagaaatggtgagtagtattatttttttttagcgtagtttaaagaattttattataaaatattaggtagttttataaataagtgtaaaatttgtgttgttattttgttattaagtagttttttaaggaattaaaatagattttattttgattatgttgattttttaaagtcggtttttgtaaattttaagtagaatattaaattttttgattatttagtttttagtaatattgtattagttatgttgtagttatgtatggtaaattattgtgttaaatagatttagtaaaagggagtataaatatgaagaggttgaaagttaattaaaataaatattagaatttttttttatgtatattatttgatttttttttattataattaagtgattaaattttagattttaaataatgtaattttaatttgaaagatattttgaggattttttattttttgatttttattttaaagtgtaaagtgattttttaaaggttagatttataataataggttagagttttattatattttgtttttattagaaggttttggttattttttttttttattagtaatttgtattttaaaagattttatattatatttgtaatatttaagaagataaattttttgtcgtatttttagtttttttgttcgattttagttgtaggtagttattttggaaagtttatataaaatattttttttttttttagttaaatatttttttttttggattataaatgtattgataattttcgttttagtttttttaatggtagtaggtgtgttttttttttatgaacggatatcgttttattagtgttaaagtttaaatgttaatagaaaaaatgaggaagattttattgttattattgtgaggtttgggttatttatttaataagtgtagttgaatttttttagtattatagtaagtgtgagaggaaaattatttttgattttaatttggaaagttgtgtgagttgtaaaaaaaaaaaaaaaaaaaatttgtttatttttttgtgtgttatttggatgataaaaaatatgtttataagttttttttttttgtttttatagg

SEQ ID NO: 1788 - DNA, 7312 bp, Artificial Sequence
  chemically treated genomic DNA (Homo sapiens)
tttataaaaataaaagaggaaagtttataagtatattttttgttatttaaatgatatatagaaaaatgagtaaattttttttttttttttttttataatttatataattttttaaattaaaattagaaataattttttttttatatttattatgatattaaggaagtttagttatatttgttaggtaggtaatttaaattttatagtagtggtaataaaattttttttattttttttgttaatatttagattttaatattgataaagcgatattcgtttatgggagagaggtatatttattattattaaggggattaagacgaaaattattaatgtatttgtgatttaaaaggagaagtatttggttaagaagaaaaggagtattttatatagattttttagagtagttatttgtaattggagtcgggtaaaaaaattaagagtgcggtaaaaaatttatttttttaaatattataggtatggtatgaggttttttgaggtataaattgttgatagaaaaaaaaaatagttaaaattttttaataaagataaaatgtagtagagttttggtttgttgttatgggtttgatttttggaaagttattttgtattttgggataaaaattaaaagataagggatttttagggtattttttaagttaaaattgtattatttaagatttaaaatttgattatttgattatggtaaagaaaaattaagtgatatatatagaaaaaaattttaatgtttattttaattaatttttaatttttttatatttgtgtttttttttattgaatttatttgatataatggtttgttatatataattataatatagttaatgtaatattattaaaaattggataattaaaaaatttaatattttatttggaatttgtaaaaatcgattttaaaaagttagtataattaaagtagaatttattttaattttttaaagaattgtttgatgataaaataatagtataggttttgtatttatttgtagaattatttaatgttttatagtaaagttttttgaattacgttaaaaaaaaatggtattatttattattttttttattttttattaaaagaaatttgtttagattcgttcgcgttaaagtagagattgtgtaaaaatattaaaaaatatttttacgtggggttttttagagtcgataggggattttagattatttcgtttttttttgtagacgcggcgtttttttttcgtggttttcgggtagttttagggtttttttcgtcgcgcgtttttatgggtttttagacgtgtagtttttataggttcgggttttagacgcgcggtttatcgcgtttcgcggtttagtttttttcgtttattttttcgttttcgttgttgggtttcgttttttatttttttgttttagaggcggtttttcgttttttttaaggagtcgttagaaggcggttatttgtttttggggtaagagtttttttttagacgtttgggggagtaattcgttttttagggttgtcggcgggttttcgtgttattttttcgtttcgacgataggcgtttttttttttagtttcgagttatttgttgagtagttttcgttttttaagcgtgggtttagatttttaggatgggtagtttattcgttttttttgtggatatttcgtttttcgagtgtttgcgagtagttttttttttttttggttcgcgtttttgagttagatcgggtattttttttcggtattaggtgagggtagtttttttgtttttttcgcgattttcgttttatattgtattttaatttcgttgtagggtaacggttttttttttatttttttttcgttcgttatttttttttttattagttttttcgggtttttatgcggagttgttttttttttttagtatatttagagtaagatttttgtttttgtttgaagattttagttttttggttcgattttttttttaatatatacgtttttattaatgtttatagtttgtaggtaggaagttttttttttttttacgatttcgttgtagttttaatttttaggtatggttgatgttcggggttcggggttcgcgttttttttggttttttagataagattaggcgaggaagtataggggtatttttaaatgatttatcgtagtttgttggagagaggtatcgaagttgagtatggttggttgtttggtcgtcggcggtaagttgattggttgttaggttgttggttgtttggttatagacgggcgtacggagatattcgacgtcgttttcgtcgtcgtcgcgtttagcgtcgtttgttttttttttatttaggtagtcgtttagtttgtttcgcgtcgcgggcgggggtgggggcggagtttgaggtcggttaattaacggtaaaggtgtgtgaggcgtcggttaatgggttcgcggggttacgcgtgatcggcgattgttcggtagcgtgaagttggtgttagtggagcgtgtatataattttcggtagcgtgttttttttgttttgtttcggggaattttagaggttatttgattgagtgacgtttttcgtttttcgtttatttttcgtttattttttgtttttcgtttttcgtttttgtttagagaggcggtgtcgcggtcggggaggcgcggcgattgtagcgcgtttaggtattgcggagggttagttttacgtggggggtggggagggatgttcgtttcgtttcgtttttttcgcgtcgggtttcgttttagttcgttacggagtgggcgggacgttaggtaggcgggggacgcggcggttgttagttaaggggtcggagttaagagatttgtattggaagcgttatttttttgcgcgtttgatgaggaagtagaattcggtgatcgattgagttgtatttttgaagtatttgttgggttttgttttattaagtttcggggagtattggggcgcgggatgggggattttgttacggagtcgatatttgttcgcgcgtttttttttcgtttacgtcgtgtcgcgggttcgttttttttatttgtagcgttcgtagcgtttgttcgtttcgtttatttttttttttgggtaatttagaggatggcgtgaggatttttggaagtttagaggatcggattaggggcgtggtggggagtcgtagattcgagtttttatttttttttggcgtcgatattcggttgcggaatcgagtttgagttcggtgtagttgaagtttaaattgtagttgttttaaaggtagattttattttatttttatttttggattaagatttttggaagcgttttgtttggaagtcgtttgtggggagggtttttttagggtttttaggttttcgttggagtacgtttggaggtgggtttgtcggtcgttttttgaaattggtattattatcgttttatttatttattttagttggtgggaggtaggttgggtttttgaaaggaagtcgttcgtgtgttgcgtttgggggttggggttaggttttttgattaggaaagtttatggttttgttttggtacggatttgttttcgtttggtcgtttgtgcgtgattatagtagttgttgttggagaggaaggtagtgataacggggtttaaagtaaatcggagattttattcgatttggataggttgaatttaaggtaaaaattattgtttttttttcgagtatttacgtttttgtaattgaatgaaaggttggtaatgtaaatagtatttttattttagtaattatagaatgaatataggaagggaattaatttttttagaaattgttaatgttatgcgtatttttcgatggtttttttttaatgtatttaaggtttaggttagcgaataatagtaataataatgatagtaatattgttggttaggattagagaggtttagggttgcggggatgaggagggaatggttttttgttatcgttttttttgagtttgttggagaggcgttagtttagtagttcggtagttttttttgtttttttttattttatgtttttgtttttgtttgcggggtgtttttttttataggttttttttcgtttgggttgttttattttgttgatttagtttgagggttggagtagttggttttggatattgtggcgggagaggaagtttttgtatgttttttcggtaggtttatttttttttttgtcgggtttttttttggggtggtttttgttagattttttaggttagaattttgttttttttttaggaatgtggggtttgttggtttggttttttagcgggttaagaagtagggagcggttttgatttgtgagagtgatttaaaataggaaagaaaagagaaaaggggtaggaggaatagtgtggtggtggtataatttttagagatttagagaaatatgtttgtcgggttttttagataatatatttaaaattagaattgttgattttattttttttcggatgcgtgttttgtttttttttagtttttatttttttttttaaagttttggatttgattgttttttaggatttagtagttttgttttagaaatgtttttgtttttattttttatttttattttttaaatgttgtattagattaatttgttattaagttttgttttgattaaataatttgtaatttttttatttaatttttatttatattttagtttattttttattgtttaagttttatattgtgattggaatggttttttaaaagttatgatttaattataatattttttttttaaaaatgatttatggtttttgttgttaggatatgaaaggttatttagttttgagttatttagttagtttttaattataggatttttttaattttttttatttcgttttttatttagatttatttttgtttatagttatagtaaatcgtttgttgttttttaaatatatggtgtatttttatgttttcgagttatatttttatttaggaaatattatgttgtatatgtttttgttcgtttatttattttattcgataattatttgttgagtatttattatgtgttttaggtattgttttagggatagtagtagtgaataagataggttaggggaggtaaagataagtatacgtcgaatatatatatatatatatacgtatatatatataaaagtattattaaggtaggtaagtttatttatagtgtattaaattgtaatagggtggtaagattgtgattgggtaattggtttggtatgagatataggagaagtttgttttaaggagatgtttaagttgaaaattttatgagaggataggaggatttcgggtaagtgtatttaagtagagggagtagttaaggtagttttatagtaggaaggatttggttttatgggatgtaatgtggttggaggtgtagagggtgttagggagagtgggaggggatgaggttggaaagtaaagcgggaggagttagattattgaggaagttataggttatggtttgaaatggggatttttttttttttttttttttttttttttttttgacggagtttcgtttttttattaggttggagtgtagtggtgtgattttggtttattgaaatttttattttttaggtttaattaatttttttgttttagttttttgagtagttgggattataggcgtgagttattacgtttagttaatttttgtatttttagtatagacggggttatattatgttggttaggatggttttagttttttgattttgtgatttgtttgtttcggttttttaaagtgatgggattataggtatgagttatcgtgttcggttcgaaatggggatttttttttaaagtgttaggggacgttatgtataagaaatgtatatttgtagttaggcgcggtggtttacgtttgtaattttagtattttgggaggtcgaggcgggtggattacgaggttaggagattgaaattacggtgaaatttcgtttttattaaaaaatattaaaaaaattagtcgggtatagtggcgggtatttggagttttagttattcgggaggttgaggtaggagaatggtgtgaattcgggaggcggagtttgtagtgagtcgagatcgtgcgattgtattttagtttgggtaatagagcgagatttcgttttaaaaataaaaataaaataaaaaaatatatatttgtatttttgaaggttttttttgtttttttggtttttaagggttttgtattattgttattttgttgaaggttttttttataatatcgggatgaattgatggtttttttttgtttttagcgtatattgtttatatttttatgttgggagtggattagttattttgtaaggaatattttttacgatattgagttttgtttatgttttatttagatttgaatttttgagatggtgattatgtataattatttatatttttgagttaaggttttgtattgttatttaggttggagtgtagtggggtgattatagtttattgaatttttagttttttttgtttaaatgatttttttattttagttttttgagtagttgagattataggtgtgtgttgttatatttggttgattttttttttttttgagatggagttttattttgttgtttaggttggagtgtagtggtataattttagtttattgtatttttcgttttttgggtttaagtgatttttttgttttagttttcgagtagttgggattataggtatttgttattatatttagttaatttttgtatttttagtagagatagggttttattatgttggttaggttggttttgaatttatgattttaagtgatttattcgttttggttttttaaagtgttgggattataggtataagttattgaatttagttttggttgaattttttttttttttttttttttttattatttgtagagtttaggttttattatgttgattaggttggttttgaatttttagggtttaagtaatttttttgttttggtttttttaaagtgtttagattataggtatgagttattatatttagtttataattatttttttgatttagtatttgttttatacgaagtatttaagatttttttttttattggagaaagtaattgtagattggtttttgaagatttattggagttatagataggatatgtgtaaacgtttaggtggaagtgtgggtttttttatgttttttttttagtttgtgttattgtagggttagatatggaaaattgttattttgggcgtgtatatggtttggatgtggtttggttttgtttttatttaaattttattttgaattgtaatttttataat

SEQ ID NO: 1789 - DNA, 7309 bp, Artificial Sequence
  chemically treated genomic DNA (Homo sapiens)
atgcgattaatggtgttaattgttttttggattgtttttatagtataggataagattatattagttttagtaggttttattgaagaaagtttatgtgttttgtagaaataagatttttagtttagtttaataggagattaattatatgtttattttatttttttttaaggtatgatagtatttggttgagatgtttgtgtgtattttttgtgtgaagttgagtatgtaatttttaaagaaattataaaggagttattcgtttttaaaggaaaaatatatgaattttacgggtataaggaagatattaaaatagggttggggagaagtttttttttttttattttatagtattttttatagaaataattgattgtttgaatatatggttattgaaatatatatatatatatatatatgtatatgaaaataagagttggaatatttgattttgttttttattttttattattttagataatataggatataatatggttttattgtatatatgtgttttttggtttaaaaatattgagagtagatttttgtggaaagaaatatgaaaatttgaggatttatgcgaatgtagttagaggcgaatgtagttagaggggtttttaatttgttggtagagttgggggagagttggggtaattttattgttatgaaattggttttagatggaggtaaggaaaggtgtttattttttgttggtgttagatatagagagattttgtagtatttcgtattttaggtttagaattgtttagtgttgggtagtagttttattgagggtttggttagagtttatggggatgggtggattaggttgtttgttgtttggaaaaggttattttgaatataatgatttttatatggacggtggggtttgggggaaggtatcgtggttagggtttggaggggaagagggaggaaagtaaagaggagtttttttatgaggtaatagaaatgatagtattttttttaggttgaatttttaaaatttagttttgttttggaagattgggattgtggtattttttgtagtgtttttagatcgttttaaggtttttaaattaatgatttataattatgttgtttttttagagagtatttttttttttggttgatatgtggttagtttaggggtggaggagtttcggtagttacgaatttagacgggatgttgattgagagttttgtggttatggtagatgggaggggtgagttttatttatttaaaggtattcgtattttatcgatgagtgtggaattgtgttttttcgttttcgtagtgagacgatcgattaggattgtaggttgagtaaatgggtgttttttggtttatagcgttttttagtattagttagcgggatagagtttcgtgaattttttaaggagttattatttgtttgtttgaatgttggaaaggggtcggtggtgttgattattggatttatttaattaatatttattaaattcgttgttattaatatttaatttttgtgttttaggggtttagattttagtaagggaaatagatgggtaaataattatattagagttagttaagtattgttaaagaagttgatatagggtgttgtggggatatatgggaggggaattagaggaggtttttcggaggaggtgatatttaagttgaggtttgaaggatgtggaagagtttagtaatttttgaagattaaaaaaatggtgataaaaaagatatttttttaattttttagtgttacgatttaagagataaataagtaggtgaacgtataattatattgggttttattataagttagagtttgttttttttaggattttggtattataattttttttgaaattttgttttcggtattgatttttgggggaggtagtaatataggaatttagtgttcgttgcgaaattgatggatggtttttagttttgggtacgtttttatgtgttaaatttgtttaaatggtaggatttattttttttttagaagtatttatttgttttataggattttttatggaattttggagtttttgaggcgagagggattttggatattattgagttttattttttatttaataaatatagaagtggacgtttggataggtaaagtgatttgattaaggtaggtgtatagttattttgtaatattgggaataaattttaggttttttgattttttgtttttattttattttttttttattttttagaaataaagtttttatgtgtttttttttatagtgatatgtttggaatgtattagttagtaatttaggaagggaaaaaaataaatatataagagataaatttgttaggaggataaatttgtattgtttttgattggtttagagggtgattattattatggtagagaattatttaattagtgtaagtaaaatttttttgtgggttgggtattgtataaagatttaaacgaatttgtttatagatttgaaaagtagatacgagatttgtgaatggttggggtttttaagtttatagtataagtatgggttatattttatagtttggaggattgagttttgaaaatgggtaagtttttttatttttttgaattttattttttttatatttaaaataaggatgagtagtttttgaggttttttttacgatttttttttttatagattttagtattttataatttgatataaagagggtggatatgaatttattttttttagaaaagttttaggaaagagaatattaggttattttagtaggtgtgtagataggttagatagattttgaaatttatttagttttttttagatgtataattttattattgtttttagttgttaagagaaagtaggagagtttgtatttttattttttttttttttttttttttttttggagacggagttttattttattatttaggttagagtgtagtggtatgattttagtttattgtaagtttcgttttttaggtttacgttatttttttgttttagttttttaagtaattgggattataggcgtttattattatatttggttaattttttgtgttgttagtatagacggggttttattatgttagttaggatggtttcgattttttgatttcgtgattcgtttattttggttttttaaagtgttgggattataggcgtgagttatcgtatttagtttgtatttttatttttattgttagttttaggtttattttatttagtttattaagtgatgttgaataattaatttttatatattattaggtttatggatattatgatatttagattgatgggtgtttgttgaagggggtgattttagtaggaggatttttttacgtaaggatttatggagtttgttgttttttttttttagggtgagaattaaattgtttttatacggtgggtagaggggaattgatttaggtttggaataagagagaatattttaattgaaaagtttttggaattcgttgaattttaagatattgtgtggattagtttaggatagggagtgagaagaaattaattaaaaggtaatttcgttattttttagttggaaaaaagattagattatatttgtgtttttataattaagtagttgttggaaaaaaacgttttagatgttttttatgagaaaattgttgtttgaagtttagtagaagttatttatttgatatttatattttaggtaaggtttttcgttggagaaaatatcggtattttggataaaattgaaatgtgaaaagaaagggaagagagggtttttattatgtaagatgtttatttaaagtggatttggtttggaaagttttttaaaattttttatatgattgtggaataagttatgtggggcgcggggataagcgaattttttaaattttattacgtatgtttttatttaatttggatttttagagtggtttttagggtattttgtttaggatttagttagttgttggttatatttatgttttttagttttttgagattttatttggttttgagagggttaaaaagtagtgtggttaaatattttaggttttaaagtatttttattgtggttggggaagtaatagaattatattttataaaataatgaaaatagtgttagaaaaatatcgagagatagaaatatttttacgagttaggttatagttagagtgaaggtagggaaggtttttaaagttgggtggaggggataagttaaaaagatgtggaaattggttttttttttttatggttaaagtgtttaaaggggaaaaaggagttttaaaaatgtttttggaaatattattttttacgaatttttcggtttttgttgttttaatgttatttgtttgagatgtaaatagaggagttttgagaaagaagttgaatttgtatttttttttgtttttatttgttttaaatttgtggtatttttaataggatgaagcggaagagaaagggaaagagataaaagtgtagaaagatggaagattttagttgtaaatggttatttgtagttagatggaatagttgttgacgtttagggaaatgtatgtttttttttagatgggaaggagtagtggaaaggggtgacgagtttttggttggttattaattattttatttttttgtgtcggttttttatttggaaagtgggagtgatatttgtgtttgttttttttatttataaagattattgtgagagttataatacggtgagatatagaattttgtttttaaaaatataaagtagaattaagatgttaataataaggatagtaattgtgttagttatttgtaattatttattatagttagtcgtttaggattttggatcgtttttttggttttattatagttttggattagtttatttttaaattttttgttgaagggtggagttttgttagttatgggtagggaattatttttttttgtttttttattttttgttttttaaatatgtttagggtttttgtatttgttgttttttttgtttggtattttttttttgtggtttgttttagagttgatttttgtttttgtttattttttagcgaggatggtattttagggagttttttttttattatcgtagagagagtaggttttttttagttatgtttaatttagaattttgttttgttttttttatagttttagtattatagaaaattattttgtgtatttatggatgtttacgggggtaagggttttgtgttgtttaatttagtattttgaatcgtgtttgttgaatgaatatagaatttcgtttgttttgggagagtatagaaaatagttttttattatatattatagttagttgtaaatagtagatggttttttatattttagagagtaagaattagagagagagagaaagagagagagtttgggttttttttttttgtgtttgttttttttagagaaattggaggggtagtagttagtattttttcgttggttttattaagtatagttaaggtttttaggatatggttattttttatttgtggaagcggttttgttggggtgggtgggtgttagttggttttggtttgggttagagatatttagtggtttaggtgggcgtggggttagggcgtagacgagaaggggtacgagggtttcgtttcgaggatttagcggtaagtatcggtttcgggcgcgttttagtttatttattcgcgtgtttacggcggtattattttttataaggatttgaacgattcgggggcggtttcgtttcgttattttttgttttcggtttcgttttttttttggagggtcgatgaggtaatgcggttttgttattggtttgagggggcgggttttaatagttcgaggcggggttttcgggggtttagcgttatattattcggtcgtttaggtagcggcgtagagcgggtagtaggtaggcggcgggcgtttagacggtttttttttttttttttgtttttttagtttttgttttttcgtcgggaggtcgttcgtcgagttttgcgttagcgtcgaggtagtttcgttgcgttttatttcgtttcgtcgggtattcggagggtagcgcgtcggaggttaaggttgtttcgtacggttcggcgggcgagcgagttcgggttgtagtagtttcgtcggcggcgcgtacggtaattttggagaggcgagtagtagtttcggtagcggcggtagtagcggtaatgattttttggttcgggtttatcgtgtttttgggtagttggagtttgggggattggggcgtcgaggcgtgtatatgttcgtttagttatttttaggacgttttttgtaatttcgatatcggtaagcgtttttggtgtttcgttcgagttttacgttgtagttaggattgtagcgttgtttagggaggtagggcgagttttattttttttttttgttttaggagaggggtagacggggttggggcggagtggagaaattcgatgtttttgggcgggggcgttggtatagttgagaggggaagatgttttgtagaggaaatttatagtggttgagggagtttttggtcgtttttgtttttttaatttaggtcgtgaggtttttatcggtttttttgatatttggaaaatgtttttatttattattaacggaggaagggttagaagagaagggtggggaaagggtttttaaaatttggaatgttaattaaagtgttgggaaattgaatagttaaaaaaaaaaaaaaaagttgttcgttatgtgtacggaaagttgtaggagaaatttggagtatttcgagtttgtattattttttgcgtttatgaaatttattttttttattgagatttaatttagttgtaggttttttaggtaagcgttaatcgagtttttgggattgttaagtttgggtggatttaagggggaaaatgaggagaaagttgtggtattgatttacgttttggaggtattgtgtttgagagtgttgatagttagtagaaggtgcgaggggttatttattatatagttgtgaaaatttataggaaggttattttttttttttttgaatgtgtgtggggagggggagaatgggtagtggaaaatagatttgttattaaaagaataaatttgttaagggttatattacggtgatagttttagattggatttagtgttttgagtagagagattttgtaaagagattttttattttttagtgtgtatggagggtttcgagagtattttgggaggtttgtttgggagtgtttgggatatttgtgtttggatggttaaaggtggagtggtatttgggaaatatttttttttttttttttagtttataaag

SEQ ID NO: 1790 - DNA, 7309 bp, Artificial Sequence
  chemically treated genomic DNA (Homo sapiens)
ttttatgggttggaaaggaggagagagatgttttttagatgttattttatttttagttatttaaatataagtgttttaaatatttttagataagttttttaggatgttttcggggttttttatatatattaaggagtaggaggtttttttatagggtttttttatttaagatattaagtttagtttggaattgttatcgtgatgtgatttttggtaggtttgtttttttggtgataaatttgttttttattatttattttttttttttttatatatatttaagggggaaaaaaatagtttttttgtgaatttttatagttatgtggtgagtgatttttcgtattttttgttggttattaatatttttaaatatagtgtttttagggcgtgggttaatgttatagttttttttttatttttttttttaaatttatttaaatttggtagttttagaagttcggttagcgtttgtttgggaagtttgtagttgggttgggttttagtgaaaagaatgaattttataggcgtaggagatgatgtagattcggagtattttaagttttttttgtaatttttcgtgtatatggcgggtaatttttttttttttttttaattatttaattttttagtattttagttagtattttaagttttgggaattttttttttattttttttttttagtttttttttcgttagtagtgaatggggatattttttagatgttaaaaggatcggtaggaattttacgatttaagttaggaaagtaaaggcggttaggggtttttttagttattgtgagttttttttgtagggtattttttttttttagttatgttagcgttttcgtttaaggatatcgagtttttttatttcgttttaatttcgtttgttttttttttggggtagaggaaaggagtggggttcgttttgtttttttaagtagcgttgtagttttggttgtagcgtggggttcgggcggggtattaggagcgtttatcgatgtcggagttgtagaaggcgttttgggggtggttgggcgagtatgtgtacgtttcggcgttttagttttttaggttttagttgtttaggagtacgatgagttcgagttaaggggttattgtcgttgttgtcgtcgttgtcggggttgttgttcgtttttttaaagttgtcgtgcgcgtcgtcggcggggttgttgtagttcgagttcgttcgttcgtcgggtcgtgcggggtaattttggttttcggcgcgttgtttttcgagtgttcggcgggacgggatggggcgtagcgaggttgtttcggcgttggcgtaggattcggcgggcggtttttcggcgaaggagtaggagttggaggagtaagaggaggaggagaagtcgtttgagcgttcgtcgtttgtttgttgttcgttttgcgtcgttgtttgggcggtcgagtgatatagcgttgggttttcggggatttcgtttcgggttgttggggttcgtttttttagattaatggtagagtcgtattattttatcggttttttaaaaagggggcggggtcgggggtaaggggtaacggggcggggtcgttttcggatcgtttagatttttatagggaataatgtcgtcgtgggtacgcgagtgggtgggttggggcgcgttcgggatcggtgtttgtcgttgggttttcggagcggagttttcgtgttttttttcgtttgcgttttggttttacgtttatttgggttattgggtgtttttgatttaaattagaattaattaatatttatttattttagtaggatcgtttttataggtgaggggtggttatgttttagagattttgattgtgtttggtggaattagcgggggaatgttaattgttatttttttagtttttttggagagagtaggtatagaggagaaagatttaaattttttttttttttttttttttttggtttttattttttgggatatgggaagttatttgttgtttgtagttggttatgatatatgatagaagattgttttttgtgtttttttagagtaaacggggttttgtatttatttaataaatacggtttaggatgttgggttaagtaatataaagtttttgttttcgtggatatttatgaatgtatagggtgattttttgtgatgttagggttatgaagaaaataaaatagagttttgggttggatatgattggggagggtttgttttttttgcgatagtaagggaagggttttttgaagtgttattttcgttgagaagtggataaagataaggattagttttggggtaagttataggagagaggtattaggtagggggaatagtaagtgtaaagattttgggtatgtttgaaagatagaaagtagaaaggtaagaggaagtggttttttgtttatggttgatagagttttattttttagtaagggatttgggggtgagttgatttaaaattgtagtaaaattaggagaacgatttaggattttagacgattagttataatagatgattgtagataattaatataattattatttttattattgatattttgattttgttttgtatttttaaaagtaggattttgtattttatcgtattatagtttttataataatttttgtgggtaggaaaagtaagtataagtattatttttattttttagatgaggaatcggtatagaaagatgggatgattggtggttagttaggaattcgttatttttttttattgtttttttttatttgaagagagatatgtatttttttgaacgttagtagttgttttatttaattgtaaatggttatttgtagttgggattttttatttttttatatttttgtttttttttttttttttttcgttttattttgttagaaatgttataagtttggaataaatagaaatagggagaaatgtaagtttagttttttttttagaatttttttgtttatattttagataagtgatattgggatagtagaggtcgaagaattcgtgagagatggtatttttaagaatatttttgaaattttttttttttttttgagtattttagttataggaaagggaaattagtttttatatttttttgatttgttttttttatttagttttaaaaattttttttgtttttattttaattgtggtttaattcgtagagatgtttttgtttttcgatgtttttttagtattgtttttattgttttatggggtatgattttattgtttttttaattatagtaggaatattttgaggtttgggatatttagttatattgttttttagtttttttagaattaaatagggttttaggagattggagagtatgggtgtggttaatagttgattgagttttgagtagagtgttttggaggttattttaaggatttaggttgaatgagggtatacgtggtggaatttgagagattcgtttattttcgcgttttatatgatttattttatagttatgtggaaggttttagaagattttttagattaaatttattttggataagtattttatatgatagaggtttttttttttttttttttttatattttagttttgtttaaagtgtcgatattttttttaacggaaggttttgtttggaatataagtattaagtagataatttttgttgaattttaagtagtagtttttttatagaaagtatttgaagcgtttttttttagtagttatttaattatgaaagtataagtataatttgattttttttttagttgaaaagtaacgaaattattttttggttaatttttttttattttttattttaagttggtttatatagtgttttgaagtttagcgaattttaagagttttttagttgggatgtttttttttattttaaatttgagttagtttttttttgtttatcgtgtgaaggtagtttggtttttattttaaggaaaagaaatagtaaattttatgaatttttgcgtaggggagtttttttgttagggttattttttttagtaggtatttattagtttggatgttatggtgtttatgagtttaataatatgtaagaattggttatttaatattatttaataagttaggtggggtgaatttgaggttaatagtaagaatgaagatgtaggttgggtgcggtggtttacgtttgtaattttagtattttgagaggttaaggtgggcggattacgaggttaggagatcgagattattttggttaatatggtgaaatttcgtttgtattaataatataaaaaattagttaggtgtggtggtgggcgtttgtagttttagttatttgggaggttgaggtaggagaatggcgtgaatttgggaggcggagtttgtagtgagttgagattatgttattgtattttagtttaggtgatggagtgagatttcgtttttaaaaaaaaaaaaaaaaaaaaaaagaatgaagatgtaggtttttttgtttttttttgatagttaagaataatgatagagttatatatttgggaagaattgagtaagttttaagatttatttggtttgtttatatatttattaggatgatttggtatttttttttttggaatttttttaggaaaggtgagtttatatttattttttttgtattaagttataggatgttagagtttgtaggaagagaagtcgtaaaaaggattttagaaattatttatttttgttttaaatgtgggaaaaataaggtttagagaagtgaaggaatttgtttatttttagggtttagttttttaagttgtaaggtgtggtttatgtttgtattgtgggtttggaaattttagttatttatagatttcgtatttgttttttagatttgtagatagattcgtttgagtttttgtatagtgtttagtttatagagaaattttatttatattgattaaataattttttattatgataataattattttttgagttaattagaagtaatataggtttgtttttttgataggtttattttttgtgtgtttatttttttttttttttaaattattagttaatgtattttaaatatattattataaaaaaaagtatatgaaaattttgtttttgggaaatgaaaagagagtaaagtggaaataaaaaattaaaagatttgagatttgtttttaatgttgtagaatagttgtgtatttgttttggttaagttattttgtttgtttaggcgtttatttttgtgtttattggatgaaagatagaatttagtggtatttaggatttttttcgttttaaaaattttaagattttatggggaattttgtaggataagtgaatgtttttgaaggggagatgggttttgttatttaaataggtttgatatatgggaacgtatttaagattgaagattatttattagtttcgtaacgaatattgagtttttatattgttattttttttaagaattaatgtcgaaaatagaattttagagaagattgtgatgttaaagttttaggagagataggttttggtttatggtggagtttagtgtagttatgcgtttatttgtttgtttgttttttggatcgtagtattaaaaagttaggaaggtgttttttttattattatttttttggtttttaggagttattgaatttttttatattttttagattttagtttagatgttatttttttcgggaaattttttttgattttttttttatgtatttttataatattttgtattaatttttttgataatatttagttgattttaatgtgattatttatttatttgttttttttgttggagtttaagtttttagaatatagggattaagtgttggtaataacgagtttaataagtattggttgaatgggtttaatgattagtattatcgatttttttttagtatttagataggtaggtggtggttttttggagagtttacggagttttatttcgttggttggtgttagggggcgttataagttagagaatatttatttgtttagtttgtagttttggtcggtcgttttattgcgagggcgggagagtataattttatatttatcggtggggtgcgggtgtttttgagtgggtgaagtttattttttttatttgttatggttataaagtttttagttaatatttcgtttgggttcgtggttgtcggagtttttttatttttgagttggttatatgttaattaaagggggagatgttttttggggaagtaatatagttgtgaattattggtttgggggttttagggcggtttgggaatattgtagaggatgttatagttttagttttttagggtagagttgggttttggaaatttaatttggagaaggtattgttatttttgttgttttatagggaagtttttttttgtttttttttttttttttttttagattttagttacgatgtttttttttaagttttatcgtttatgtgaaagttattatatttaaaatggttttttttaagtaatagatagtttggtttatttatttttatgagttttggttagatttttagtggggttgttgtttagtattgggtaattttgagtttaagatgcgaggtattgtaggatttttttgtgtttggtattagtagggggtaaatatttttttttgtttttatttggagttaattttatggtagtaaaattgttttagtttttttttagttttgttagtaaattgaagatttttttggttatattcgtttttggttatattcgtatgaatttttaggtttttatatttttttttatagggatttatttttagtgtttttaagttagaaaatatatgtgtgtagtaaagttatgttgtattttgtgttatttagggtggtgggaaatggaaagtagagttaaatattttagtttttgtttttatgtgtatgtatgtgtgtgtatgtatgttttaatgattatatatttaagtagttaattatttttgtgaagggtattatgaaatggaaggagaagaatttttttttaattttgttttaatgttttttttatgttcgtggagtttatgtgttttttttttaaaaacgagtagtttttttgtggtttttttgaaggttgtatgtttagttttatatagagaatatatataagtattttagttaggtgttgttatgttttgggagggaatgggatggatatgtggttggttttttgttagattgggttggaggttttgtttttgtaaggtatatgagttttttttagtggaatttgttggaattgatatggttttgttttgtgttgtggggatagtttaaagagtagttaatattattgatcgtat

SEQ ID NO: 1791 - DNA, 5134 bp, Artificial Sequence
  chemically treated genomic DNA (Homo sapiens)
  unsure 30, 33, 37, 42, 45, 47, 49, 53, 56..57, 315, 422, 1807, 2267: n is a or g or c or t
  unsure 2611, 2623, 2734, 2746, 2763, 2782, 3189, 3733, 4673: n is a or g or c or t
ttttttttttttttttacgcggattttgantgntagngtcgnatngngngggnaannaatgtttcgtgtttgttttaaaatgcgttttgtgttgtggggtgcgttttttgtggcggttttttcggtagttgagttaggagaattttttggattcgggaagtagaggttgtagtgagttgagatcgcgttattgtattttagtttgggtaatagagtaagatttagttttaaaaaaaaatgtggttttattgtttttttttttttttgggatagggttttattgttatttaggttggtatgtaatgatgtaatttntagtttattgtaatttttgttttttaggttgaagtaatttttatgttttaggttttcgagtagttggaattataggtgtttagttaatttttgtatttttttgtagnagatagggttttgtcgtgttggggaggttggttttgaatttttggttttaagtgatatatttgtttcggttttttaaagtattgttttttaggaatagtgatcgtattttatatttagtagcggatggggaacgtttttttgtttattttatttttttatgttaattataggggggggttttacgggtttgggtatggatggttgagtaagaaaggttaggtttggtcgattgagtcgtggatttttttcggattttttttgtttttagtagtttttgtagtaaggggttttgggtatttgtttttgagtagggaggtttataaagtgtttggtgtttgggaaatgtttttcgaggtttaggtggtgtagtatagtttttttttatttttagtattttgaattattggtatatgtttaaggatatttaatgcggttacggggaggttatattagtatttttaatttttatttgtgagtaggtttttaaggttttttttgtttttagtcggataatttatcggttgggatagtattgattttttagtttttgtagggtataaatatgaggtttcgtaagatttttttttttaatagagtgtgtttttttttttcgtttatgttcggttgtttttttttgttttagaagttttcgttttagtattttagggtttttaagatgtttttagatttatggtttagaggtatattagcgatcgttgtgtttttagttagttggtagttttaaggggagatgaggttttttaaacgaatttagttaatgttattatgggtattatttttatagtagttacgattaggggaggttaggtggttcggtggtttacgtttgtaattttagtattttgggagtttgaggtaggtggattatttgaagttagaagtttgagattagtttggttaatatggtaaaattttatttttattgaaaataaaaattagtcgagcgtggtggtgtgtatttgtaattttagttatttgggaggttgaggtaggagaattgtttaagtttgggaggtggaggttgtagtgagtcgagatcgtattattgtattttagtttagcgatagagtaagattttattttaaaaaaattaaaaaaggaggagttgatttgcgttgagagggtgcgattttgattataggaggttattgtatagttaaaggtatagaggtgaggaggaaggaatgaaaggttagtttgtaaatgttggtaggttttatggttgatatatagaggtgaggttgggaggttgggttggaggaggaggggcggtgaatgtcgggttaatatttttatattttatgtagaaagtaataaggaattattttgaggtagtttggagaattaaaaaaagaaaaaaaanaaatagaggttgggcgcggtggtttacgtttgtaattttagtattttgggaggcggaggcgggattacgaggttaggagtttaagattagtttgattaatatgatgaaattttatttttattaaaaatataaaaattaattaggtatggtgacgcgcgtttgtaattttagttatttaggaggttgaagtaggagaatagtttgaattagggaggtagaggttgtagtgagtcgggattatgttattgtattttagtttgggcgatagagtgagattttattttaaaaaaaaaaaaaaaaaaattaatagaaaatgttggatacggtggttttcgtttgtaattttagtattttgggaggttaagataggtagattatttgagtttaggagttttagattagtttgggtaatatggcgaaatattatttttacgaaaaatatgaaaaattaatcgggtantggtggtggatatttgtagttttagttattcgggaggttaaggtaggagaatcgtttgagtttaggaagtagagattgtagtgagttaagattgcgttattgtattttagtttgagagagtaaaattttgttttaaaaaaaaaaaaataaaatattgggcgtggtggtttatatttgtaattttagtattttgggaggttgaggcgggtgaattatttgaggttaggagttcgagattattttggttaatatggtgaaatttcgtttttattaaaaatataaaaattagttgggtatggtggcgggcgttcgtaattttagttattcgggaggttgaggtaggnagaatcgttggnaattcgggaggtggaggttgtagcgagttgagattttattattgtattttagtttgggtgataatagcgagattttattttaaaaaaaaaaaaaaaaaaaagtaataaggnaattagattttngaagaaagggtttaaanattattatgagaaatgggnaagttagggtagttttatggtaaggtttgaggttaaatgttatttgattttttttatttatttattgttttatttttaataagttatttagtttttgagatttagttttttgattggtagaaggtatttatttaggttcggtatagtggtttatatttgtaattttagtattttgggaggtcgaggcgggtggattatttgaggttaggagtttaagattagtttgtttaatatggcgaaattttatttttattaaaaatataaaaattggttaggcgtagtggtttatgtttgtaaatttagtattttgggaggttaaggggggcggattatgaggttaggagttggagattattttggttaatatagtgaaattttatttttattaaaaatataaaaaaattagntcgggtatggttgcgggcgtatgtagttttagttatttaggaggttgaggtcggagaatggcgtgaattttggaagaagaggttgtagtgagtttagatcgcgttattgtattttagtttgggcgatagagcgagattttgttttaaaagaaaaaaaaaaaaaattagttaggtatgtagtattagttatagtgtgtttgtaattttagttattcgggaggttgaggtaggagaattatttgaattcgggaggtagaggttgtagtgagtcgagattatgttattgtattttagtttgggtgattgagcgagattgtgttttaaaaaaagaaggtatgtatttaaattataaggttaaaagagataaagtatgcgagtaaaataaagtaagttagttagtgtgggttgttttttttttttagtgaaggagttttttgttagaggtttttggatttgtttaatttgtatttggaaaggttattatttgtaggatttttatagttatatttggtatattttgtgattattattattatttttgttngttattatttatgattatgattatataatgggttttttttttttttttttttttttttttgagttatcgtattcggtttgtatgtttttaatttttataattttaatgtaaatattagttgttttgaattttttagtttgtgttatataagtatagatttaaaaatattgtgtaattttagattaaggtttagaattttgttttttaattttttgcgggtttatggatttttttttttttttttttttttttttttgagattaagttttggtttatcgtttaattttttaggttggagtataaatggtatgatttcgggttattgtaatttttattttttgggtttaagcgatttttttgttttagtttttttagtagttgggattatagaggtatattattacgttcggttaatttttgtatttttagtagaaacggggttttattatgttggttaggttggtttcgaatttttgatttcgtgattcgttaaaagtgttaggattataggtgtgagtcgttacgtttggtagggtttacggatattattagtatagttaggattttaattttttttattttgaaaattaggttaataaaaatttttaggagaaggtaaaatatattatggtgtttaagtattggggatttggtacgtattaggcgttttgtatgtttataggagtgttttagacggtttttaagttttttttttggaattttaatttaataaatgagttaatttcgttttagttttttagtttttttttgtaatttatttatttttgtagatattttgttttaaggaattttgtttgggaaatttatattagatatatttattatggcgtttatagtcgtatgggcgtgcgtttttttgtttatatggttagagtttcgtttcgtttcgtttttttaaatttggtgggcggatcgaggncggggttttatattaggttttatttcgattagttacgtttatcgttttgatttttaggtttttttagtttttgggcgtacgtgtcggattttttttacgagggggcgggttgcggttaaatttttcgttaggttagcggtcgggcgttgattggttttatggcggcggggtcggttcgtgattggttagtacgtcgtggtttaaagcggtcggcgcgggaattaggggtttattgcgggacggttttggagagtattcgggttcgtgaatttttcggaggcgtaatgagttgtattaatttgtttattgtgttgtttggtttttttagtaagattcgggggtagatttaggtgcgggggttagttttgcgcgtggttggggatgaggtggtcgtggtgatagtttgtgtttacgtattcgcgtagggcgggtttttaaatgattttatttttttttttagg

SEQ ID NO: 1792 - DNA, 5134 bp, Artificial Sequence
  chemically treated genomic DNA (Homo sapiens)
  unsure 462, 1402, 1946, 2353, 2372, 2389, 2401, 2512, 2524, 2868: n is a or g or c or t
  unsure 3328, 4713, 4820, 5078..5079, 5082, 5086, 5088, 5090, 5093: n is a or g or c or t
  unsure 5098, 5102, 5105: n is a or g or c or t
tttagaggagagggtgaggttatttgagggttcgttttgcgcggatgcgtggatataggttattattacgattattttatttttagttacgcgtagggttggttttcgtatttggatttgttttcgggttttgttgggggagttaggtagtatagtgggtaggttaatgtagtttattgcgttttcgggaagtttacgaattcgagtattttttaaggtcgtttcgtagtaagtttttggttttcgcgtcgatcgttttaaattacggcgtgttggttaattacgagtcggtttcgtcgttatggggttaattagcgttcggtcgttgatttggcgggagatttggtcgtagttcgttttttcgtgggaggaattcggtacgtgcgtttagggattgggagggtttggaaattagggcgatggacgtggttgatcggggtggggtttggtatgaagtttcgntttcggttcgtttattaagtttaaaggggcggagcgaggcggggttttggttatataaatagagggacgtacgtttatgcggttgtagacgttatgatggatgtgtttggtgtgggttttttaagtaaggttttttggaataagatgtttgtagaggtaggtggattgtagggagggattaaggggttggggcggagttagtttatttattagattggaattttaagaaggaagtttagaagtcgtttagagtatttttgtgggtatgtagagcgtttagtgcgtgttaggtttttagtgtttgagtattatggtgtattttatttttttttaaggatttttgttaatttggtttttaggataaagaaaattgaagttttgattatgttaataatattcgtagattttgttaggcgtggcggtttatatttgtaattttagtatttttggcggattacgaggttaggagttcgagattagtttggttaatatggtgaaatttcgtttttattaaaaatataaaaattagtcgggcgtggtgatgtatttttgtaattttagttattggggaggttgagataggagaatcgtttgaatttagaaggtggaggttgtagtgattcgagattatgttatttgtattttagtttggaaggttgggcgatagattaagatttagttttaaaaaaaaaaaaaaaaaaaaaaaaaaaaatttatagattcgtaggaggttaggggataaagttttggattttgatttgaggttatataatgtttttgggtttgtgtttatgtggtataggttgaaggatttagaatagttggtatttatattggggttgtgaaggttagaaatatataggtcgggtgcggtggtttaaaaaaaaaaagaaagaaagaaaagaaatttattgtataattatgattataaataatagtnaataaagatggtggtagtgattatagagtgtgttaggtgtggttgtaaggattttataggtaataatttttttaggtatagattggatagatttaaggatttttgataaagagtttttttattgggaggaagaagtaatttatattgattggtttgttttattttattcgtatgttttattttttttaattttgtgatttggatatatgttttttttttttgagatatagtttcgtttagttatttaggttggagtgtagtggtatgatttcggtttattgtaatttttatttttcgggtttaagtgatttttttgttttagtttttcgagtggttgggattataggtatattgtagttggtattatatgtttggttaatttttttttttttttttttgagatagagtttcgttttatcgtttaggttggagtgtagtggcgcgatttgggtttattgtaatttttttttttagggtttacgttatttttcggttttagttttttgagtagttgggattatatgcgttcgtaattatgttcggnttaatttttttgtatttttagtagagatggggttttattgtgttagttaggatggtttttaatttttgattttatgattcgttttttttggttttttaaagtgttgggtttataggtatgagttattgcgtttggttaatttttgtatttttaatagagatggggtttcgttatgttggatagattggttttgaatttttggttttaagtgatttattcgtttcggttttttaaagtgttgagattataggtgtgagttattgtgtcgggtttggatagatattttttattagttaggaaattgaattttagagattaagtaatttgttgaggataaaatagtaagtaagtgagggaggttagatggtatttgattttaggttttgttatgaggttgttttgatttntttattttttatgatggtntttgagttttttttttnaaaatttggttnttttgttatttttttttttttttttttttgagatggagtttcgttgttgttatttaggttagagtgtaatggtgggattttagttcgttgtaatttttatttttcgagttnttagcgattttntttgttttagtttttcgagtagttgagattacgggcgttcgttattatgtttagttaatttttgtatttttagtagagacggagttttattatgttggttaggatggtttcgaatttttgattttaggtgatttattcgttttagttttttaaagtgttgggattataggtgtgagttattacgtttagtgttttgtttttttttttttgaaatagggttttgtttttttaggttggagtgtaatggcgtaattttggtttattataatttttgttttttgggtttaagcgatttttttgttttagtttttcgaatagttaggattataggtgtttattattantgttcggttgattttttatatttttcgtagagatagtgtttcgttatattgtttagattggtttggaatttttggatttaagtgatttgtttattttggttttttaaagtgttgggattataggcgagagttatcgtgtttagtattttttgttggtttttttttttttttttttgagatggggttttattttgtcgtttaggttggagtgtagtagtatgatttcggtttattgtaatttttgtttttttggtttaagttatttttttgttttagttttttgagtagttgggattataggcgcgcgttattatgtttggttaatttttgtatttttagtagaaatggggttttattatgttggttaggttgattttgaatttttgatttcgtgatttcgttttcgttttttaaagtgttgggattataggcgtgagttatcgcgtttagtttttgtttnttttttttttttttttaattttttaaattgttttagaatggttttttgttattttttgtataaagtgtgaaggtgttagttcgatatttatcgtttttttttttttagtttagttttttagttttatttttgtgtgttagttatagggtttgttagtatttgtaaattgattttttatttttttttttttatttttgtgtttttgattgtgtagtgattttttgtggttagaatcgtatttttttagcgtagattagtttttttttttttaatttttttgaggtagagttttgttttgtcgttaggttggagtgtagtggtgcgatttcggtttattgtaatttttattttttaggtttaagtaatttttttgttttagttttttaagtagttgggattataggtgtatattattacgttcggttagtttttgtttttagtagagatggggttttgttatgttggttaggttggttttaaatttttgattttaagtgatttatttgttttaggtttttaaagtgttaggattataggcgtgagttatcgggttatttggttttttttggtcgtaattgttgtgggagtggtgtttatgatggtattaattgaattcgtttgggggattttatttttttttaaggttgttagttggttaaaggtatagcggtcgttggtatatttttagattatggatttgagggtattttggagattttgggatattggggcgagggtttttaaggtagagaggagtagtcgggtatgggcgagggggaggggtatattttgttgagaaggaaagttttacggagttttatgtttgtgttttgtaggagttggagaattagtattgttttagtcgatgggttgttcgattgggagtagaggaagttttgaggatttatttatagataggaattgaaggtattagtgtgattttttcgtggtcgtattgggtgtttttaagtatgtgttagtgatttagaatgttgggggtgggggggggttgtgttgtattatttgggtttcgaggggtattttttaaatattaggtattttataaatttttttgtttaggggtaggtgtttaggattttttgttgtagggattattggaggtaggagaggttcgggggaggtttacggtttagtcgattaggtttggttttttttgtttagttatttatatttaggttcgtaaggtttttttttgtggttggtatagggaggtgaagtgaatagaggaacgttttttattcgttgttgaatgtggaatgcggttattatttttaaaaagtaatattttgggaggtcgaggtaggtatattatttgaggttaggagtttaagattagtttttttaatacggtaaaattttatttnttataaaaaaatataaaaattagttggatatttgtaattttagttattcgggaatttgaggtatgagaattgttttaatttgggaggtagaggttgtagtgagttgnagattatattattgtatgttagtttgggtaatagtgagattttgttttaaaaaaaaaaaaaagtaatgaagttatatttttttttgagattgagttttgttttgttgtttaggttggagtgtagtggcgcgattttagtttattgtaatttttgtttttcgggtttaagagatttttttgatttagttgtcggagaagtcgttataagaggcgtattttataatataaagcgtattttaaaataaatacgaagtattnnttntttntntnatncgatnttantanttaaggttcgcgtagggggagggaggaga

SEQ ID NO: 1793 - DNA, 13732 bp, Artificial Sequence
  chemically treated genomic DNA (Homo sapiens)
tttttagaatttgataggtgaaaagtagtaggtgagaagtttttaataaatagtagtaacgtgaatgattttagatattatgaaaagttttaaggataatttattatttaggtaacggagttaagaaaggaatttcggtcgggcgtagtggttttcgtttgtaattttagtattttcggagatcgaggcgggtggattatttgaggataggagtttaagattagtttggttaatatggtgaaattttgtttttattaaaaattaaaaaaaaaaaaaaaaaaagtagttaggtatggtggtatgtgtttgtagttttagttacgtgggcggttgaggtagaattgtttgaatttgggagatggaggttgtagtgagtcgagatcgtattattgtattttagtttgggtgatagagtgagatttttttttttaaaaaaaaagagaattttagagtatttttttaggttgtttagttggtattttttaggattttaattttttttaggttttttttagtgatattggagatttttggggagtggttgtgggggatttttacgtggggatttatattgttttggtttttttaagggtgattttttttttagtgttgtacgggttttgggggatagtttagattttagaatgtggttttgtttttaggttattgtggtttttgttggtatttgatgtcggtagtaggatatttttgttattttttattttttaatagagtatttttgtgtttcggtttttggaaaggtcggaatgaaggatattagtttgaatggttagatttttttttttgaggtttttttgatgtttttttggtttgggtgtagttttggtatttgttgattttgtgtttttaggtatattatttgatatttatgtttttattttgtaggtatttattgagtttttattgtatatgagatttagttgtagtttttgcggatagagttagggataagagattgtatttcggtttttcgggagttgattaaagattatgtagataggtagagagttttgtagagattaagataggtagtgtgatgggtagtatggttttagatttaggttatgtgaggagttttaggaagggttttgttggtttagggagtagtttgtgtaaaatttttaggagggagtgggtttggtattttttaaggaatgcgaggttagtgtggttgagatgggtagggttgggggatttgaattatatttaaagggtggaggaagaataatatgggagttaagttggggaggaatatttttttggtagttatggggagggtgaataggaggttgagagaggatggggtgtgagggtagtagggagttagatgttagttggaagttagataggattttagggtttttttttaagtgttatgtgatttttgaggcgtgagggttcgaataaagattttgggatttggggataagggaattattttggataaattgggtgttagtaatatttttagttagtttaggattttggttttgaagttgatttttaggaagattaagagtttttgaaataaggttgaatttttgggttttgtgaaagggaaaatatttaaattttgttttttttttgtttttatattataataattaatataaaagatttttgtgattaaatgtgtgggggtttttttttatgtattaagtaagtaattaattttgtagtaatattagttgggtgttttttaattttattttattttgatgttaattatttggagatagttttagaaattataggttaaggatttagttttttaagagtatttttttttttttatgagtcgtaagattgggattgattagttttaagttggggtttttattattttttttttgggtttaattaatttgttagcgtagtttttaaaatttaggaaagtatatttatcggttagttataaaggatattttaaaggagataaagaaatagttaggtaaagagatatataggcggaggtttggaaaggtttttagtgaaggagttattgtttttatggagttggaatgttttatttttttagtacgtggatgagtttttgtttatttttttgtgagtttttacgtgtttcgttgtttagaagtttttgaattttgtttttttgagttttttatggatattttattggatagatatgattgataattttgtggaaatgtgattagattaaaagtatatgatttaatattaattgattgagtggggaaatttcgtaagatttgtgtgttttgattttttttgatttttttgtgaagtttattgtttggtaaaagggtagatttttgaaattttttgaaaattttgtgttatttaattttgtggtttttaggatagtggttttttaagggagtggttttaatttttttatttgtttaacgggatttatttttattattttgtatttattttggttttttttttttatgggtatgggatagaatttttttttatgggggtttaatgatttataattatacgaggtaggtgagagaatttatttatggttagttttaagatagatcggtaggagaagattttgttatggggagagaaaggagtaggtgaaaggaaggtaggagaaggtttgagagattttgtttttggggtttgtttttgaggtttaaagtattttagtggtataataagggttgggggtagttttaagttaggggtttgtatatgtatattatagtattataggttttatttatgtggaatattaggaggagagagagtttttttgaggtttttggagttttaggtggtggggaggggataattttttttttattatttttaggtttttagagttatggtgagttttgtgttattgttagagattagagtgataaggatgagttttattaggtagatggggaaatggagtttatttttttagggagttattgttttaagggttatagagttggaaggtatagagtttttaaagggttttaagggtttgttttttttttagatagtgagtagtttgagggtagaggtggtatttgttaggtatttgagggtggtatattgtggggtttttttttaattttagtttatagtttttattagttagatattatagggttagtttttgcgggttgggttagtaggagttaggtgttatgggatgttatatttagggtttgattgggtatttgggggttaggttagtagaggagtatttggaggcgagttgggggatttatttaaatttagttaatcgttttatgagttagagttttttgagtatgggtaatgtagggaggatatagaggatatagggcggttattggtgttttttggattttttagggttttagttttttgtttagttattcgtttgagggttttgtttttattttttttttgttaaatggagtttttttttttgtaaaataggtattgtaggtagtatgtattttattggttaagtgtggtgggtagattgaatgaaatagtgtttgtgatgaaagttttttttttaattttattttggggagttttatatttttgggaattatggggtttgataatagtagtggtgggtgtttttgtttttatagatttggaagtaaatttaataatttttttaaaagttagtagtgtttttaggttttaataatttgtaaaggatttttttttagtaattttttagttattattatttggtattgttatggttattattattttatttttatttttaataatttttattttttgtgtagggttttaaagttttgagtggttgggtatggtggtttatatttataattcggtattttgggaggtagaggagggtagatggtttgagtttaggagtttaagatttgtttgggtaaagtggtaaaattttatttttataaaatatataaaaattagtcgggcgtggtagtgtgtatttatggttttagttatttttgaggttgaggtagaaggattatttgagtttaggaggttgaggttttaggtagttgtaattattttattgtattttagtttgggtgattatgggtgatttcgttttaaagaaaaaataagttttttaattattagaaaaaagaaatagggtttggtgcggtggtttatttttgtaattttagtattttgggaggtcgaggcggattatttgaggtcgggagtttaagattagtttgattaatatggagaaatttcgtttttattaaaaatataaaattagttaggtgtggtggcgtatgtttgtaattttagttattagggaggttgaggtaggagaattgtttgaatttaggaggcggaggttgtggtgagttaagattatgttattgtattttagtttgggtaataatagcgaaatttagttttaaaattaagttttgtagttttttgggtttggggttggtcggttggggttaagtttggtatttattagttttgtgattttgattgtttttgttaagttttagtttgtttatttttaaaatgggattcgtcgtgataagtttacggaggattgtgtggaggagggagattgagaggttttcgagttaggagtttagattcgaattttgagttgttcgttatgttattattattggtgtgtgtggttaattgttaatttcgtagttcgtagcggtttagcgtttaggggaggggagcgggtaggaggcggttttaggcggggcggggttgaaggtttggggtgattcgagtttcgttttttttttttgtttcgttttttttattttcgtttcgtttcgttcggcgatttaacgcgttttcgtttcgcgttcggtttcggtagtcgtttgtcgtcgcgggagtagtcgttatttttgtgtgttcgcgtgtgcgttcggttttcgtttgtcgtattatggagagttattataagtttgattagtagaagttgtaggttttgaaggatacggttaatcgtttacgtattagttttatttaggttattattgcggcgggttttgggtgagtgcgcggcgtcggtcggggacgcggttcgggcggggcggggggcgtttgcggcggttagagtcgtcgcgggttttgggtcgcgttgcgagatgtttagacgaggaaggtggttcgggcgtcgtcggagggcggagacgcgcgtttcgtagggtttcgggttgtaggcggttttcgttgcgtcgtatattcgttttacgttcgggttcggtcgcgtgggtttttggtttttcgtgcgttttaggtcggtttttttttacgcggatcgtcggtcgcgtagttgtatggtggcgcgggggatgggttcgcgattcgttaagtattttttagggtgatgtcgggaaggttattattattgttgttttatagaacgcggtttttttaattttttttattatttggttgtgtgggcgtcgtcgggagtgtttttttttttagatggggaaacggaggtttcgagttagttagttatttaaagttatatatagggagatttgatttgagttttagtagttcgattttagagattttgtttttaattttttttgtaggagattcgggggttcggttttttttttattttagattacgtttttttatttttgttttttgttatttttgggttgggttcgagtttggagtagggggttgttgagacgttaggtagcggcggggttgattgggggaagaggggaggagggcggtggtacgtgggtgtagaattttgggatttattgtgaaaaggaggtttaagatttgatttggggcgggaggaggcggagggtaaggagattgagaaggttgagcgtcggaaggacggagttttagggttttagcgtcgggagtgacgttttggggtagggttagttattaggtgttgtattttttaggtaggagttggcgtgtttaggttttaagatttttttttggttagtttttttggtttagaaggtggatatttaaggagttttttttgtagcggagatagggataattaatgagggttatcgtgtatgtagttggaggtgtttagtggggtgggtgagggggttagttagtgaattattttagagtttgtttttcgttttgtaaagcggggatagtaatggtatttaattacgttgggtggttttaaggattttagtgttttatttggaggttgttttgaggttatagtgttagtagtgtttcgggtttatgatagggttgtgagggttgcgtgatggatgatttttcgggatttttttaaataagttttgttttagatagataagattttggtttttggttaattttatttaggatatattattaagaagtaaatttgtttatttttttgggtggatacgtatttattttttgtgtttttaagatattttgtttttagaagggattagatgttttttaaagttttttttttatttattgttttgtatattttggatttgttagtttttttgggtttgtgttagttttattatttatgtggggtattttttgtttgggtagggatttggtttatttttagttttttttttattagtttggtatacggtagttttgtaggttttgtattgtttatttggtattgttggatttgttatttttggtcgttttagggggtttgaggtttagttggagagaggtagtaattatttaattaagtagtattgtatatttgagtattttttagggttagataaaatatgtagatgtttatagggtttttgagttgttaagtaggtatttggtatgatatagtattatcgtttgttgtattttgagaataattttgtgagatagattgtgttgtatttatattttatagacgggaatattgaggttagtgtgttaagttatttgtttaggttgggaattggtggttatttcgtattgtttggttggggtttatgttgttaggaatgttttttggtagggtatggtggtttatgtttgtaattatagtattttgggaggttaaggtgggaggattgtttgagtttaggagttttagattaatttgggtaatatagtgagattttatagtttaaaaaaaaaattttttttttgagatggagttttgttttatcgtttaggttagagtgtagtagtataattttggtttattgtaatttttgttttttaggtttaattggattgttttgttttaattttttgagtaggtgggattatagtttaatttttttagatattttatataaatgtaattatatagaatgagtttttttgggtttggttttttagtataatttttagagggttatttatgttgtaatatgaattagtattttgttttttttttttggggggtggggggtagggtttttattgtgtttcgaagttggagtgtaatggtatagttatggtatattgtagttttaatttttcgggattaagtagtttttttagtttagttttttaagtagttgggaggtatttattattatatatagttaattttaaaaattatttgtagagatagggtatgttgttgagtttggttttaaattttgggtttaagttttttttttgttttggttttttaaagtgttggaattaataggtatgagttattacgtttagttttttatttttttttacggttgaatatttcgttgtgtggatatagtgtattttgtttatttatttattagttttttttagtattttgtttttattttagttttgttgttggtaggtcgtgtgattttaggtaagttattttttgtgaattttagtggttttatttttcgaatgaagtatagtttaatatttattgagtaattgttaatttttatgtatggtgttacgttttgtatatatatattatattatttagttagattttttttttattttcgttttatagtgaggaaattgaggtttaaagaggttatagttttaaggttattaggatatattatgtatttatttgtgtatttagtttgtgtttggtattatttaagtttgtggatataatagtgaaaggtttaaagttttgtttttaaggagtttgtattgtagtagggtagataggtaataattatttaatgttaggtggtaagtatgagtgaggggaagaagagttattttagatagtgtggttagggagggttttttggaagaggtgatatggggtagagatttgaagaaataatttgaggtttggagttagaggtttttttcgggtagaagttagttcgggtagtttagggtataggaagagtaagaattgtttttgatgtttatttttattttgatattttgggatttttttttgagtattttttttttttttttttttttttgagggggagtttgttgtttaggttggagtgtagtggtgcgatttcggtttattgtagtttttgttttttaggtttaagtaatttttttgttttagttttttatgtaaagtagttgggattagtggttcgtattattatgtttagttaatttttgtgtttttagtagaggcggggttttgttatgttggttaggtcggttttgaatttttgattttaggtgttttaggtgagttatcgtttttggttttttttaaatttttttttttttttttttttgaggttgagttttatttttgttttttaggttggagtgtaatggtgagattttagtttattgtaatttttgttttttaggtttaagcgatttttttgttttagttttttaagtagttgggattataggtatttattattatgtttaattaattattgtatttttagtagagacggggttttattttgttggttaagttggttttagatttttgattttaggtgatttatttgtttttgttttttaaagtgttgggattataggcgtgagttatttgaatatttaaaaaaaaaaaagtatatgtataaagaagaagataaatgatgtatttttgttataaataatgaatttgtgtgtagttgtttttaggattaagaattagtatattatagtgatttttggaattatagtgggtttttttatttttattttttttttttttgagaaagaattatattttgaattttttgtttgttattattttattgttttttttttttttttttttgagacggagttttgtttttgttgtttaggttggagtgtaatggcgttatttcggtttattttaattttcgtttttcgggtttaaacgatttttttgttttagtttttcgagtagttgggattataggtatgtgttatatgttcggttaattttgtatttttagtagagatggggtttattcgtgttggttaagttggttttaaatttatgattttaggtgatttgtttttttcggttttttaaagtgttgggattataggtttgagttatcgtatttggtttgttttttttgtagtatatataaaaagatttgtatataaattaatatggttttttttgttaaatagatttttttgtattgtgttttttttatattatatttgggagagaatattgatatcggatttgtgaagtgtagttcgtttatttttattgttgtatagtattttattatattaatatattttagttaatttcgtttattgataaatatataagtgagttttaggttttgtaattgtaaataatgcggggtagttttgtttgtgtttttttttttttgttgttgttgttgttttttttttgagatggagttttattttgttatcgagtttagagtataatggtacgattttgatttattgtaattttagttttttgggtttaagtggtttttttgttttagttttttaagtagttgggattacgggtgtttgttattatgtttagttaatttttgtatttgtagtagatatagggttttattatgttggttaggttggtttcgaatttttgattttagttgatttatttattttagttttttagagtgttgggattataggtgtgagttattgtgttcggtttgtttgtgttttttgtagaatgtgtggaatatgtgagtatattttattgtatgtttttattggtgaagttgttgggagttaagggatgtgtattttcggttattgatttggtttatttttaatgtttgaaagattatttaggttttttatttttttttgagttagttttggtaaattatttttattattgttattattttttagatagagttttattttgttgtttaggttggagtgtagtagtatgatttcggtttattgtaatttacgttttcggggtttaagttatttttttgttttagttttttaagtagttgggattataggtatgtgttattacgttcggttaatttttgtatttttagtagagacggggttttattatgttggttaggttggtttttgagtcgttgattttaggtgatttgtttgttttggttttttaaagtgttggaattacgggtgtgagttatcgcgtttaatttgatatttattattttttgaaggagtttatttggagggtgagggagtttttttggtttttttttgtatagaaatttgtgagtaggtggagtgagtattaaagcgatgatagagatttttttggttaggggatatttggaagaatatatattgttttggaggggagtggagagggggtttttttttttttttttttgagatggagtgttatttttgttgttaaggttggagtgtaatggtgtaattttggtttattgtaatttttggtttttaggtttaagtgatttttttgttttagtttttcgagtagttgggattataggcgtttattattatatttggttaattttttggtatttttagtagagatggggttttattatattggttaggttggttttaaatttttgattttaggtgattcgtttgttttgattttttaaagtgttgggattataggtgtgagttattgtttttagtttggagggggttttaagagattttttttgggtttagttttaagtttgttatattatcgttataggttgaattaattggggttgtaagtggattgttttggttaaggtagggtgtgttagttttttttttttttttttgaatagttaagtgtgtttgttagttttgtttattatagagttagggtatatagtaagtattttgtagtttttttatcgtgttttttattttatttttcgttagtgtttatttagagttgttatatatagtattacgggatggggcgtttatttgtagttgtgtaggtagtttggaatggtaggaaaaattttggttttgaggaggttataggtttaaatgtatgtttttggttttaaaggttcgttaggaagttgagtttgaaagtaattgttttttgtgtgtttagtgttttatagtgtgtagagttcggttttaatttttggtgtatttttttttttttgtttgtttgtggttagtaggagtgggtggtgttattatttttgtttgtagataagagttgtaggtgttgagagggttggtagtggtggcggttgttagagatttgggtattgtgtatgttgcgttattttattgtgttttttagatatttttttaagtgaagaagttgagtttcgggttgacgaagtatttgttgaagttacgaagtttaagtggtatagtttatttttttaatttaggatgttttgtcgagggagagttttaaaagttttggggaagagtgcggggatatttggtttttaagcgttttttttttgtgcgtgtttatttggtagaagtgaagagagtggtcgtagtaggttggatgtagtttttggaaggaatgaaaggttgtaggtttagtaaggaaggtttaaaattagttgtacgttttattttttatttttggttatttcgtagttgatttttttttttttacgtttattttatttgggtttgggtgtgtttttgttatatatagaaagagtttgtgttatattatttttttttggaattttttttggtggttaatgggattgttatttcggggtgtcgaggtggatggggtaggtggagttttgtatttatcgtttttgttttttttcggaatagtttggtttagtgtttatttatattttttttttattaaggattttttttaatgggattatggttttagaaataggattttttagggtcggggttgtttttggaggtgggaaggacgagaggttagtttgaggtgatttttagttgaagttggttttgggagcgtgggattagggtggtttttagttgaagttggtattgggagcgtgggattagggtttttgttaggtagaaaagggtttttcgtttattatgttttttttttttttttttaggtgtagtgtttttttttatgatcggggagtttatagaaatagttaagtataagatgatcgtgtgcgagaatgttggtattaaattagtatggatagttttttggatttttttattattaatttgtttgtattgagcgtgatttatttttaatttggtgggagcgttgattggaggggcgggaggttggcggcgtgagttttagatggtgtatgtgtttttgggtttggtatgcggcgtgttttcgtgtgaaggatttttgggagtagcgagagggttgagttgagttgagttgagttgtatgtggaggggttttttcgggaggtttgtgttttgaggttgaatttttaataaaattttgggattagagggttttagggttgattaggatttgtagcgttttttgttgggaagtaggaagtaatagaaagtttacgttttttattgtttaggagtcgtttagtgattaaaataagtttaaaaagttaaggggatttcgtggttttattatttttaggttggaaggtaggtttttgttttgttagtttttttttagtttttgtttataggtagaaggggtttttattaatatatgattgtagttttgtaggagatgagattatgtgttttgttttgaaaattttatataaaagtttgttttttagttgttatagtagtttttaaattgtttatttttaaagtttttaagtagtttagtgatgtaattggaaagtttaaggtttagttttttaggttattatattttatgcgtggaggttgttgggaggtttgtggtaattttatgagttttagtttttttttttttgttttatgggtttagaggtttagtatttttgggtgttgagagggtagggtgttttttataagtgggtagtgttcgggtagttttgttaggatgtggggttagtcgtaggaatgtcggtattttttggttgttgagtttttagatttttgggggttattaggtgggaattgggttttatttgatagtagttgtttttagtcgtagtgttagttttgggttgagttttttgtgttagattttttttgggttttttttttttttttatttaagtttaattttagatatttttagttgtcgtgattttgaggatttgatgtttttggaaaggtataatagtttttagtatttattagttggtttaggttttaaattgttaggagtggtttttttgagattatgtgttatttttttagggaataagagttcgtggttgtttgataagttaggtttgtgtgattttttaggatatgtatttttaggtttttgtatagttgagtataatagtttaggagtgtagggttatgatgtttgtgtttgtttttttttttgggttatagt

SEQ ID NO: 1794 - DNA, 13732 bp, Artificial Sequence
  chemically treated genomic DNA (Homo sapiens)
gttgtggtttaggagagaagatagatataggtattatggttttgtatttttgagttattgtgtttagttgtatagggatttgggggtgtatgttttgaggagttatataggtttggtttattagatagttacgagtttttgttttttgggagggtgatatatggttttaagaaggttatttttggtagtttggggtttgggttagttagtgggtgttggggattgttgtatttttttaggggtattagatttttagaattacggtaattgaaaatatttggggttggatttgagtaagaaggaaggaggggtttaggagagatttagtatagaagatttagtttaaggttagtattgcggttgggggtagttgttgttaggtagaatttagtttttatttagtggtttttaggagtttaaggatttagtagttaaggggtgtcggtatttttacgattgattttatattttgataggattgttcggatattgtttatttgtgaagggtattttgtttttttagtatttaggggtgttgggtttttgagtttatggggtagggaggaagggattgaggtttatggagttattatagattttttagtagtttttacgtatggggtgtggtagtttgaaaaattgggttttgggttttttaattgtattattgggttatttgaaagttttagaaatgggtagtttgagggttgttgtagtaattaggaaataggtttttgtgtagaatttttaaagtaagatatataattttattttttataaggttataattatgtattaataaaaattttttttgtttatggataagggttgaggaagggttgataaagtaagaatttgttttttagtttgggagtggtggggttacggagtttttttggttttttagatttgttttaattattgagcggtttttgagtaatagaaagcgtaaattttttattgttttttgttttttagtaggaagcgttgtaggttttgattagttttgaagttttttggttttagggttttgttaaaagtttagttttagggtataggtttttcgggagggtttttttatatgtagtttagtttagtttagtttagttttttcgttgtttttagaggttttttatacgaagatacgtcgtatgttaagtttaagggtatatgtattatttggagtttacgtcgttagtttttcgtttttttaattagcgtttttattaggttaggggtgagttacgtttagtgtagataagttagtagtagagaaatttagaaaattgtttatgttggtttagtattaatattttcgtatacgattattttatatttaattatttttatgaatttttcggttatgggaaaagatattatatttgaaagagggaggggaggatatggtaaacgagaaatttttttttgtttggtagggattttaattttacgtttttagtgttagttttaattggaggttattttaattttacgtttttagggttagttttaattggaggttattttaggttgatttttcgttttttttatttttaagggtagtttcggttttgaggggttttgtttttaaagttatggttttattaggagggatttttggtgggagaaggatgtgggtggatattgggttaaattgtttcggggaagaataaggacggtaagtgtagggttttatttgttttatttatttcgatatttcggggtgatagttttattggttattagaaggggttttagggagaaatggtgtggtataggttttttttgtgtgtggtagaagtatatttaggtttagatagagtaaacgtggagagaggaaggttagttgcgaggtgattaagggtgagaagtagaacgtgtagttgattttaagttttttttgttaggtttgtagttttttattttttttaaaggttgtatttagtttgttgcggttattttttttatttttattaagtaaatacgtataaaagaagaacgtttaggagttaggtgttttcgtatttttttttagagtttttggggttttttttcggtagagtattttgggttggggaggtgagttgtgttatttgggtttcgtgattttaataagtgtttcgttaattcggggtttagtttttttatttgggagagtgtttgggagatatagtgagataacgtagtatgtatagtatttaggtttttagtagtcgttattattgttaatttttttagtatttgtagtttttatttataggtagggatggtgatattatttatttttgttggttataggtaggtaagaggggagaaatatattaaggattgagatcgggttttgtatattgtaaagtattgagtatataggagatagttatttttaagtttaattttttagcgggtttttggggttaaaggtatatatttaagtttgtggtttttttagggttagagttttttttgttattttagattgtttgtataattgtaggtggacgttttatttcgtggtgttgtgtgtgataattttgggtgaatattggcgagagatggggtgaggagtacggtggaggggttatagggtatttattgtatattttgattttgtgataaatagggttaataagtatatttgattgtttaaaaaaaaaaaaaaaaaattaatatattttgttttgattaaaatagtttatttataattttaattagtttaatttgtgacggtggtgtggtaagtttagagttaggtttaaagaaagttttttaaagttttttttaggttgggggtagtggtttatatttgtaattttagtattttgggaggttaaggtaggcggattatttgaggttaggagtttaagattagtttggttaatatggtaaaattttatttttattaaaaatattaaaaaattagttaggtgtggtggtggacgtttgtaattttagttattcgggaagttgaggtaggagaattatttgaatttgggagttagaggttgtagtgagttaagattgtattattgtattttagttttggtaataagagtaatattttattttaaaaaaaaaaaaaaaaaagttttttttttatttttttttaggataatatatatttttttagatgttttttggttaggagaatttttgttatcgttttagtgtttattttatttgtttataggtttttatgtaagaaaaggttagagaggtttttttattttttagatgggtttttttaagagataatggatgttaggttgggcgcggtagtttatattcgtaattttagtattttgggaggttaaggtaggtagattatttgaggttagcggtttaaagattagtttggttaatatggtgaaatttcgtttttattaaaaatataaaaattagtcgggcgtggtggtatatgtttataattttagttatttgggaggttgaggtaggagaatagtttgaatttcggaggcgtgggttgtaatgagtcgagattatgttattgtattttagtttgggtaatagagtgagattttgtttaaaaaataataataataatgaaaataatttattaaaattgatttaagaagaaatagagaatttaagtaattttttaagtattaaaaataaattagattagtagtcgaagatgtatattttttaatttttagtaattttattagtaggaatatatagtgaaatgtatttatatgttttatatattttataggaaatataaataggtcgggtatagtggtttatatttgtaattttagtattttgggaggttgaggtgggtggattaattgaggttaggagttcgagattaatttggttaatatggtgaaattttgtatttattataaatataaaaattagttgggtatggtggtaggtattcgtaattttagttatttgggaagttgaggtaggagaattatttgaatttaggaggttgaggttgtagtgaattaagatcgtgttattgtattttagattcggtgatagagtgagattttattttaggaaaaaaataataataataataaaaaaaaggaaatataaatagggttgtttcgtattgtttgtaattgtaagatttggaatttatttatatgtttattaatagacgaggttaattggaatatattaatataatgggatattatatagtagtaagaatgagcgagttatattttataaattcggtattaatatttttttttaaatatagtgtgaaaaaagtatagtgtagaaggatttgtttaataaagaagattatattgatttatgtataagtttttttgtatatattataaggaaaataggttaggtgcggtggtttaagtttgtaattttagtattttgggaggtcgaggagggtagattatttgaggttatgagtttgagattagtttgattaatacggataaattttatttttattaaaaatataaaattagtcgggtatgtggtatatgtttgtaattttagttattcgggaggttgagataggagaatcgtttgaattcgggaggcggaggttgaagtgagtcgagatggcgttattgtattttagtttggataataagagtaaaatttcgttttaaaaaaaaaaaaaaggaaaataatagaatgataataaataaaaaatttagggtatagtttttttttaggggaagggaagatgaggatggagggatttattgtagttttaaaaattattgtaatgtattagtttttaattttgggagtagttatatataggtttattatttatgataagagtatattatttatttttttttttatgtatatatttttttttttttaaatatttaggtggtttacgtttataattttagtattttgggagatagagataggtggattatttgaggttaggagtttgagattagtttggttaataaggtgaaatttcgtttttattaaaaatataataattagttgggtatggtggtgggtgtttgtaattttagttatttgggagattgaggtaggagaatcgtttgaatttgggaggtagaggttgtagtgagttgagattttattattgtattttagtttgggagataagagtgaaatttagttttaaaaaaaaaaaaaaaaaaaaatttagaagaggttaggggcggtggtttatttgaggtatttgaggttaggagtttaagatcggtttggttaatatggtaaaatttcgtttttattaaaaatataaaaattagttgggtatggtggtgcgggttattagttttagttattttatatgggaggttaaggtaggagaattgtttgaatttgggaggtagaggttgtagtgagtcgagatcgtattattgtattttagtttaggtaatagatttttttttaaaaaaaaaaaaaaaaaaaaaaaatatttaggagagaattttaggatgttagggtggaaatgaatattagaagtagtttttgttttttttgtgttttgaattattcgagttggtttttgttcggaaagaatttttggttttagattttaggttgtttttttagatttttgttttatgttattttttttaagaagttttttttgattatattgtttaaaatagttttttttttttttatttatgtttgttatttgatattaggtggttattgtttgtttattttattgtaatataagttttttgaggatagagttttgggttttttattgttgtatttataggtttgaatagtattaggtataaattgagtgtataaatgaatatatgatgtattttagtaattttggggttgtaatttttttgagttttagtttttttattataaaacggaggtaaaagaagaatttgattaaatgatgtagtgtgtatgtatagaacgtggtattatgtatagaaattagtaattgtttagtaaatattagattatgttttattcggaggatggggttattaaggtttatagaaagtgatttgtttaaagttatacggtttgttagtagtagagttaggataagagtaaaatgttaagaaaaattggtgaatggataaataaaatgtattatgtttatataacggaatatttagtcgtaaaaagaaatgaagggttgggcgtggtggtttatgtttgttaattttagtattttgagaggttaaggtaggaagaggatttgagtttagaatttgagattaggtttagtaatatattttgtttttataaataatttttaaaattagttgtgtatggtggtgagtgttttttagttatttaggaggttgagttgggaagattgtttgatttcgggaggttgaggttgtagtgtgttatgattgtgttattgtattttagtttcgggatatagtggagattttgttttttattttttaaaaaaaaggaataaagtattgatttatgttataatatggatgattttttaaaaattatgttaagaggttagatttaaaagaatttattttgtataattgtatttatatgaaatgtttagaagagttaaattgtagttttatttatttaggaggttagggtaggataatttagttgaatttgggaggtagaggttgtagtgagttaagattgtgttgttgtattttagtttgggcgatagagtaagattttattttaaaaaaaaaattttttttttaagttatggggttttattgtgttgtttaggttggtttggaatttttgggtttaagtaatttttttattttggttttttaaagtgttgtgattataggtatgaattattatgttttgttaagaagtatttttgatagtatgagttttaattagatagtacggaatggttattaatttttagtttgggtaagtaatttaatatattagttttagtgttttcgtttataaaatgtgaatataatataatttattttatagggttatttttaggatgtaataaacgatgatgttgtgttatattagatatttatttggtagtttaggaattttgtaaatatttgtatgttttatttagttttgaaagatgtttagatgtgtaatattatttagttgggtaattgttgtttttttttagttagattttagattttttgaaacggttaaaggtagtaggtttaatagtattaaataagtaatataaggtttgtagagttatcgtgtgttaggttggtgaaaggggagttgagagtaagttaggtttttgtttaggtaggggatattttatataagtggtaagattgatataaatttaggagagttaataggtttaaagtgtgtaaggtagtgggtgggggaagggttttgaaagatatttaattttttttgagaatagggtgttttagaggtataaagggtgaatgcgtatttatttagaaaggtgaatagatttattttttaataatatattttgaatgaaattggttagaagttagaattttgtttgtttgaaatagagtttgtttgggaaggtttcgagaaattatttattacgtagtttttataattttgttatgagttcggagtattgttggtattgtggttttaaagtagtttttaagtagagtattggagtttttgaaattatttagcgtggttaagtgttattattgttttcgttttatagagcgggaagtaggttttgaagtaatttattgattgatttttttatttattttattggatatttttagttgtatgtacggtggtttttattaattatttttgttttcgttatagaggaggttttttgggtgtttattttttgggttaaaagggttggttagggaaggattttggggtttaggtacgttagtttttgtttgggagatatagtatttggtggttggttttgttttaggacgttattttcggcgttagggttttggaatttcgttttttcggcgtttagtttttttagtttttttgtttttcgttttttttcgttttaggttaaattttagattttttttttataatggattttagggttttgtatttacgtgttatcgttttttttttttttttttttaattagtttcgtcgttgtttggcgttttagtagttttttgttttaaattcggatttaatttaggggtggtaggagataggggtaggggagcgtagtttgaggtggggagaaggtcgggttttcgagttttttgtaagaggaattaaaaatagggtttttagagtcggattgttggggtttaaattagatttttttgtgtgtaattttgggtagttgattaattcggagttttcgtttttttatttggaagggggaatattttcggcggcgtttatatagttaggtggtggagagggttaagagggtcgcgttttgtagaatagtagtaatggtggttttttcggtattattttagagggtatttggcgagtcgcgagtttatttttcgcgttattatgtagttgcgcggtcggcgattcgcgtggggaagagtcggtttgaggcgtacggaggattagaggtttacgcggtcgagttcgggcgtagggcgagtgtgcggcgtagcggaagtcgtttgtagttcggggttttgcgaggcgcgcgttttcgtttttcgacggcgttcgggttatttttttcgtttaggtatttcgtagcgcgatttagagttcgcggcgattttggtcgtcgtagacgtttttcgtttcgttcgagtcgcgttttcggtcggcgtcgcgtatttatttagagttcgtcgtagtggtggtttggatggagttgatacgtaggcggttggtcgtgttttttaaggtttgtagtttttgttggttaggtttgtggtagttttttatggtgcggtaggcggggatcgggcgtatacgcggatatatagagatagcggttgttttcgcggcgataggcggttgtcgaggtcgggcgcggggcgggggcgcgttaagtcgtcgggcggggcggggcggggatgggagaggcggggtagggggaggaggcggggttcggattattttaggtttttagtttcgtttcgtttggggtcgttttttgttcgttttttttttttaggcgttgggtcgttgcggattgcgaggttagtagttaattatatatattaataataataatataacgaataatttaggattcgagtttgggtttttgattcgaaagttttttagttttttttttttatatagtttttcgtggatttgttacggcgaattttattttagagatggataaattgaggtttggtaagggtaattaaggttataaggttggtgggtgttaggtttggttttagtcgattaattttaggtttaagagattgtaggatttaattttgagattgagtttcgttgttgttgtttaggttggagtgtaatggtatgattttggtttattataattttcgttttttgagtttaagtaatttttttgttttagtttttttagtagttgggattataagtatgcgttattatatttagttaattttgtatttttagtagagacggggtttttttatgttggttaggttgattttgaattttcgattttaggtgattcgtttcggttttttaaagtgttggggttataggggtgagttatcgtattaggttttattttttttttttaataattaaaaaatttgttttttttttgagacggggttatttatggttatttaggttggaatgtagtggagtgattatagttgtttgaagttttagttttttgggtttaagtgatttttttgttttagttttaaaagtagttgggattataggtatatattattacgttcggttaatttttgtatgttttgtagagatggggttttgttattttatttaggtaggttttgaatttttaggtttaagttatttgtttttttttgttttttaaagtgtcggattataggtatgagttattatgtttagttatttagggttttagagttttgtataggggatggggattattgaaaatgagaataggatagtggtagttatgataatgttaggtgatgataattgagaaattattaggggaagattttttataaattattagggtttagaaatattattgatttttagggagattattgggtttgtttttaggtttgtagggataggggtatttattattattgttattagattttatggtttttagaggtatgaagttttttagagtgggattagggaggggatttttattatagatattgttttatttaatttgtttattatatttggttagtgaggtatatattgtttataatgtttattttatagaggaagaagttttatttgatagaggaaagataaaggtaagatttttaaacggatggttgggtagggagttaaaattttgagagatttaagaggtattagtggtcgttttgtgttttttgtgttttttttgtattgtttatatttagagagttttggtttatgaggcgattgattgaatttgagtgagttttttagttcgtttttaggtgtttttttgttggtttgatttttagatgtttaattagattttaagtatggtattttatagtatttggtttttgttggtttagttcgtagaggttggttttatggtgtttggttggtgagggttatgggttaggattggaggggggttttatagtgtgttatttttagatgtttggtaggtgttatttttgtttttaagttgtttattgtttggaaaaagggtaaatttttgaaattttttgaaagttttgtgttttttaattttgtggtttttagagtagtggttttttaagggagtggattttatttttttatttgtttaatgggatttatttttattattttggtttttgataatggtatagaatttattatggttttggggatttaggagtaatggaaagaaaattgttttttttttattatttggagttttagggattttagggaggttttttttttttttggtgttttatatgaatggggtttgtgatattatgatatgtatatataggtttttggtttagaattgtttttaatttttgttatattattggggtgttttagattttaggagtagattttagaaatagagttttttaggtttttttttattttttttttatttgtttttttttttttttatggtaggatttttttttgtcggtttgttttggagttggttataagtaagtttttttatttatttcgtgtaattgtaggttattagatttttatgagaaggggttttgttttatatttatgaggagggaagattagagtgggtgtagagtgataaggatgagtttcgttaggtagatggggaaattgaggttatttttttagggagttattgttttaagggttatagagttggatggtatagagtttttaaaaggttttaagagtttgtttttttattagatagtgagttttatagagaggttaagaagagttaggatatataggttttgcggggtttttttatttagttagttagtattagattatatatttttggtttaattatatttttataaggttgttaattatgtttgtttaatgaaatgtttatgaaaggtttaagaggatagggtttaggagtttttggatagcggaatacgtggaggtttataggaaggtgaataagaatttatttacgtgttgggagggtggaatattttagttttatggagataatggtttttttattagggatttttttaggttttcgtttatgtatttttttgtttaattgtttttttgttttttttaaaatattttttgtaattaatcgataaatgtgtttttttgagttttgagagttgcgttagtaaattaattgaatttaaagagggagtggtgggaattttaatttgaagttggttagttttaattttgcgatttatgggaaggaggaggtgtttttgggggattgaatttttaatttgtggtttttgaggttatttttaggtaattagtattagaatggaatagagttggaggatatttagttggtgttgttgtagaattggttgtttgtttggtgtatggggagaaatttttatatatttgattataggagttttttgtgttaattgttgtggtgtgagaatagaggaaaaatagagtttgagtgtttttttttttatagggtttaagggtttagttttattttaagagtttttggtttttttgaaggttagttttagaattagaattttaggttagttggaggtgttgttagtatttagtttgtttagggtggtttttttgtttttaggttttagggtttttattcgaatttttacgttttagaagttatatggtatttggaagaaagttttgggattttgtttggtttttagttaatatttggttttttgttgtttttatattttatttttttttagttttttgtttattttttttatggttgttagagaagtgtttttttttagtttaatttttatgttgttttttttttattttttggatataatttaggttttttagttttatttattttagttatattgatttcgtattttttaaaaaatattaagtttatttttttttagaggttttgtataggttgttttttgagttagtagagttttttttgaggttttttatatggtttggatttagagttatgttgtttattatattgtttgttttggtttttgtagggttttttgtttatttgtatgatttttggttagttttcggagagtcggaatataattttttgtttttggttttattcgtagggattataattgggttttatatataataggggtttaatgaatgtttgtagaatgaaagtatgaatgttaagtgatgtgtttgaggatatagagttagtaagtgttagggttgtatttaagttaagagggtattagggaggttttaggggagggaatttggttatttagattggtgttttttatttcggtttttttagaaatcgagatataaaggtgttttgttggagggtaggaagtggtagaaatgttttattgtcggtattaggtgttagtagaggttatagtgatttgagagtagagttatattttggaatttgagttgttttttaggattcgtgtagtattagggagaaggttatttttagaggagttagaatagtgtgagtttttacgtaagagttttttatagttattttttagggatttttagtattattaaaagggatttgaggggggttggggttttgaggggtgttaattaagtagtttggagaggtattttagaattttttttttttttgagagagagagttttattttgttatttaggttggagtgtagtggtgcgatttcggtttattgtaatttttattttttagatttaagtaattttgttttagtcgtttacgtagttgggattataagtatatgttattatgtttggttattttttttttttttttttttaatttttagtagagatagggttttattatgttggttagattggttttgaatttttgtttttaggtaatttattcgtttcggttttcgaaagtgttggaattataggcgagagttattgcgttcggtcggaattttttttttgatttcgttgtttaagtgataaattatttttgaggttttttatagtgtttgaggttatttacgttattgttgtttattaaaagttttttatttgttgttttttatttgttaagttttaggaa

SEQ ID NO: 1795 - DNA, 6113 bp, Artificial Sequence
  chemically treated genomic DNA (Homo sapiens)
ttgaaggaagtttttttttgttagaaattataaggtagagagttggagatttggaattaataagaaagtatttttagttagttggataatttgatggttaggataaagaaaaatagtaagatagtgatttgtatataaaaattttttaattttatatttaggtttattgattaagtttttttgatgttttaattattagagaggattagggatgtggaatagggtaggagaaatagttttggatttaaggtaaaattttggttttaaattttagttttgttatatgttatataatttatatgatatttttttgtgtaagggaggaataaggatgtttgttttgttttatattttattttgtgaaaattaaatgtaattatgaatataaaaggtagattattaatattaaggtagttgaattttaaaagtttgttttttttttttatatatatttttaatcgtggagatagttaggttttgtggtaatgaagaaaattgattaatgattgtttttggtattattttgggaagtagggatggaataggggtaagggaagggtttagttttaaattgtagatagaagtgggaagtttaaatttttgtatggtgagaagtgggatggaatgtaggtgttagagatggtgtattagtagggattgttattggattggggaaaaaaattcggggttgtttttatttgtttttttaggtaaaatcgttttgtgttagtttggagggtgaatttattttaatgtaggagggtatagatttttgggtggaagcggattttggagatgtattggtaggtgaatagagtgtggaaaagtggggaaaggagaagtacgatttatgagtttgagttcgggtttttatggatggaaaagtattaggagtggaatttaaagacggtgtgttttaggtgatgtgaggttttggatgttcgaagttttaagaaaatattggttgggtatttagttttttttgtggttgttaattttacgtaggtcgtttttagcgtttcgattcgtttttttttgatttggaattttcgttaagtttttagttttttttttcgatttagttttgtacggggtagttgtcggggtaggattcgtttttggtttgtcgtagtttagtttacggttaagggcgggagtttgttgggaagtacggtcgcgggggttcgttcggggttatttgtttggaatttagcgcgaggtttagagtttttttcggttgcgtagcggcgtacgtgtttcgtggaaggggcggttttcgtattttagaaggagggggcgttcggtcgcgcggatttttttttttgtttattttttagtttcgggtaggtcggttcggaggtagcgagaaagcgtagttaggcggttgttcggcgtttttttaggtgattgttcggagtttttttaggtacgtcgtgcgttttttattcgtgtggtttttttgtatttttttttggggtcgggtcgggtaggggcggaggggagtcgtagttcggttacgggttttggggaattcgggttttcgttcggttgtatttgggtttttagtttttgttcgggcggggatagcgggaagcgtattaggttttcgggacgtcggtgtttttttgtacggtttagcgcgggaatgtggatattagcgaagtcggtttaggtcggttttcgggagaagtaggggttatacggaaagggagttcgagggttttgtagagttcgaggtcgggatttcgcgcgtgtagtgttaatgggttgcggttgggttgagcgtttttttaattttgtaggtttcgggggggttgtcgcggagagttttcgttggggtttcgggtttttggtcgttatttttttcgggaggtcgaggggggcggtggtttcggttcggttttttcgttttttttacggtttggttttttcgtttttttgattttcggtagggtcgtttttttcgttttttggttttttttggttcggatgataaagattgggtaaaggtttttaacgagttagcgtttggtagggggtgtgttttcgtttattggttattgttaggacggagtttggattttggttatcgtggtttagaggtgggaaaggtttcgtgttttgggtttgtttaggattttggttttttaatttaagtttgatttttgttttttggtaggtttcgttttatttttgcgtttttttatttttaggatgtgtgagttaggtttttgattagaaaataatttatagcgtttaagtaaagtcgagttttttaagtaagaatgttttgaagtgttttttataatttttttaatttttataaatatgaatttgtgtttagaatttaaatgtaagttaggaaagttttttttttgtttgaaagagagagaaagagagagaaagaggtgattggaagtggtgggtgggggcggagaaagagaaggagagtaatttgggtgtagataatttaaagtttgttgagatgattttaattttttgattttgttattaagatttttattaaagagtaattgtagttatggtggtttgatttgaagggatagattaaataaataataaaatataaaataaaataaataaataataaaagtaagagtagaaattattggaaaatgatttatttattaatattttaaaggttttttttgttttaagtaaggaatatttttaagttttttataatgtatttattttatatttataaaaattgttagaagttgatagtatgttttgggggtttttaagttattagttaattttttggggtatagttttattgataaattaatagagtagaaaaaatttaatggaatatttttaaatttaaaagagggtaagaaaagagagataatagaatataaaataaatgggataagaataaagtatatagttgttatagttttttgggtgttgttgtaataaaatatttgagattgggtaatttataaagaatagaaatttatttatttatggttttggagtttgggaagtttaagattgaagggttgtatttggtgagggttatttggttatattataatatgatggaaagtattatatggtgagagagagtaagagaggatagaatttatttttataataaatttatttttataataaattgtttttttggtgataatattaatttatttatgagggtatagtttttataatttaattattttttaaaaggttttattttttagttcgtagtgagtcgagattatgttattgtattttagtttgggtgatagagcgagattttgttttaaaataaataaataaataaaaattttattttttaatattgttgtattgaagatgaaatttttaatatatgagttttggggtatatatttaaattatagtaatagtttaattattttaaagtttaaaatgttagtaattatattaaatgtaatttaatatattagtaattaaatgagatagattaaattttatgataattagattaatattattagattagattttaaaataatttaataattatatgttgtttataagagatatatttatggatattaaaaggtataaagtgaatagatgtaattatttattaaaagaaagttgttgtggtaatattattattagataaaatagaattaggaaaaaaattataattgtagataaacgttttattaagttaaaggttttattgagaagaaataaaaattttgaatttataagtatttataataatattaagaaattagaaaatagaaaaagaatagagttaaattgattgaattagaaaaatagaaaatttatagaaaaatttataattatagtgggagattttattatatattttttagtaattgatagaaaaattagataaaaattaataaggataaagaaaatgcgaatataatgtagtttatataaggaatttatattatttttaatagtagttgaaattatagagtatatttaaaatttgattatatattggtttatagagtaaattgtaatatattttaaagaatttaaattatatagaatatgttttttgattataatgtaattaaagtagaaaagaatagaaaaatttatagaaaatttttatatatttggaaattagtaaatttttaaataatttatgggttaaaaaataattagaatgaaaattagaaaatatttttaatgatttatgaaaaaaattatatataaaaatttgttagatgtatttaaattgttgtttaaaggaaatttataattttaagtgtatatattagaaatgaagagtgacgaaaaatgaatgagtaagtaaatattttaaaaattggaaaaggaatagtaaaataaatttagagaaattagaataggggaaataataatataagaatagaaattaatgtgttagaaaataggggatttattaagttagaagttgattttttgaaaatgttaataaaaatgatgaatttttggtaagataataaaagttggtataaataatttatttaaggaataaaattgaggattttttttttgttaaatgatataagtaggaggttattattttgagattgtttttatattttgagtttttatataataaattgtaatttaatttagtatattatataaataaattgaaatttaatttaggagttttttttttgtaattaatagttaaatttttattaaattataaatagttaagttttagttaattataggtagttaattgattagattatgtttaaataaggtaaatgtttattatattatatttaaataaggtagatttttagttgaagttaattaggtgattattatgtttttgtgtttggtttataaaagtttattgtttatattgttggatgttttttgaaatttttgtgaatttgagtgttgtttgatttatgaattattttttgttaaaataaattttgttaaatttaatttgtttgaagttttttttttaatagtgtttggtgttgtaagtaggatttaaaggagatttatagtgatttttaggagtttttagtgattaagtgaaggtatttgtggggtttattgtgtttattgtttttttattgtttttaattggtagttgtgggtaagtttttgtttagatttgagtattatatatttgtatttttagttttttgattttatttgagtaattttttgatggattggttttagaattggattggatttagtgaagaaattgaaattggattggtgttttaggaggttttaagtagataaggttattagaagatagggaattttgggtttatttggatttaaggagtttataattttatttgtaattttagtcgattttatttataagaattatggattaagaatttgtgtttttttagagaaatgtgtgagttttattaaaggtaatttagaattataatggattgttgagattagttcggtcgtggagattttaatttagtagcgttagaggaattaaagatatatatatagaaatgtagagtgtggagtgggaaattaggggatttatagtttttagagttgagagtttttaatagagatttatttatatatttattgatagtaagttagtgataagtattatcgttatagattatagattaattaaaagtattttttataggaaataaagggatgggtcgaaataaagggataggttttggttagatgtttgtagtaggaatacgtttttaaggtatagattgtttatgttattgttgtggtttaggaatacgttaagcggttttttgttttgggtgggttaggtgttttttgtttttattttagtaaatttataatttttagcgtgggcgttatggttgttataaatatgttatagtgttgtagagattttgtttatggttaaatttggggttagtttatggttaggtttgggagtttgtttttatatgttttttttttttgttttgtaaagtaataaaagtaaaggtagttttgttatagtgagttattttttgtaggagtcgggattcgtatatgtatattatataaagataaataatatagattaaaagtttaattattattgaaattatagagtttttaagtgtttttatttattt

SEQ ID NO: 1796 - DNA, 6113 bp, Artificial Sequence
  chemically treated genomic DNA (Homo sapiens)
aaatagataaagatatttggaagttttgtgattttaatgatggttgggtttttaatttgtgttgtttgtttttgtatagtatgtatatgcgaatttcgatttttgtaagaagtagtttattgtgataaagttgtttttgtttttattgttttgtaaaataaaaaagggggatatgtgggaataggtttttaaatttggttataaattagttttagatttggttataaataaaatttttgtagtattgtgatatgtttgtgatagttatgacgtttacgttgaaggttgtgggtttattggaatgagggtaaggaatatttggtttatttagggtagaaaatcgtttaacgtgtttttaagttataataatagtatgagtaatttgtgttttaaggacgtgtttttgttgtagatatttagttagagtttatttttttgtttcggtttatttttttgttttttgtaaggaatatttttagttaatttataatttatagcgataatgtttattattggtttgttgttagtaaatatgtgggtaaatttttgttaggggtttttagttttgaaggttgtgagttttttgattttttattttatattttatatttttgtgtgtgtgtttttgatttttttagcgttgttgggttagggtttttacgatcgagttggttttagtagtttattgtaattttaagttatttttagtaaggtttatatatttttttagaaaagtataggtttttggtttataatttttataaatgaaatcggttggagttgtagatggagttgtagattttttaaatttagataagtttaggattttttgttttttagtaattttatttatttgaggttttttagagtattagtttagttttagtttttttattgaatttaatttaattttggagttaatttattaaagaattgtttaaataaagttagagagttgaaaatgtaaatgtatagtgtttaagtttgagtaggaatttatttataattattagttgaaagtagtgaaagagtaatgggtataatgagttttataggtatttttatttggttattaagagtttttgggagttattataggttttttttggattttgtttgtaatattaaatattgttaaaagagaaattttagataaattaaatttgatagagtttattttagtaaagaatgatttatgaattaggtagtatttagatttataaaagttttagagagtatttaatagtgtgagtagtgagtttttataggttaaatataagagtatagtaattatttgattggttttagttaggagtttgttttatttgggtatggtgtaataggtatttattttgtttgggtatagtttgattagttggttgtttgtgattggttaaagtttggttatttatgatttggtggaaatttagttattaattataaaaaaaaagtttttaagttaggttttagtttgtttatgtagtatattaaattaggttgtagtttattatgtaagaatttaaagtgtagagatagttttaggataatggttttttgtttatgttatttaataaaagagaggtttttaattttattttttagatgagttatttgtattagtttttattgttttgttagaggtttattatttttattagtatttttaaaaaattaatttttgatttgatagattttttattttttagtatattaatttttatttttatattattattttttttgttttgatttttttggatttattttattattttttttttagtttttaaggtatttgtttgtttatttatttttcgttattttttatttttaatatatgtatttaaggttgtaagttttttttaagtaatagtttaggtgtatttgataagtttttatatgtaattttttttataagttattaaaaatattttttgatttttattttgattattttttgatttatgggttatttagaaatttattaatttttaaatatatgagaattttttataagtttttttgtttttttttattttaattgtattatggttagaagatatattttgtatgatttaaattttttaaaatgtattgtaatttattttatgagttagtatatggttagattttaagtatgttttgtgattttagttgttgttggaagtagtataggttttttatgtgaattatattgtgttcgtattttttttatttttattgatttttgtttggtttttttattagttattgagagatgtatgataaaattttttattatgattgtggatttttttatgaattttttatttttttagtttagttaatttggttttattttttttttattttttagttttttaatgttgttataagtatttataaatttaaaatttttatttttttttagtgaaatttttaatttagtgaaacgtttatttatagttatgattttttttttaattttattttgtttaatagtaatattgttataatagtttttttttgataaatggttgtatttgtttattttatattttttagtatttataaatgtgttttttgtaaatagtatatgattgttgggttgttttgaagtttagtttgataatattagtttgattattataaaatttagtttattttatttagttattgatgtattaaattgtatttaatataattattgatattttgggttttaaagtaattgaattattgttatggtttgaatgtgtgttttaaagtttatgtattggaaattttatttttaatgtaatagtgttgagaggtggaatttttgtttgtttgtttgttttgagatagagtttcgttttgttatttaggttggagtgtagtggtatgatttcggtttattgcgagttgagaggtggaattttttaagaggtgattaggttatgaaggttgtatttttataaatggattaatgttattattaagggagtagtttattgtgagaatgagtttgttataaaagtaagttttgtttttttttgtttttttttattatgtgatgttttttattatgttataatgtagttagatgatttttattagatgtagttttttaattttggattttttagattttagaattatgaatggataaatttttgttttttgtaaattatttagttttaggtattttgttatagtagtatttaagggattgtgataattatgtattttatttttgttttatttgttttatgttttattgtttttttttttttgtttttttttaaatttgggggtattttattagattttttttattttgttagtttattaataaaattgtattttaaaaaattaattgatagtttagaaatttttaaaatatgttgttaatttttggtagtttttgtaaatgtaaaatgggtatattataaagaatttaaagatgttttttgtttagaataggaagaatttttaaaatattggtgaataaattattttttaatagtttttgtttttgtttttgttgtttgtttgttttgttttgtgttttgttgtttgtttggtttgtttttttaagttaggttattatagttatagttgttttttggtaaaaattttaataatagagttaaaagattaaagttattttagtaaattttgagttgtttatatttagattatttttttttttttttttcgtttttatttattatttttaattattttttttttttttttttttttttttttaaataggaaaaagatttttttggtttgtatttaagttttaaatataagtttatatttatagaagttgaagaagttgtaaagggtattttaaagtatttttatttgaaggattcgattttgtttaaacgttgtaagttgttttttaattagagatttaatttatatattttaagaatgaaggaacgtagaggtggggcgaagtttgttagggagtagaggttagatttgggttagggagttagggttttggatagatttagagtacggaattttttttatttttgagttacggtgattaaaatttaagtttcgttttagtagtaattagtgagcgaggatatattttttgttagacgttagttcgttgaaagtttttatttaatttttgttattcgagttaagaggggttaggaggcggggagagcgattttatcgggaattagggaagcgggagggttaggtcgtgagggaagcgggagggtcgggtcggggttatcgtttttttcggtttttcgagggaggtggcggttagaggttcggagttttagcggaagtttttcgcggtaattttttcggggtttgtaaggttggaagggcgtttagtttagtcgtagtttattggtattgtacgcgcggggtttcgatttcgggttttgtaggattttcgggtttttttttcgtgtagtttttgtttttttcgagggtcgatttgagtcggtttcgttggtgtttatattttcgcgttgggtcgtgtaaagaagtatcggcgtttcgggggtttggtgcgtttttcgttattttcgttcggataggagttaggggtttaggtgtagtcgaacgggagttcgggttttttagagttcgtgatcgggttgcggttttttttcgtttttgttcgattcgattttaggaaggggtgtagagagattatacgagtggggagcgtacgacgtatttgggagaatttcgagtagttatttgagagaacgtcgagtagtcgtttggttgcgttttttcgttgttttcgagtcggtttgttcgggattaggaagtaagtaaaagggaaagttcgcgcggtcgggcgttttttttttttggggtgcgggaatcgttttttttacggggtacgtgcgtcgttgcgtagtcggagggaattttggatttcgcgttgagttttaggtaggtggtttcgagcgagttttcgcggtcgtgttttttagtaggttttcgtttttgatcgtgagttaggttgcgataggttagaggcgggttttgtttcgatagttgtttcgtgtaaggttgggtcgaagaagagagttgggggtttggcggaggttttaggttagagaaaagcgaatcgagacgttagaggcggtttgcgtgggattggtaattatagggaaagttaagtgtttaattagtatttttttgaagtttcgggtatttaggattttatattatttgaaatatatcgtttttaaattttatttttgatgtttttttatttatggaagttcgaatttaggtttatgaatcgtgttttttttttttttatttttttatattttatttatttgttagtatatttttagggttcgtttttatttaaaagtttatgtttttttgtattaaaataggtttattttttagattaatatagaacgattttgtttaagggagtagataaggatagtttcggatttttttttttaatttagtgatagtttttattggtgtattatttttagtatttatattttattttattttttattatgtaaagatttgggttttttatttttgtttatagtttgaagttaagttttttttttgtttttattttatttttattttttaaagtaatattaaaaatagttattgattaattttttttattgttatagaatttagttgtttttacggttaggaatatgtataagggaagaaaataagtttttaaaatttaattgttttaatgttaataatttattttttatgtttataattatatttgatttttataaagtgagatatgaagtagagtaagtatttttgttttttttttatataagaaaatgttatgtgaattgtataatatatgatagaattgagatttgaaattagaattttattttaaatttagggttgttttttttattttgttttatatttttaattttttttgatggttggaatattagggaaatttaattaatagatttaaatatgaaattgagaggtttttgtatataggttattattttattatttttttttattttgattattaggttgtttagttggttgaaaatgtttttttattaattttaaatttttagttttttattttgtgatttttgataaaagaaaattttttttaa

SEQ ID NO: 1797 - DNA, 8771 bp, Artificial Sequence
  chemically treated genomic DNA (Homo sapiens)
aaggataaaagagggttgaatgggttaaaaagttgggaaatattgagtattttatttttttttatagatgtaaaataaatattagtttaatatatgttttaaggagtttttagaaaataaatttgtttttttttgtttaattatttgttttttttatttatttgaatagagtttttttttttttttagtaataaattgttgttgtatataaggtattattgattataaggtgtattattattttatttgttattaagaaagaaaaaaaattttgttaattataattgtattatattgttaattatatgagaattattttgttttgagaggtgttgatatgaaaaaaatatgaaatttaaaaatttgagatggttggatggaatgaggtttggtttttagatatgttaggttaatgggattttttttaaaattattatgtaatggaaattataggattttaaggttgtggtataaatataatttgttgattaatagaattttgtgttttttttttatagtatagtattggtgttgtgaagtggtgtttattattaagtgtgtgtgtgtgtttaagttttgggtagggggaagagttttgaagtttagaagatagagattttttgtaatttggtattgtgttgggtttagttttggttaaatgtaatgagagtagagataatgtatgttatttttgagtagaggtagttaaatatatgatattattttttattttttttatattttgtagtaaatttggaggttgtatgttgaatatgaaagtataatgaaataaaagaagtttagaattaggaattatatttggggtaatttaattagaaatatttttattgagtgttttatgagttaggaaaatttttattaagttataataaaatttggaagtttatatagtaattagtttagtttaatatttgttagttttgtgtatattttttatagtatatgtattatttgttaaataaaagtaaatatttttaggtttttggtaaatatgggatttttttattgattgattgattatgggttttgagttgaatttgttttgtatgaaggatgtaggcgattaagtggtttgttttgtttttggttaaatttttattattatgtttaagatgcgattaattatgtataataaatttttatgatatacgtttatttatgtaataaatttgtttattttgtatatgtatttttgaatgtaaaaataaaagtaaaaaaaaagaaaataagaggtggttattattttattgtgggagaaattataggtttaatggtaattaattattacggttttattttattataatattgtatcggtaagtttattaatataagtaagttagatttgataattaaggggtttatagtttttaatttgtatttgatatatggtttgttttttggaagagtaatatagaatttagatgtttttgattaaggttagtaaatgattgagtgttaattttatttattttttaggaaaaggaaatttttttataagttattattagggattttttaattatatataggaaaaatttttaggaagatttttataaaatatatgtattaatattttcgaaaatatagttgaaaggatttttttgggtttttttttttagttttttatttagattattaagcggttttttttttaaatgatgggaagaaagtgtatttgtttattatatatttgtattattttatttatttaagtattgtgttttagtaatggggtttagttatgtttggtttgaaatgatttatatatttgttttttatttttaggaagtggagtgtttttgtatgtgtatatgtgatgggggtaggttaggagattttttatttaggtaatatttagtttgaaattattattagtatgatatgagttaaacgtatttttattttagaaagatgtttttaatagtaggatgaagaattaattggaagagttggtatattgaaagaggtgaatttagattttgggaggttttttaaagtatattgaattagtttaggtcgtgggatatgtttaatagtaatggtagtagaaatggcgattgatattttggaattattttatagatataatttttataatttggtggaatattttttaaaatgtaggttttattattcggttatggtgaaaataatagattagaagatgatgttattggaaatatagtttgttgtttatagtttttaagaagcgggggtatgttatattatgtagggttatattggtagtattagagttcgttaggaggtagagggagtaagaggaaattataggtataagtttttattgttgttattgtagaaaaggtaaggtaaggtagggtaagtagggataggattggttagtttgaataattttagtgggttttggggtagagggtttgtttttagttgtttggtatttggatttgtgatgattagggttgaataacggtgtttatttgggtgtaaaagttaggtagaggaggtggtttagaggaagggttttggattgtttagtgtgtataaggtatgttttagagtaaattttttgttattttttagaattaattagttttggtaagtgtagtttttttttagatgttagaatattaagaatatagaaaagaagataattgggttaatatatgtttagtatgagaaatgaggaagtaagggaaataaagttaaagagatttttattttggatgattatgttaaagtgaaatattattaattttttagggaattaaattttattgagtatttattttgtgttaggtattgttttaaaatttttatatgaataattttaatatttagagtaaagttttgatatggaggttgtttttattttaattttattggtgtgttgatggagtttataagagtttgtgtttagtttattataaaatggttttttatagtttggtttttgatacgttggattggaagtgtttggaggatattatagtagaattatttaggatttagtatgtataatatttttgttttaaattaggtttttatttaatagaaatttatattgtatttgttattttttagatattgttttaaaagttttataaatgttagtttatttaattttaatataatattttgagatatatattattatttttattttatttatatttttaatttttattatagtttttatttatggaatgtaatgatgatgttttagattagacgttttacgtaagttagtttaatttagtaatttaaaatatatgcgattattttcgttttaaagattagaaaattaaaggttggtaggtttgtataatttgattattattgcgtatttttattttaatatattttataaatgtaagtttttgttatgattaaaagtgattattatattttatagattagaaagtaataataagtgttggtgaagatgtgaaaaaatgagaatttttgtatattatttgtgggaatgtaaaatggtatagatgttgtggagaattatatggtgggtgtttaaaaaattaaaaatagatttattatatgatttagtaattttatttttgagtacgtatttaaaagaattgaaaatagagattttaagagatatttgtataattatgtttatggtagtattatttataatagttaacgtgtggtaataatgtaagtgtttatgaatagataaatggataagtaaaatgtggtttatatatataatggaatattgtttagttttaaaaaggaaggaggttttgatttatattatatagaaaagaattttgaggatattatgtaaagtgaaataagttagtgataaaaagatatatattgtatgattttatttttaagagttgtttagagtagttaagattatagagataaaagtagtgtatagatttaagggtttagggaaaggggaaatggggagttatttattaatgaatagtggtgatgattgtataaaaatatgaatataattaatgttattaaattgtatatatataaatggttaagataataaattttatgttatgttatgttatgttatgtgattttattataatatagaaaatgaaaaaagaaaagaaagaaagtaaagtttagcggtttatatgatttgattaatgttttaaagttatgagttatttagttgagatttgaattttagtatattttattttgaaattttagattttttttaatttttttgtattttttaaattgtgttttagttgaggtttatttttagttttgtatgtgagtttttttataagaaggggcgggttaaattgtgttttgtaaaaatttatatatcgaagttttaatttttttattttagattatgattgtatatggagagagagttttgaaagaggtatgtaaggtagaatgaggttattatggtgggttttaatttaatataattggtgtttttataagaaggggagattagaatttagatatatttgttgatattttgagtttagattggaagtttttagaattgtgagaaaatgaatgtttgttgtttaagttatttagtttgtggtatttttttatggtagttttagtaaattaatataaatagtgtttttatagttgaaataaaattggaaaattatcgttattttagagagttataagggttattttaatagaatttgattgtttttttaaatttattaagtttaggtagaggttagatgattaattgggataaaagttaattagtttttttttgttgtttttttagttattggtttgtaggcgttttttttttttaatttttttttttgtgataaaagagataattattagagaaataaaagtttagaatgttaaggttgtcgtttttatttttttttattttttagtttagaattgttttgaatatattaattgttgtggggcggttcgaggaagagaagatattagtgttttagaaattgttcggttagacggtgatagcgagttacgtatttatagggttattgttgtttatagaagtagtgaggatgatgttaggatgatgtttgtttcgcgtttggttgggattttgattttagttatggttttttttttttgcgtgagattagaaagttgggagttttgcgtggaggtatgtggttggagttagtttttttgaatttttttttatttttgtttagaattttttattgtgtgttttggtttgtttatttttgtaaaaaaaaaaaagagttaaattattttaaagatttaagaagttatagagattaaataatttattgttatagggtattagaggtagttattgggggtttgttttatttggaaattttgagtgttaataggggtatgagataatatagatttgtttaaggtttttgttttgttattttgtggttttgtgaagaaattattaaatttgtttgagattagttttcgtatttgtaagagaattataatattttttttattagagagtaagtagattgttttagtgttatttttttttattggtggtttttatatttagttttaagtagttattttgttttttttaattttaggaaaaagatggtttttgtgtgtgtgtttttagagaaagaattttttaagtgggtgttagatttttgtatgtagtaatatagtttagtttagaggatgaaaaaaataagagaatgaaaaaggaaaagagagagagagagaagaaaaaagtaagagggaaatatgtataatgttagttaatgtaatagttttttttttagtgaaatattaattagttggttggtaattttatttatgatggattttttttgttttttttttgcgtagattttatagttgttttagaaatttatagtagagtcgaatagttaagaaaatgatttatagtgaggtagggttagaaatttaagagagaaaaagttagttgtagttttgaagttgaggatataggagaaaattaagtaatatttagtaaagattaatttattattttgaagttatttttttttttaattttttgtttatagtttttttttttgtttttttttttgtatttttttgttgttaggttaatggagatagattttttaattaggtttattgcgagataaaattatagttaaatttgattttttttttttatgtatttttttttgttagtttttgaagtttgtttatttttgtttatttttttagttttattgtaaggtaggtttttattttttttggtattgatttttatatattaattgtttttttgattttagttttttttttttaatttattttgtacgtttttgtttgttatgtatttgtatttgttgttattatttttttttaggttttaatttaataaattattttttttaaaaatttttaataattttttattgttattagaatagttttttattatagggtttttgtattggttattttttttatttagaatgttagattagtgttatttattggtaatattatgtgagttatatatgtatttttaaagtttttagtagttttattaaaaaaagaaataagtgaatttaatttcgataatagttttatttaatttagcgtatttaaaataatgtttaaaattttaatatatatttatttattattgatatttttatattttttgtttggtattaagtttggaatttagtatatgttttatatttattatattttttaatttatattatttatattttttgtgtttgataattgtgtatggttagtgattatcgtattggttagtgtagtttaagttttttttatgttttaattattttatttagatttttgattaaatgttttttttttagggtagttttttttgattgttttatgtagagttttttagttttatttatttgttttaaatttttttatattgtttaatatttttttttttagagtataatattttatatttttgtttgtttattttttttttttttttttgtaatggaatcggtaaggaggtaggattattgttggttttatttattattatatttttagtggttagtatatagtagtcgttagatgtgtaagtgataaatgattgaaataattgttgtaggataaagtttgaggtttttttgatttggtttgtttttttatttagattttattatttttattatttattagttaatttgagtttgttttttattttttacgtgtttacgttgttttttttttaggatatgtttttttttttttttttatatatttaaattttatttattttttaagatttattttaaaattttttttttttgggaagttttttttgaatttagatttgatttttgttttttttgaattatagggtatattttttaagtttattttatggttttttgagatagtgttagttttgtttttatttaaatttttattttagattgtgagtttattgaagtttggagttgtattatatttttttttgtaatgtttatagtatttggtaggaaatgtttataatttggatttaagtaaatttttatttaattagttatttaattagttagtgatttagtaaatatttattgagtattaattatttgttagatattattttgagtgttggagataaagtagtgggtaaatttattaaatttgtaatggaatataggagatgaataatacgatgagaataattagatagataatataatgttagatggttgtgtttttcgtgaaagggaataaaagagggtaaagaaagagtgtttggtattgtttttattagataatattgtttttgaggttttatggtttgtaatatttaagtagatatacgaatgaagatttgtatgtttgaattttgattttgcgtatattattttatttttttgaatttttattttttttatttttaaatgtttatttgaagattaagtgaaagtatataataaataagaattatgtaggtatatggtaagggattaatgatagatgataataattaatgttgatatttattgattatttatattgtagcgggtttttaaataaattttttaaatattttattttatttaattttttaaatattttattggttttaaataatagaaaattataattagttggtttttgtaaggaattttgttggaggaaatgagagtatttagaaattagatgggagcgttagagaattaggtttataaagaatgtgggaaagtaggttagaaagtagtgtaaaaataaagatagtataaagtatttgattttatttattaggttttattatgggaatttatgtattttaaagatttttttttatttttatattattttgtttaagggttaatgagttaagaaaaagaatgtagttgttaaaatttgggttatgattaaggaaggtttggatattttgattgttagatagtttttttaatgatatggagtatttaaaatgatattggatattttatttattttttgtatttttaatttttaagtttagaggtatatgtgtagagtatgtaggtttattatataagtaaatgtgtgttatggtgatttgttgtatagattatgaaaatatggaacgtattatggatttgtgtgttatttttgtgtaggggttatgtttattttttttgtatttttttaattttagtgtatgtgttattgtagtaagtacgatattggatattttattatttatattttatatatgataaaatgaggtttattgaggttttttttttgttcgttttattttgttttgtttttaaaga

SEQ ID NO: 1798 - DNA, 8771 bp, Artificial Sequence
  chemically treated genomic DNA (Homo sapiens)
tttttaaaaataaaataaaataaaacgaataaaagaaaaattttagtgagttttattttattatatgtaaaatgtaggtaataaaatatttaatatcgtgtttgttgtagtagtatatatattaaaattggaaggatatagagaagatgagtatggtttttgtataaggatgatatataaatttatgatgcgttttatatttttatgatttatgtagtaaattattatggtatatatttatttatgtaataaatttgtatgttttgtatatgtgtttttgaatttaaaagttgaaaatataaaaaataaataaaatatttagtattattttaaatattttatattattggggagattgtttggtagttaagatgtttagattttttttagttatggtttagattttgataattgtatttttttttttggtttattgatttttgagtaaagtgatgtagaaatagggggaaatttttagagtgtatggatttttatggtggaatttagtaaataaggttaagtgttttatgttgtttttgtttttatattgttttttagtttatttttttatattttttgtaagtttaattttttaacgtttttatttaatttttgaatgtttttattttttttaataaaattttttgtagaagttagttaattgtagttttttgttgtttgaaattaatagaatgtttgaaggattaaatgagataaggtgtttaaagagtttatttaaaagttcgttatagtataagtgattaatagatgttaatattaattattattatttattattaattttttattatatgtttgtatagtttttgtttgttatatatttttatttaatttttaaataagtatttaaagatgaggaaaatggaaatttaaagaaatgaagtaatatgcgtaaagttagagtttaaatatgtagatttttattcgtatgtttgtttaaatgttgtaagttatggagttttaaagataatattgtttaatagaaatagtgttaggtattttttttttgtttttttttatttttttttacgggaagtataattatttaatattatgttgtttatttgattgtttttatcgtattgtttattttttgtattttattgtaagtttgatgggtttgtttattgttttgtttttagtatttagaatggtgtttggtaaatggttggtgtttaataaatatttgttgaattattaattgattgaataattgattaaatgaaggtttatttaagtttaaattgtaggtattttttgttaagtgttgtgggtattataaagaaaaatatgatgtagttttagattttaatggatttatagtttagagtaagagtttagataggagtaaagttaatattattttaaggggttataaaataggtttagaaaatatgttttgtggtttagagaaagtagagattaagtttggatttaggaaaggttttttagaaaaggaagattttaaagtgggttttggaagatgagtaaggtttagatatgtggaaaggggaagaaaaatatgttttaaggagaggataacgtgagtacgtaaagagtggaaaataaatttagattagttggtgagtggtgggagtggtgaaatttaagtaagagggtaagttagattaggagggttttagattttgttttgtagtaattattttaattatttattatttatatatttagcggttattgtgtgttggttattggaaatatagtggtaaataaaattagtaatgattttgtttttttatcgattttattataaagggagagagagaaaataaataaataaaaatataaaatgttgtgttttagaaaaaaaaatattaagtagtataaggggatttgaggtaaataagtgaggttggagagttttatatggggtaattaaggaagattgttttgaggaggggatatttaattagagatttgaatggagtgattaaagtatgaaaaggatttgggttgtattgattaatacggtagttattagttatatatagttattaaatataagaaatgtgaatagtgtaaattgagaagtgtggtaaatgtaaaatatatattaaattttagatttagtattaaataaggaatgtaaaaatattaataataggtaaatatatattaaaattttaaatattattttaaatacgttaagttaaataaaattattatcgaaattaaatttatttgtttttttttttaatgaggttattaaaaattttaaaagtatatatgtggtttatataatattgttaatggatagtattgatttagtattttaggtagaagaaatagttagtgtaaaggttttgtggtagaaagttgttttaatggtaatggagagttattaaaagtttttaaggagagtaatttgttagattgaagtttaaggaaaaataataataataaatgtaagtatataataaataagaacgtgtagaatgaattaaaggaagaagattggaattaggaaagtagttagtgtgtaagagttaatgttaggggaaatgagggtttgttttatagtggaattaaggggatgggtagggatggataggttttagggattgataggaaaaggtatatggggaaaagaagttaagtttggttgtggttttatttcgtagtgagtttaattagaaaatttatttttattaatttaatagtagagggatatagagaagaggataaggaggaggattatgggtagggaattgagggaagggatggttttaagataatgaattagtttttgttaaatattatttgatttttttttatatttttaattttaggattgtagttggtttttttttttttgagtttttgattttgttttattgtaaattatttttttagttgttcggttttattatgggtttttaaagtaattgtgaagtttgcgtaggggaaaaataaaagagatttattatgaataagattattaattagttgattggtattttattaagaaagaaattgttgtattagttgatattatatatattttttttttgtttttttttttttttttttttttttttttttttttatttttttattttttttattttttggattaaattatattattgtatatagaagtttgatatttatttagaaagttttttttttagagatatatatataaaagttattttttttttgagattgaaaggagtagggtgattgtttgaagttgagtgtaaagattattagtgggaagaaatgatattgaagtagtttgtttattttttagtgaagaaggtattataatttttttatagatgcgaaaattagttttagataggtttgataatttttttatagagttataaggtagtagagtagggattttaagtagatttatgttattttatgtttttgttagtatttaaaatttttaaatggaataaatttttaatggttgtttttagtgttttgtaataatgaattatttgatttttgtggttttttgagtttttaaggtaatttaatttttttttttttttgtaaaaataaataaattagggtatatagtgagaagttttgggtagaagtgagggaaagtttagaggagttgattttagttatatatttttacgtagggtttttagttttttggttttacgtaggagaggaaggttatggttgggattagagttttagttaggcgcgaggtagatattattttggtattatttttattgtttttgtgagtagtagtggttttgtgaatgcgtggttcgttattatcgtttgatcgagtagtttttgaggtattggtgttttttttttttcgagtcgttttatagtaattggtgtatttaaagtagttttgggttaaagggtgagaggaagtgaaagcggtaattttagtattttggatttttgtttttttaatagttattttttttgttataggagaggaagttagaagaagaaaacgtttgtagattagtggttaaagaaatagtaagaggaagttagttggtttttattttaattagttatttgatttttgtttgggtttggtgaatttaggaaaataattaggttttattaaaatagtttttgtaattttttaggatgacggtgattttttaattttgttttagttgtggaaatattatttgtattagtttgttggggttgttataaggaaatattatagattgggtggtttaaataatagatatttatttttttataattttagaggtttttagtttgaatttaaggtgttagtaagtgtgtttgaattttaattttttttttttataaggatattagttatgttggattagggtttattataatgattttattttattttatatattttttttaaggttttttttttatatatagttatagtttgaggtagaggggttaggatttcgatatgtaggtttttgtaggatataatttggttcgtttttttttgtgaagaaatttatatataaaattgaaaataaattttaattgaaatatagtttgaaaagtataagaagattgggaaaagtttgggattttagaatggaatatattgaagtttagattttagttgggtgatttatggttttgaggtattggttaagttatgtaaatcgttaagttttatttttttttttttttttttttattttttgtattatggtaaaattatataatataatatgatataatataaaatttattattttgattatttgtatgtgtataatttagtggtattaattatgtttatatttttgtataattattattattatttattaataaataattttttattttttttttttttaggtttttgaatttatgtattatttttgtttttataattttgattattttaggtagtttttagaagtggaattatatagtatgtatttttttgttattggtttattttattttgtataatgtttttaaggtttttttttgtgtagtatagattaaagttttttttttttttaaagttgaataatattttattgtatgtatagattatattttgtttatttatttgtttgtttatggatatttgtattgttgttatacgttagttattgtgaataatgttgttataaatatggttgtataaatattttttaaagtttttgtttttaatttttttggatacgtatttagaagtgagattgttggattatgtggtaaatttatttttaattttttgagtatttattatatgattttttatagtatttgtattattttatatttttataaatggtgtataggagtttttatttttttatatttttattaatatttattattattttttggtttgtaaaatgtggtaattatttttaattatagtagaagtttgtatttataaaatgtattaaaataaagatacgtaatggtagttaaattatataaatttattaatttttagttttttggtttttaaaacgaagataatcgtatgtgttttgaattattgaattaagttaatttacgtaaaacgtttagtttagagtattattattatattttataaatgagagttatgatgaggattgaaaatgtggatagaatgaagatgataatatgtattttaaagtattgtattgggattaaatgaattggtatttgtaaagtttttaggatagtgtttggaaagtagtaagtgtaatgtaagtttttgttaaataagaatttgatttaaaataggaatattatgtatgttaagttttagatagttttattgtaatattttttaagtatttttaatttaacgtgttaaaaattaagttgtgagggattattttgtggtggattgggtataaatttttgtagattttattaatatattagtagagttaagataaaaataatttttatgttaaagttttgttttgagtattgagattatttatgtaaagattttagagtagtgtttgatatagagtaggtgtttaataaagtttagttttttggaaagttaatggtgttttattttgatatagttatttaaggtggaaatttttttgattttattttttttatttttttattttttatgttaaatatgtattaatttaattgtttttttttttgtgtttttgatgttttggtatttgggaagagattgtatttattagggttagttagttttaaaaaatagtaaaagatttgttttggagtatgttttatgtatattaagtaatttagagttttttttttgaattattttttttatttggtttttatatttaagtagatatcgttatttagttttaattattataggtttaggtattagataattagagatagattttttattttagagtttattgaggttatttaaattagttagttttatttttgtttattttgttttgttttgttttttttgtagtaataataataaaagtttgtgtttataatttttttttgttttttttgttttttgacggattttggtgttattaatgtggttttgtatggtgtggtatgttttcgttttttaggaattgtaaataataaattatatttttagtggtattattttttgatttgttgtttttattatagtcgaataataaaatttatattttaaaaaatgttttattaagttgtagaaattgtatttgtaaaataattttaaaatgttagtcgttatttttattattattattattgaatatattttacggtttagattagtttaatatattttaagaagttttttaaagtttagatttattttttttaatgtattagtttttttaattgattttttattttgttgttgaaaatatttttttaaaatagaaatacgtttaatttatgttatgttaataatgattttaggttgggtattgtttagataaaaaattttttggtttatttttattatatatatatatatagaaatattttattttttaagaatgagaaataaatatgtgggttattttaagttagatataattagattttattattgggatatagtgtttaagtgaatagagtaatataagtgtgtaatagataaatgtattttttttttattatttggagaggaaatcgtttgatagtttagatgaggaattaaggaaaagggtttagggaagtttttttaattatgttttcggagatgttaatatatgtgttttatagaagtttttttggaaattttttttatgtgtgattggagaatttttggtggtgatttgtaaagaggttttttttttttgggaaatgaatgggattaatatttaattatttattgattttaattaaagatatttaggttttatgttgtttttttagaaggtagattatgtgttaaatataaattagaaattgtaagttttttggttattagatttaatttgtttatgttgatgaatttatcgatgtagtattataatgaggtaagatcgtggtgattagttattattaggtttataattttttttatagtagaataataattattttttgttttttttttttttatttttatttttatatttagaagtatatgtgtaggatgagtaggtttgttatataggtaaacgtgtgttatgggggtttgttgtatataattaatcgtattttaagtatagtggtagagatttggttagaggtaaaataagttatttgatcgtttatattttttatgtagagtaagtttaatttaggatttataattagttagttaatggaggaattttatatttgttagggatttagaagtgtttgtttttatttggtaggtaatgtatatgttgtaagaaatatgtataaaattgataagtgttagattaagttaattgttgtataaatttttagattttattgtgatttaataaaagtttttttggtttatgaaatatttaatgaggatatttttgattggattattttaggtatgatttttggttttaggttttttttattttattatatttttatatttaatatgtagtttttaagtttattgtagaatgtgaagaaagtaggggatgatattatgtatttaattatttttgtttagaagtgatatgtattatttttgtttttattgtatttgattaaaattagatttaatataatattaagttgtaagggatttttattttttaagttttaaggtttttttttttatttaaaatttaaatatatatatatatttaatggtgagtattattttatagtattaatattatattgtggaagaggaatataaaattttgttgattagtaggttgtatttatgttataattttagaattttataatttttattgtatagtgattttaaaaaaggttttattaatttgatatatttaaaaattaaattttattttatttaattattttaagtttttaagttttatgttttttttatgttaatattttttaaagtagaatggtttttatataattgataatatagtataattataattggtagagtttttttttttttttagtggtaaataaagtaatggtatattttataattagtggtattttatatataataatagtttgttattaggaagaaaaaaaagttttgtttaggtaagtaaaagaaataaatagttaaatagagaaaaatagatttattttttaaggattttttagaatatgtattagattaatgtttattttgtatttatgaaaggagatagagtatttaatgttttttaattttttgatttatttaatttttttttattttt

SEQ ID NO: 1799 - DNA, 6204 bp, Artificial Sequence
  chemically treated genomic DNA (Homo sapiens)
gatttttgaggtttattttagttttttaaagtattgggattataggtatgagttatcgtgtttggtttcgttagggtttttaattataaatttaaattttatcgatttgagtatatgtgaagtggtattttatttttattttaatttgtatttttttgatgtttaatgagcgttgagtgtttttttttgatataattggttttttttgttttttttttgttgttttttttttgattttttttggattagttagatattttttattattttttttttttttattggttttttagttaaattttttttgtttattttttttttagtgtttttttttttgggtatagattacgtatgttttatatattaaatttaatgtagggttaatattgtattattttagttttttttttttatatataattttttgtattttgtattttatatttggagttttatattttatagtgtgaggagtttattagtgggttattttttattatttattttttatattgtttttattttttatttttatatatattgtagaagtattataagttattgtttgttttaaatagttagtggttttttaaagaaattatgagaagggtcgggtgtagtggtttatgtttgtaatttagtattttgggaggttaaggtgggtagattatttaaggttaggagtttaaggttagtttggggaagattttttgtcgtttttataaaaaattaaaaaattagttggtatggtggtacgtgtttgtggttttagttatttgggaggttgtagtgggaggatggtttgaagttagaagattgaggttatagtgagtcgtgattgtgtttttgtacgttagtttgggcgatagagtaagattttgtttttttattaaaatatttttttttttttgatttattttattagtttgagtatgatatgtttgtatgtaattttttttgtatgtgttttttttaggttttgttgaattttttgatttgtaaattagtattttttattacgtgtttggatttggagttattattttgtaaaaatgttttttttttagatttatattttttttttggagtttcgattatatatgtttttggttattttatattgttttataggtttttgaggttttttttatttttttttaattttttttttttttttagattaaataatttttatttatttgtttttaagattttaaatttttgttttttttaatttgttaatttaatttagtgaaatttttatttttgttattgtattttttagttttagattttttttttgatttttttagatattttgttattttgttgtgaatttttgattttttatttattaagataatatttttatttaattttttggatatattatttttatttattttgagatggagttttgttttgttatttaggttggagtgtagtggtattattttggtttattgtaatttttatttttcggatttaagcgatttttttgttttagtttttcgagtagttggggttataggcgtgcgttattatatttagttaatttttgtgtttttagtagagatggggttttattatgttggttaggttgattttaaatttttgggtttaagtgatttgtttatttcggttttttaaatttttgggattataggtgtgagttatcgtgtttagttttttttggatatatgtagagttgttttagaatttttgtaaatatagaatttggtttattgtagggggattggtttttgttaattgtttttttttttttttaattatggtttacgtttttttttttttttgtatgtttagtgatttttgtttttttagtgtatatttaatattgataaataataaatgagggagatttagggtgtttttttattgaaaaattttgattttcgttttagtttgtagttttattattggacgtattatgttgggttgtgtaggtttagttttaggttttgtttattgagtaatgttttaggtgttttttaggttttttttatttggtaggatttaatttttaaattttgatcgttttgtggatcgggttagggttttgttttagacgttgttaaggcgggtttggagtagtttttattttaggggagggattggtaatttttggtttataagttatatgtgttgatggtttgtttttgtatagtatttaaagttaggaatggtttttatatttttaaagagttgtttaaaaaaaaaaaaaaaataagtaaaaatatgaaataaaaattgtatgtggtttatataatttaaaatatttatttgggttttttataggtcgtttgttgatttttgggaatgtgatttttaatttagtgttttagtttaatgtttttagtgttaatggtattaaaaaggttttgattgggtacggtggttcgtattcgttattttagtattttgggaggattaggtaggaggattgtttgaggttaggagtttaagattagtttgggtaatagagtgggattttttttttataaaaaaagaaaaaattagtcgggcgtggtggtatttatttgtggttttaattatttgggaggttgaggtgggaggattatttgagtttagaagttttaggttgtattgagataacgattaaattattgtattttagtttaggtgatagaataagattgtttgaaaagaaaataaaacggaaagtttttttttgtagtattattggatttttagtttttgtgttatttttaattttgtaatagtcgttttttggtaaatttatagagtcgttttatacgtgtagtttagtttaggttaaggatttttagggaattttatatcgatttcggttttttatttttgttaagtttttttttttttagtgttttgttttgtcggtttgttgttttagttgtttagaagtttggttttttgttttttatattattatagtgtattatattatattatgtttatatatttagtagttgtgtttatatttaaattattttatatatatattttgttaaaaaaaattttaggattttttaaatttatgatgttaagggtgaagttaagttttggagattgagttagtagtaagtttgtaattttgttttttcgattatagtttaatgttttttttttttgtttttgagtataagtgttttttttattgtggttgttttgtaaattagggtttttcgatcgttagggttatagatatatatcggttaggttatatagtaggaggtgagttttaggttagggagtaaagttttatttgtatttatagttgttttttatcgttggtattatcgtttgagtttcgttttttgttaggttagtagtagcgttggatttttttaggagggtgaattttgttgtgaattgtatattggaggggtttaggttgcgtgttttttatgagaattttatttttaatgatgtgtttttggtttttattatttttagatgtgatcgtttagttgtaggaaaataagtttagggtttttattgattttatattatgggaagttgtattttattatatattataatataaaaataataaagtgtataataaatgaaatgtgtttgaatcgttttgaaattattttaattttgtttgtggaaaaattgtattttatgaaattggtttttggtgttaaaaaggttggggattgttgttgttaatgattaagaaagattaggtttttttttttttatttggtgatttttgttatagattagttgtttttattgttttgtatttgatttagattagatagtatagagattttaggattgttttatttttagtgggtttttaaagaaaaagattatttcgattaaatagattgttgtaattatgtattaggttttatatagaaaagacgttgaaattcggttaggtttttcgagacgttggttatagaaacgattttaaatttttacgtttgagaatattgatttttattttttataatgttttttgggcgttttaagtttcgtatttgattaaattttagattttgatttttttgattatttttggttgatagtttttgttattttatggttgggagtgatggtttatatttgtaattttaatattttgggaggttaaggttggaggattatttgagtttaggagtttgaaattagtttggaaaatatagtgagatttcgataaaagaaaagaaaagaaaaaaattagttgggcgtggtggttgttttcgtggttttagttattggcggagggggtggggcggggggaaataaggcgggaggatcgtttgagtttggaaggtggaggttgtagtgagtcgtgtttcgttattgtattttagtttgagttaattgaggaagattttgttttaaagaaaaaaagaaaaagaaatattcgcgtttcgtttttttcgtttacgtgtataagaagtttatatgtagttaagtgtgaggtttattttgtggtatttcgaaatgtcgagggttaggtttttataaaaatatttgcggcgtgagggaaacgggaagagtttagcggtaggcggaaggtacgcgtcggggatatttagcggcgagggtttgcgggagtttttagcgcgataaggagttcggtcggggagtagcggttcgtcgcgggacgttcgagttgcggggaacgcgagggtagcgaggtcggcgtttttggttcgggagcgtttaggttcgtttatcgcgcgcgaggttcgtttgtcgagttttggttttagtttcggcgtagggtttagcggggcgtttattgtcgagggaggaagatggacgtgtttcgggagtttcgtttcgttttttattttttatttttcggtttcgcgcggtcggttcgggcgtattttcgtcggaggcgaagcgcggcgaagattcgtttcgtgaagtttcgcgcgtttcggaaatggttatgcggcggcgtcgaggtcggaagtggttgaggtcggtagtagcgggcggtagttgcggcgtaatcggtttcggagttgtttggcgcggtcgggcgggcggcgtcgtttaggttcgggtttcggttgggttcggcgcggtttcggggttgtttatggggcgcggggggtcgggtcggtgacgtcggacgtttatggacgtttttgaggagtcgttgtcgtcggtgatttatattatggagaataagtttatcgttatttgtgagtgttcggaggcggggagggcgcggcggtcgttgggcgggttcgggttttggcgttatgtattcggcgtttttagatttttagttttcggcgcgtttcgggttgggtcgttttttggaggtgtgattagggttgcggttgaggcggggttttttgatttttcggggacgttttttgattttttcgtcgggcgatttttgatttttggggggcgttttcgggtcggttgtagttggagtcggtggaattcggcggattttgttcgggattgggcgcgcgtcggcgtcgagggcgaggagcgggggttgttatcgtttcgtttcgttttcgttgagtcgcgcgttcgggatttgggggtttcggtttttttcgtcgggcggttttgttcgcgggcgtttttttttcgattacggggaagtttttgggggttcgtagagttgtaggcgttggcgaagtaggaatagtttgttgcggggtgaagcgttaggtagagtcgtcgggattgttttcgtttttatatattttttcgtcgcgtatttaaattattttacggatgagaaagtcgaggttcgggcgtttaggcgagtttgttttttatgaatagtttttcgttcgagtttatattacggatatttggtgttttttgggtgtcgtgtttttttcgtattttttttttaatgtatatataaaggaattgtttttttgttacgggaaaaatgttttttaaattttagaagtgtgattttttagagttaaatacggttaagaatagtgagtttatgggaagtattgaaatgtttgttggttggtttttaggtgatttgtagagaggtgttttagattgttacgatttttgatttttgatagtattttgtatttttatgtatgtatgtagttagtttttttttagttgtttttcgtgtttggaaaggaagtattttttgttgtaaaatttgggtgtttaggttatagtagattgtatgtcgtgagaattttt

SEQ ID NO: 1800 - DNA, 6204 bp, Artificial Sequence
  chemically treated genomic DNA (Homo sapiens)
aggagtttttacgatatatagtttattgtggtttgggtatttagattttgtaatagagagtgttttttttttaagtacgaaagataattagaaaaaaattaattgtatatatgtatgaaaatatagaatattgttaaaggttaaaaatcgtaatagtttgaaatatttttttgtaagttatttaaaagttaattaataaatattttaatattttttataagtttattgtttttaatcgtatttaattttggagagttatatttttaaaatttagggaatatttttttcgtaatagaaaaatagtttttttgtgtatgtattaaaggaggggtgcggggaggatacgatatttaagaggtattaggtgttcgtagtgtagattcgagcgggaggttgtttatggggagtaagttcgtttaagcgttcgagtttcggtttttttattcgtaaaatggtttgagtgcgcggcggggaagtgtgtaggagcgaaagtagtttcggcggttttgtttgacgttttatttcgtaataaattgtttttatttcgttaacgtttgtaattttgcgagtttttaaggattttttcgtagtcggggaaagggcgttcgcgggtaaaatcgttcggcggaagaggtcggggtttttaggtttcgggcgcgcggtttaacgggggcgggacggggcggtggtagttttcgtttttcgttttcgacgtcggcgcgcgtttagtttcgggtagagttcgtcgggttttatcggttttaattgtagtcggttcgagggcgttttttaggggttagaggtcgttcggcgggaaggttagagggcgttttcgaaaagttagagggtttcgttttagtcgtagttttggttatatttttaggaagcggtttagttcggagcgcgtcgggggttgaaggtttgggggcgtcgggtgtataacgttagggttcgggttcgtttaacgatcgtcgcgtttttttcgttttcgggtatttataggtgacgatgggtttgttttttatggtgtagattatcggcggtagcggttttttagaggcgtttatgggcgttcggcgttatcggttcggtttttcgcgttttatgggtagtttcgaggtcgcgtcgggtttagtcggagttcgagtttgagcggcgtcgttcgttcggtcgcgttaggtagtttcggagtcggttgcgtcgtagttgtcgttcgttgttgtcggttttagttattttcggtttcggcgtcgtcgtatgattattttcggggcgcgcgaggttttacggggcgggttttcgtcgcgtttcgttttcgacggaagtgcgttcgggtcggtcgcgcgggatcgggaggtgggaagtgggaggcggagcggggttttcgggatacgtttatttttttttttcggtagtgggcgtttcgttgggttttgcgtcggagttgaggttaggattcggtaggcgggtttcgcgcgcggtgagcgagtttggacgttttcggattagagacgtcggtttcgttgttttcgcgtttttcgtagttcgggcgtttcgcggcgggtcgttgtttttcggtcgggttttttatcgcgttgggggttttcgtaggttttcgtcgttgagtgttttcggcgcgtgtttttcgtttatcgttgggtttttttcgttttttttacgtcgtaaatgtttttgtggggatttggttttcggtatttcggaatgttataaaataaattttatatttaattgtatatgggttttttgtgtacgtaaacggggggggcggggcgcgggtgtttttttttttttttttttttggagtagggttttttttagttggtttaggttggagtgtagtggcgggatacggtttattgtagtttttattttttaggtttaagcgattttttcgttttgttttttttcgttttatttttttcgttagtaattgggattacgggggtagttattacgtttagttaattttttttttttttttttttttgtcgggattttattatgttttttaggttggttttaaatttttgggtttaagtgattttttagttttggttttttaaagtgttgagattataggtgtgagttattatttttagttataaaatgataaaaattgttaattaaaaataattaaaagggttagaatttagagtttagttaaatgcgaagtttgaggcgtttaggaaatattataaagaatggaagttagtgtttttaaacgtagaaatttggggtcgtttttatagttagcgtttcgggaagtttaatcgaattttagcgttttttttgtataaggtttaatgtatagttataatagtttgtttagtcgaggtggtttttttttttggggatttattgaagatgaaatagttttggggtttttgtgttgtttggtttaagttaggtataggataatggagatagttaatttgtaataaaaattattaaatgggaagggggagatttggttttttttagttattaatagtagtagtttttaatttttttggtattagggattagttttatagaatgtagtttttttatagataaagttggggtggttttaggacgatttaaatatattttatttattgtgtattttattatttttatgttgtaatatgtaataaaatataattttttataatgtggaattagtgggagttttgagtttgtttttttgtaattggacggttatatttagggatgatggaagttagggatatattattagggatgagatttttataaggagtacgtaatttagatttttttaatgtgtagtttataatagggtttatttttttaggagaatttagcgttgttgttgatttgataggaggcggagtttaggcggtaatgttagcgatggggagtagttgtaaatatagatgaagttttgttttttggtttgaagtttattttttgttgtgtggtttgatcggtatgtgtttgtggttttggcggtcggggagttttgatttatagagtagttataatgaggaagatatttgtgtttaagaataaggaggaagagtattaaattgtaatcgaagaagtagaattgtaaatttgttattgatttagtttttagggtttaattttatttttggtattataagtttagagagttttgaagttttttttaataaaatgtatatatgagatagtttgggtgtgaatatagttgttaaatgtgtgaatatagtgtagtgtggtgtattgtaatggtgtgagaggtaagagattagatttttgggtagttaaagtagtaggtcggtaaggtagggtattggaggggaagaagtttagtaagagtggggagtcgaagtcgatgtagggttttttgaaagtttttggtttaggttggattatacgtgtgggacgattttatgggtttattaggaagcggttgttatagagttgaggatggtataaagattagaggtttagtagtgttataggaaaggatttttcgttttgttttttttttagatagttttgttttgttatttaggttggggtgtagtggtttgatcgttattttagtgtagtttagaatttttgggtttaagtgatttttttattttagttttttaagtagttgggattataggtgagtgttattacgttcggttaattttttttttttttgtagagagagggttttattttgttgtttaggttggttttgaatttttggttttaagtagtttttttgtttaatttttttaaagtgttgggatgacgagtacgagttatcgtgtttagttaagatttttttaatgttattaatattgaggatattgagttgagatattagattgagaattatatttttaggggttagtaaacgatttataaagggtttagataagtattttaggttgtgtgggttatatgtagtttttgttttatatttttgtttgttttttttttttttttaaataattttttaaaaatataaaagttatttttggttttaagtgttgtataaaaataggttattaatatatgtggtttgtgagttagaggttgttagttttttttttagaataaggattattttaggttcgttttaataacgtttaaagtaaaattttgattcgatttataagacggttagagtttggaggttaagttttgttaagtaagaggggtttgggagatatttgggatattgtttagtaaatagagtttaaagttaagtttatatagtttagtatggtacgtttagtaatggaattataaattagaacgaaagttaggattttttagtggaagagtattttgagttttttttatttgttatttattagtgttgaatatatattaaaaaaataaaaattattaaatatataaagaaagaggaaaacgtaagttatagttaagaaaaaaaaaaagtagttaatagaaattaatttttttataatgaattagattttgtatttataaagattttaaagtagttttatatatgtttaaaggaggttgggtacggtggtttatatttgtaattttagaaatttgggaggtcgaggtgggtagattatttgagtttaggagtttgagattagtttggttaatatggtgaaattttatttttattaaaaatataaaaattagttgggtgtggtggcgtacgtttgtagttttagttattcggaaagttgaagtaggagaatcgtttgaattcgggaggtggaggttatagtgagttaagatagtgttattgtattttagtttgggtgatagagtaagattttattttaaaataaataaaaataatatgtttaaaggattaaatgaaaatattgttttaatgagtaaagaattagaaatttatagtagaataataaagtatttaaaagaattaaaagaaaagtttagaattgaaaagtataataatagaaatgaaaattttattgaattggattaatagattggagaaaataggagtttgggattttgaaggtagatggatagaaattatttaatttgaagaagagaaaaaagttgaagaaaagtggagagaattttagagatttatgggatagtatgaaatggttaaaagtatgtgtgatcggagttttagaaggagagtatgagtttaggaaggaaatatttttgtaaaatgatggttttaaatttaaatacgtggtgaaaaatattgatttatagattaagaaatttagtaaaatttgaagagaatatatataaagaaaattatatgtaggtatattatatttaaattggtgaaatagattaagagaaaaaaaatgttttggtggggggatagggttttgttttgtcgtttaggttggcgtgtaggggtatagttacggtttattgtagttttagttttttggttttaagttatttttttattatagttttttaagtagttgggattataggtacgtattattatgttagttaattttttaattttttgtagagacggtagggggttttttttaggttggttttgaatttttgattttaggtgatttgtttattttggttttttaaagtgttgggttataggtataagttattgtattcggttttttttataatttttttaagagattattgattgtttaaaataaataatagtttgtgatatttttatagtgtgtgtagaagtaaaaggtaaggatagtgtgaaggatggatggtgagaggtaatttattgataagttttttatattgtgaagtgtggaattttaggtgtgaggtgtaagatgtaaagggttatgtatgaagagggaagattgaagtgatataatattgattttatattaaatttgatatgtgaggtatacgtagtttgtgtttaggagaaaaagtattagggaaaaaatgaataaaaggggtttggttaagaagttaataaagaaaagagaaataatagaaaatatttgattaatttaaaagaagttagggaaagaataataggagaaagatagaaaggattagttatgttaggaaaagatatttagcgtttattagatattagggaaatgtaagttaaaatgaaaatgagatgttattttatatgtatttaaatcgataaaatttaaatttataattaaaaattttgacgaggttaggtacggtggtttatgtttgtaattttagtgttttgggaggttgaggtgggttttaggagtt

SEQ ID NO: 1801 - DNA, 5680 bp, Artificial Sequence
  chemically treated genomic DNA (Homo sapiens)
ggtttgtgttttggggagttggggaatgggatagtcgttggttattggttataaatatcgttatttagtatgtgatgttggttttttgttggggaggagtcgtaggttggtttttggtttttttggaagtgtttggttttttgggaattgttttttgtatttgcgagaagagggtaaggattgtttttgttttatgggttttattggttgttattttttgggtttttatgttgttttatttttagaagattttttttgttttgaggattttacgtatgttattattgatttttatgtttgagtttagagaggggaagtgattggtgtagatataagtttaaggtagtagtttcgttttttaatttttagtcggtgttttgggcgggttattgtcgttagtgggggataagggtggtagtttcgttttagttttgtaaagttcgtggagattaggggttgttttcgaggggatagtggggtttaaggtttgataacgtttttttggtagatgtagatttttcgagtaatttttcgatttgtttgggaatgggagggggggtgagggggtggggtgggggaatagagtttggtaggagaggtttgtggggattgtataatgaggttatagtagttagtcgtgaaggtagttatcggttagggttttttagttcgtatttttatcgtttttgtgtggatgaattttatttgcgcggtgtcggtggaaggatttttttagtttcgggatatcgcggttttgtggatttatttgaaaaatgttatttttggagttttaggagagaaggggtggggttggtagttttaacgttttattttgtattttggcggtttttcgtattcgtttttttataggttttttagagataggatgatggatggtaattcgagtgtaaatttggcgtttggttagtattttggaagaggaagtttttagtttttagggtatttgaatttatagtcgtttttatttcgttggtttttttggttttggaagatttgttattaggttgtagaaggggtggcggagtgattagggggcggggaaagaggttaaataaaagaggggaggagtagaggttttagtgaggtaggagggaagtttttgtttagcgggaaatttttaaatgtttgggttttttttagagggtaggaatttttagtttagagtgtgaaataaggaaggaagtgaatttttagtgggttttttttatagtttttttttattttttttatatgttttatttttatattttttaaaataaattttgagagacggtgtggatggggagataggtttggaaacggaggtttgcgttgaatgggtaaagtcgggttgatgatttagacgaggttttggagtttgggttttgggtttttttttttttgtttgtttcggtagtttgtgggtttagttttagttttagagggggaaaggttttagtgggagttttataggtttggttaggaattttatttcgttatttaaagtggtgtgagtcgggttagttattttattttttcgtatttacgtattttaagtaaggtttgacgatcggaggggtttaaggttttgtgtatagtcgcgcggttagtattttggttagttttgtagtttttttttttttagggggttttttttaggaagttttcgttttttgtttttttgtggttacggtgatatcggaatattttagaggggcggttggggagttggggtgggacgggttttttcgtagttggagtcggtgtgtgacgcgggaacgcggttaagcgcgttttatttaggcggtttattaggagtcgtcgtcggataatggtttcgcgtttgataatttcgtcgttttcgtgtcgtttttcgaattttatatattatgcgacgcgcggttagtttttcgtttttgttcggttgttgggaggaagtgatagcgtttcgtatttttcgttgggtaggtcgggcgcgtttagtttttgggacgtagggatatagtcgggtcgcgttgggttttggttttcgttcgcgggtttttcgcggttgcggcggggcggggaaggaggggcgggcggggcggggttgattttgcgattattttaggttttgcggaattcgggttaggatagtggcggttaggtcgggatacggtaagtgattttcgtttttatacgtttatttttcgtcgtttcgcgcggtttttcgttcgtttttatttcgaggttaggtcggatttttcgaggaaagagtttgtcgtcgcggcggggataggagggggttggacgtttttagggaaattgaggttttggcgcgtttagcgttcgcgcgttcgggcgtagaggggttaaggttggttgagggttcgggtttgttagaggtagggagggcggggttggggtaggcgtaggggttttttttttattatagtagaaaggttttaggttcggcgtgatttttcggtcgggcgatataggtcgagttattttttcgttcgtgttcgggtgtttttatcgggggatgggtgcgttttttatattttgtttaggattgaaggagtcgggtttagcgagttttcgggaggtgtgtggatattagttttgacggggaaggcgagttaggttagtggatttgaggagaggtcgggtagtaggaggttggggggcgttgttgagttattggttgtgatttttttacgagttttttagtaggtttttttttgttttagtgggtttaattagcggtaaggtttaaaggaacgttttttttttttttttttttttttggttgtatcggttcgttgttgtttgtaggatagatttaggatataggagatttatttttattgaggtttagttaggcgtttagtatttggttgtgcggtttggttatatttttttagtagtattgtggggtgggggtttttattttttttttaaagacggggaaacggcggtttgtgaaggaaggaggtgtgtagtttatatattagtgagaagtgtgttgagtttatatcgaaagcgtttttttttttatggtattagttgtttcggagagcggagatttggggcgaggtttagggggttgtagtaggatttttaggcgttttgggtttcgtgttatagaggggagaaggcggtgatgttgtgggggttttgcgggagttgtgtttggaggtgggatagagtttagtatatgtggggtgggatagggaaggttgaggtgaggttggtagggagtattgttggtaagggttatttttttttattttaggagaatggtagaggtggggtttgggtatttagggtggggttgagtggttttgttagatagattagttttcgcgggtgttaggtatgtatttgagaggggttgggaagcgaagttggggtatcgggtggggagtagaggtgttttatggttttgtttttggggttttttggagtatgttttttttggttttggagtggaatgtttaatttaaatggtattagggaggttagtgttatttaggagtgtgggattttgtttagggtattgggtgagtatggtaggggttgggggtgggaggagtttaggttttttgttttttaggtggttttggttaagtttttttaggatggggatagggtagtggggttggtggaggtagcggggttatgggaagagtcggatgggtttagtttgagtttttatggttgttgtgtttggggtaaatattttttatttagttttagtttttttttttggatggtggattattttgtttgttttgtagggttgttttaggggttatttgaagttattatgatatatgagataaggttgtatgtatttagttttggggtggggtagataggtggtattaaggttataggttattttagtttttggggaggtttagtttttgtttgttttttttttttagattagttatgtttttttttagtggatttggttttgttttgataatggttaggtgttgggtagggattttggggaagttcgggttttgtttttttggatgtagtttgtaggatagttggggatgtggaggtaggggaaagttgggttttgggatcgggtggtttgagttttaagtttaagttattgattatagggatagtttaagtcgaaataatatttttttagatgagagaaaggaagagatgggatgggtatttaggaaggttgtagaaattggaagtttttgtgatgatgttacgattttatttgggagggggtgggagttaggaagtttgggttttggattcgagttgttgtgtgattttaggtcgttttgtgatttgttgagttttttgttttagtgatgtgtgaaaggttgtttgaggttttatttattgtggtttttgtagattttggttaggttttgttttttttatggtttagttggagtagttgtgtttttgtgattttatcgttggattagaattggataagatggtagaggggttgggtttgggtaggaggaggttgggttttagttttaggtcggttttggtgttttagatttcggtatgttttagatttttttggatttttgtttttgttttgtttaaagggatagagtttatgtttcgttttttttttagggtttcgtgggatttagggaggtgtttattgtttgttttttgtttagagggtgggttggtagggaaggatttgtttaagtaaagtgaaagtttttttttgtgtggcgggtttggcgtttttagttttttttttgtttttggggttgtgaagtattggaaggggagttgtagatggtgagatgttcgtggttagggaggaagtatagttgttggtgtttatttgggttaggagatgagtagagtttcggtggttgaatgggtgaaatagattgagtgtatttaatgtagttagtatagttgtgtgtttagtttgggagttagggtcggtttatggtgattattgatgtttttatttttatttcgtaggagtttgtaggtttgaattagggtgatgttgaagatgatgatttttttttaaggtttttagagttattagtttgtgttaggtattttcgatttgtttagaggtttttaaaagttgtagtttatattagaggtagagttagaggtttttatgtcggaggttttttttgaggatttggtgttatttttggaggttggggtagttttatatagggaggaggaagaggcggcgaagaagaagaaggagaagaagaagaagtttaaaggtttggttaatgtgttttgcgtttttattaaagggaagaagaagaagggttagtttagtttagcggagttcgaggacgtagtcgggtttaggtaggggttggatggttcgttttttataggtgttttaggattttgggttagagttagtttggggtttggacggggttggcgtttattcgcgtgagtgagttatttgtatagtgggtcggtaagtggggttggaaggcgcgtttgtttttttgtttttatttgtgtcgtaatttggggggttgggaggtttttagtttagttagggatatcgatattattttttagggtgttggtcgtcggttttgtgcgcgtttaggggaggacggttttcgtttggcgttggtcgtttcgttcggtgggcggtgggttggggtcggggttgacgcggttttttcggcgtagt

SEQ ID NO: 1802 - DNA, 5680 bp, Artificial Sequence
  chemically treated genomic DNA (Homo sapiens)
attgcgtcgggaaagtcgcgttagtttcggttttagtttatcgtttatcgggcggggcggttagcgttaagcggggatcgtttttttttagacgcgtatagggtcggcggttaatattttaaagggtgatgtcggtgtttttgattaggttgaaggttttttagttttttagattgcggtataggtgaaagtagggagatagacgcgttttttagttttatttgtcggtttattgtgtaagtggtttatttacgcggatgagcgttaatttcgtttaggttttagattagttttaatttagggttttagagtatttgtggggggcgggttatttagtttttgtttggattcggttgcgttttcgggtttcgttgagttgggttgattttttttttttttttttttggtgaagacgtagaatatattggttaggtttttggatttttttttttttttttttttttttttcgtcgttttttttttttttttatatggggttgttttagtttttaggggtggtattaggtttttagaggaggttttcgatatggaggtttttgattttgtttttgatgtggattgtaatttttgggggtttttaggtaagtcgagggtgtttggtataggttgatggttttagaggttttggaagaaggttattatttttagtattattttggtttaggtttgtaggtttttgcggggtgggggtgaaggtattagtggttattatggatcggttttggtttttaggttggatatatagttatgttggttgtattgagtatatttagtttgttttatttatttagttatcggggttttgtttattttttggtttagatgagtattaataattgtgttttttttttggttacgagtattttattatttatagttttttttttaatattttatagttttagaagtaaggaagaggttggggacgttaagttcgttatatagagggggatttttattttatttgggtaaatttttttttgttagtttattttttgggtaggaagtaggtaatggatatttttttggattttacgggattttagggaagaggcggggtatgggttttgtttttttggatagagtaggaatagaggtttagaaaggtttgggatatgtcggggtttagaatattagaatcggtttgagattggaatttagtttttttttgtttagatttagtttttttgttattttgtttagttttgatttagcggtggggttatagaaatatagttgttttagttgggttatgaaaggggtagagtttgattaggatttatagaagttatagtgggtgggattttagatagttttttatatattattggggtaaggggtttagtaagttatagggcggtttgaagttatatagtaattcgggtttagaatttaggttttttggtttttatttttttttaaatgggatcgtagtattattataaaggtttttagtttttgtagtttttttgggtgtttattttattttttttttttttttatttggaagggtgttatttcggtttaaattgtttttatagttaatagtttgggtttggaatttaggttattcggttttagagtttagtttttttttgtttttatatttttagttattttgtaagttatatttagagaggtaagattcgagtttttttagagtttttgtttagtatttgattattgttagagtaaggttaggtttattggagaagagtatggttgatttgaaagggggaagtaggtaggggttgggtttttttaagaattggggtgatttgtaattttgatgttatttgtttgttttattttaagattaaatgtatgtagttttgttttatgtattatggtaattttaagtgatttttgaaatagttttgtaaggtaggtaggatgatttattatttagaaggagaaattgaggttgagtaggaggtgtttgttttaagtatagtagttatggaggtttagattgggtttattcgattttttttatggtttcgttgtttttattagttttattattttgtttttattttggaggggtttggttagagttatttgagggataggaagtttgggttttttttatttttagtttttgttatgtttatttagtgttttgggtagagttttatatttttggatggtattggtttttttagtgttatttgggttgagtattttattttaggattaagaggggtatgttttagggagttttaggggtaaggttatggggtatttttgttttttattcggtgttttaatttcgttttttagttttttttaggtgtatgtttagtattcgcgggagttggtttgtttggtagggttatttagttttattttgggtgtttaggttttatttttgttatttttttggggtgggggagggtggtttttattagtaatgttttttgttagttttattttagttttttttgttttattttatatgtattaggttttgttttatttttaggtatagttttcgtaggatttttatagtattatcgtttttttttttttgtgatacgaaatttagagcgtttgaaggttttgttgtagttttttgggtttcgttttaggttttcgtttttcgaggtagttggtgttatggaaagagaaacgttttcggtgtgggtttagtatattttttattagtgtgtggattgtatattttttttttttataagtcgtcgttttttcgtttttgaaaaggggatgaggatttttattttatagtgttgttgaggggatgtggttaaatcgtatagttaagtgttgggcgtttagttgggttttagtgggggtgagttttttgtgttttgagtttgttttgtaggtagtagcgagtcggtgtagttagaaaggaagaaggggaggaggggcgtttttttgagttttgtcgttggttgggtttattgaggtaggaaggggtttgttgggaggttcgtagaggggttatagttagtggtttaatagcgttttttagttttttgttgttcggtttttttttaggtttattgatttggttcgtttttttcgttagggttgatgtttatatatttttcgggagttcgttgggttcggtttttttagttttgggtaggatgtggaaggcgtatttatttttcgatgaggatattcgggtacgggcgaggaagtgattcggtttgtgtcgttcggtcggggagttacgtcggatttggggtttttttgttgtaatggaggggagatttttgcgtttgttttagtttcgttttttttgtttttggtaggttcgggtttttagttagttttggtttttttgcgttcggacgcgcggacgttgggcgcgttagggttttagtttttttggaagcgtttagtttttttttgttttcgtcgcggcgataggtttttttttcggggaattcggtttggtttcggggtaggggcgggcgagaagtcgcgcggagcggcggggaatggacgtgtggaagcggaggttatttatcgtgtttcggtttggtcgttattgttttggttcgggtttcgtaaggtttgaaatagtcgtagagttagtttcgtttcgttcgttttttttttttcgtttcgtcgtaatcgcggaaaattcgcgggcggaggttaaggtttagcgcggttcggttgtgtttttgcgttttaggggttgggcgcgttcggtttgtttagcgggggatgcggggcgttgttatttttttttagtagtcgggtaggggcggggggttggtcgcgcgtcgtatggtatgtggagttcgggggacggtacggggacgacggggttgttaggcgcggagttattgttcgacgacggtttttgataggtcgtttggatggggcgcgtttggtcgcgttttcgcgttatatatcggttttagttgcgggagagttcgttttattttaattttttagtcgtttttttgaagtgtttcggtgttatcgtggttataaggaggtaggggacgggggttttttgaaggaggttttttaaggggaagggggttataaggttggttagagtgttggtcgcgcggttgtgtatagggttttgagttttttcggtcgttaagttttgtttgaaatgcgtaaatgcggaaaggtgaagtggttgattcggtttatattattttaagtagcggagtggggtttttagttaggtttatgggatttttattggagtttttttttttttggggttggggttggatttataggttgtcggagtaggtagaaggggaggggtttaaggtttagattttagggtttcgtttggattattaattcggttttgtttatttagcgtaggttttcgtttttaggtttgtttttttatttatatcgttttttagggtttgttttgggagatgtgggggtggggtatgtggggaggatggaaaggggttgtgaagggaatttattggagatttatttttttttttattttatattttaggttaggaatttttgttttttggaaaggatttagatatttaggaatttttcgttgggtaggggttttttttttgttttattggggtttttgtttttttttttttttgtttggttttttttttcgttttttgattatttcgttattttttttgtagtttagtaataggttttttaggattaggggggttagcggagtgggggcggttgtgggtttaggtgttttgggaattgagaatttttttttttagagtgttggttaagcgttaggtttgtattcggattgttatttattattttgtttttggggaatttgtgggggagcggatgcgggaggtcgttaggatgtaggatggggcgttaaggttgttaattttatttttttttttttaggattttagggatgatattttttagatgagtttatagagtcgcggtgtttcggggttgggagggtttttttatcggtatcgcgtagatggagtttatttatataggggcgatgaggatacgggttgaggggttttggtcggtggttgtttttacggttggttgttgtggttttattgtgtaatttttataagttttttttgttagattttgtttttttattttatttttttatttttttttttatttttaagtagatcgggaaattgttcgggaagtttgtatttgttaggagggcgttgttaggttttaggttttattgttttttcgaaggtagtttttggtttttacgggttttgtagggttgaggcggggttgttatttttgttttttattgacggtagtggttcgtttagagtatcggttggggattgggaaacgaggttgttgttttggatttgtgtttgtattagttattttttttttttaagtttaggtatgagggttaatggtaatatacgtgaagtttttaagataaggaaagttttttgaaaatggggtagtatggaggtttaagggatgatagttaatggggtttatagggtaggagtagtttttatttttttttcgtagatgtagaaagtagtttttaagaggttaggtatttttagaggagttaaaggttagtttacggtttttttttagtaggaagttagtattatatgttgggtggcgatgtttgtgattagtggttagcggttgttttattttttagttttttagggtataggtt

SEQ ID NO: 1803 - DNA, 6126 bp, Artificial Sequence
  chemically treated genomic DNA (Homo sapiens)
tggggatttttttaaatagaagtattttattgattattaagaaaatagttttaagagtttttatttaatgaagatatttttattagttaggtatagataaattatatgggtattagggaagtggggagtatttttgaatattagagatgattaagttatattaataatttttgaggagaaattttgagtaggtgtagagtattttttagtattttgttgatataaatatttatttgtttagaagttatttgatgagtagttatttgaaatatgtattagttaattaagaatttgattttttgggattgagtaggtattagatgattatttgagtttttggaaattttagttgaagtgattagagtgattggaaaaagtttataagtaagaggttgtattttttttttgagttgattagaataatagatttttgttatggattgttgaggttatttttttttattttttaatttttttatttagaggtgttattaatttgattgtgatttgtagtttaagagagtttttttttatatgtttttatttgtatttatggttatgagtagggtgaagtttagagaattatattttttaatagtttaaatgattatgttattttgttatggattgaatgttgtgttttttaaaaatttagatgttgaaattttaatttttaaggtgatgttattaggaaagggggtttttggatggtgattaggttatgtaggtggagttttaataaatacgattagtatttttataaaagagattttagagaattttttaattttttttgttacgtaaggttgtaaggtaaagttggtagtttgtaaattagaagaaggtttttattagaatttaattatgttggtttttggatttttaatttttagtttttaaaattgtgagaaataaatttttgttgtttaaatttgatatttagtttatgatagtttgttgtaatagtttaaagtgattaagatatatttttatgtttaaaattttttagtgttttgtatggttttttgaagaaagattggaattatttttatttgtaatttagttattgtttatttatttttttagttttttttggtttatataatgttttgttttttatgtagtaatcgtattggaatatttttagttttttgaaattttattttgtttttttttattgggagatttattaatattttgttttttttgtttaaaggttttttttttttatttttttattatgtgtttattatttgttaatatacgtagtttttagagtttttgttaaaaggtatatggagttaggtttttttattgttatttatttttttttatgtgatatatagttttgtttatatatttgtgtgattaaggttaatttttaaagaaagggttatggtaatgaatggttagtaatgttagaattatattataggtgagtagtgaattataagtagtaattatttatttttagtttaatacgtttaggtaaatttttaaataattggtgattttattagaaagtgatgttattagaaagtgatatttttttttattagaaagtgagttagttagataattttatttttatttttttgtatattattttttaaaagatatatttatatatatattttaaaatatagtttagatgatttataaaggtaaatagtttgtgttttaaatattaatatggttaaaattgtgttttttaaggaagaaattataaatattaataaaataagttaatgggttatttgttgttttttttttttattttttttgttttttttataaaattagaataaaatttttttttaataattatgaaataataaggaatttgtttttgttttttaagttaatatttttttttttgtataattagaatcggtatttttaatttttaggtgaggaagtgtaggtataagatgttttagatattttttagttaatttagagttgtatgttttgttttttaaattatttaagttaattgtttttttgagttttaggtatttttattatgatgatgattataaatgattatttggattagaggttgtgttattgtgttaaagagataaagtgttttttttgtaggaatttttaatatttaggtattatttttttaagttttagaagtggttgaaatggggttttggggtagtagatagttattgggggttaatttaaaatttatttaatgtgggatttaatttagaagagtttaggaaagaagagatgaggaatatttgatgaggtgttttttagaaagttagcgttatatatatttggtgtttagaaatagaaggttaaagttacggaatattttgtttaatgttatcgatggtttttgttaatgagggatttgttataggaagatgaatgtagttttttagttattgtttaaatgtttttttttgggtttagtttggaatttttgggtttattttaattaaattttaaaatgaattttagtttagagtgtttaaagtttgtagtttatagtagtggattatttagaaatattttaggggattggttagattgttttaagaatataatagatgaaatgattgataatttatggtttttgttagttttttgttagtgagtgatgaataaagggtttatagttaggttttgagatgtataattaatatatagtttattttgtgattttagataaatggtgttttaatttgtttttagtttatagttaattattaattttttgaatttttaaattattattatcgtttttttgtagggagagttagaatttgagttaaaagttttagcgaatattatagaaaaataagtagtttttgtttttaggagtttataatttagatttgttttgtgtttatataaacgtttttatgagaattttagatgataatgatatttaatgagtattatgtgtcggatattatttttagtgttttatattttttatttaatttaatttttataataatcgttatgatattttgaggtagatgtgattattatttttattataggaataataaaaaatggaaataaaaataggttaggtaattagtttgaggttatagagttaggaaaaattggagttggggtttaaatttaggttataaaggttagtattttaggtatttttttagaataattataattataggaaatattttttatgggttaggtattgtgttgagttattttatatgtattattttatttaatgtttataattagtgatgattattatttatataattgttttttaaacgtttttatttgtttttttttacgtttttgtaatattagtgtgtttttattttatagatgaggtttagggagacgtaaattttttttagggttaatattgaaggatttagttattgattagttttttttaaggtttgatatttatatattggtattattttatgttttgagaaaaatatttttaaataatattttagataaatattattttaataaaaataataatattgttatttatattgtgttttattattaatatttggattgatttgagttttatggtaagtttaagtgttgatattttaggttgtagatgttaaaattacgatttaaaatataaggtgtgatttggagttatataattttgtttatatttattgagttatatttatttattagtttatttaagaaattagtatgttgttatattttggtttttgagggataaagttgaatgatatttcgttttttgtaatttgtaggatggaatagtttgtggatttattttgaattcgtggtggaaggatgttttttggaaggggtagatgttttgattttggtaagttatttttgttttttaggggtttttttttttgattttttatttttttttttttgaatttggtgaaaggtagtatttgtttttttttggagatatataatttgaatatttggttttgatggggaagtagttttgtagggatttttttagttatttgtaaataattttagtggtaattcgcgaattgtaatttatgaatgggattatattttataagttattaagtttaatttttagattagggaattaatgggggagatagcgaattttagagtaaagtgttaaatttttgtcgatagtttgaggttagtggaaagatttcgaggaggttattttagaagtttagcgcgtaggaagtttcgatattaatagttttttgatgatggtggggttggtgaagggaatagtgtttcgtaaggttatttttgttttaggtagtttaatttttattttgtagattttttttggttttaattattttagataataaggagtgaatgtagaatagtacgggttttagggttaattagatattagttagaaaaatttttattatatggtttatgtaaatttgaagatgaatgattgcgaatttttcgaaaagggtttagataatgttatgtataaagaggggttttgtaatttgaggttttagaattcgaagtgaaggggttaggtagtcgggtacggcggaaatttatagttttcgtttagcgagaggataaaggtttgggatatattttaattgcgttcggattttggttggatcggatttttagggtggaggagatataagtatagtagttgtttagcgtgtgtttagtttttttatcgttggtttcggttgttaggaggttggtcgttggcgggaaggggtcgggaaattttagagtttcgcggagatagtagtcgttttgttttttagttcggtggttttttttttttttgtttttttaggggttagatattatcgttttattttttacgttttatttttttgggggatttttttcgttttagttttgaaagcgttaattttggagttttttgtatatttttcgatcgttttcgtttaagttttttaaaaaagaaaggtgtaaagtttggtttaggatagaaaaatgattgattaaaggtaggcgatattttttgttgtcgggacgttatatataacgtgatgagcgtacgggttgcggagacgtatcggagcgttcgtttagtcgtcgtttttaagtttttgaggttttcggggattataatgaataagttgttgtgttgcgcgttcgtggtaagtttttgggttagtcgacgggtgttcggcgtttggggaggttgttgttatttggttttttaattttttagcggatcggcggggagaaggttttattcgtttttttttaggagaggtttggggttaggttggagtaggaaatcgtttttaagttatgttatgttttttttagggtgtttttttacgttgtaaagtttttgttgattttatggaagatagtaagagagagatagatagcgagagagagggagagagagagagagagaaatttgtttgaaagttttagttattaattttttgtttttattttagaatattaacgtttttatgtagtttatattatttttgtttaatgaatttgaatttttattattagtggtaaagaagtggttttttagatttagagtaagttggaagaagacgttagtttttttaaaattattataattagaatatgatatgatagatttttttaatgtaaatattatgtgaaattttgaataattaggagaaaagattttttatatatatattttttaattgtgtaatgttttaataaaattttattgttaaaattattttattttttaattttaatatattgtggagaatattggtagtatgttatgttttaaaatatatttaaagaattgaagtttattaaatagggttaaaaattgtgtttaaaatgttatttggaaaagaaaggaatttttgtgatttagttttttttttaagtttaggttttgattaagttaataagatttgtatgtaggtttttttatgattaatgatttattttttttatgatattagagtgtagagtatattaagatatgaattagatatttatgtaaggttaggaaaagttatatttaagttatatatgtgttttggatgtgtttgagtaaatgtttgaattttaatttttaatttataaataatgaatagaaggttaggtagttttttatttagtttttaggatatagaaatataa

SEQ ID NO: 1804 - DNA, 6126 bp, Artificial Sequence
  chemically treated genomic DNA (Homo sapiens)
ttatgtttttgtattttaggaattaagtagaagattatttagttttttatttattatttgtgggttggaggttgaagtttaaatatttatttaaatatatttaaaatatatatgtggtttaaatatggttttttttagttttgtataaatgtttgatttatattttgatgtattttatattttagtgttatagagaaaataagttattggttatagaaaaatttatatgtaaattttattaatttgattaaaatttaagtttaaaaaaaaagttaagttatagagattttttttttttttaaataatattttaaatataatttttagttttatttagtgaattttaattttttagatatgttttagaatataatatattgttaatattttttatagtatattgaagttgagaagtgaaataattttaataataaaattttattaaaatattatatagttaagaagtgtgtgtgtgagagatttttttttttaattatttaaaattttatataatatttgtattagaaaaatttattatgttatattttaattataatggttttaagaagattaacgtttttttttaatttattttgaatttaagggattatttttttgttattaataataaaagtttaagtttattaagtaaagatagtatggattatatgagggcgttaatattttgagatgaagatagaaggttaatgattaaaatttttaaataagtttttttttttttttttttttttttttttcgttgtttgttttttttttgttgttttttataaagttagtaggaattttgtagcgtaaaaggatattttaggggaagtatggtataatttgaaagcggttttttgttttagtttaattttaagttttttttgggagggagcgagtggagtttttttttcgtcggttcgttgggaggttgggagattaggtggtagtagtttttttaggcgtcgggtattcgtcggttggtttagggatttattacgagcgcgtagtatagtaatttgtttattgtggttttcggaaattttaggggtttggaggcggcggttgggcgagcgtttcggtgcgttttcgtagttcgtgcgtttattacgttatatatagcgtttcggtaataggaagtatcgtttgtttttgattagttatttttttattttggattaaattttgtattttttttttttaggaagtttgggcgggagcggtcggggggtgtgtagaaagttttaggattaacgtttttagggttggggcggaaaggattttttagggaggtggggcgtgaggggtggggcggtggtgtttggtttttgggagagtaggggaaaaaaaagttatcgggttgaggaataaggcggttgttgttttcgcggggttttgaggtttttcggttttttttcgttagcggttagttttttggtagtcgggattagcggtgggagggttgggtatacgttgggtagttgttgtgtttgtgttttttttattttgagagttcgatttagttaagattcggacgtagttggagtgtgttttagatttttgttttttcgttgggcgaaagttgtgagttttcgtcgtattcggttgtttgatttttttatttcgggttttgaaattttaaattatagggtttttttttatgtatggtattgtttgagtttttttcggggagttcgtaattatttatttttaagtttatataaattatgtagtaggaatttttttaattaatgtttgattggttttaaagttcgtgttattttgtatttattttttgttatttggggtagttagagttagagagaatttgtagagtgaaaattggattgtttggggtagggataattttgcggagtattgttttttttattaattttattattattaaagggttattggtatcggagttttttacgcgttgaatttttggagtagttttttcgaggtttttttattagttttaagttatcgatagaagtttggtattttgttttagggttcgttgttttttttattaattttttggtttagaagttagatttgatgatttgtaaagtgtggttttatttatggattatagttcgcgggttgttattgaaattgtttatagatggttgaaaaagtttttgtagagttgtttttttattagggttaagtgtttaagttatatgtttttagagaagggtaaatattgttttttattagatttaagggaaggaaggtgaagaattaggagaggggatttttggggagtaaggatggtttattaggattagagtatttgttttttttaagggatatttttttattacgagtttaaagtggatttatagattgttttattttgtaaattatagaagacggggtgttatttagttttgttttttaagggttagaatgtaatagtatgttggttttttaagtgaattagtgaataaatgtagtttagtgagtgtggataaaattgtatgattttaaattatattttgtattttgaatcgtagttttgatatttgtaatttgagatattaatatttagatttgttatgggatttaagttaatttaagtgttagtagtgaaatataatataaatagtagtattattgtttttgttagagtaatgtttgtttaggatattatttgaaggtgttttttttagaatataaaatgatgttaatatgtgggtgttagattttggagaaaattaattaataattgagttttttagtgttaattttgggaaaggtttacgtttttttgagttttatttataagataaaaatatattgatattgtagaaacgtaagagaaagtaaatgggagcgtttaaaaaataattatataaatgatggttattattaattatgagtattaaataaagtaatgtatgtaaaataatttagtataatgtttggtttataggaaatattttttatagttatgattattttaggggaatatttaagatattggtttttgtaatttagatttgagttttaattttaattttttttagttttgtgattttagattagttgtttaatttatttttgtttttattttttgttatttttataatgaggataataattatatttattttaaagtattataacggttattataaagattgaattagataaaagatgtaaaatattaaaaatagtgttcggtatatagtgtttattaagtgttattattatttgaggtttttatggggacgtttgtatgagtataaggtaaatttagattgtaagtttttgagggtaggaattatttatttttttatggtattcgttgaagtttttagtttaaattttggttttttttgtaaaggagcgatggtggtaatttggggatttaggggattggtaattagttgtaagttggagataggttggggtattatttatttagaattataaaatagattgtgtattgattgtgtattttagggtttaattgtgggttttttatttattatttattgatagaaaattgatagagattatgaattattagttattttatttgttatatttttggagtaatttggttaattttttagggtatttttaagtaatttattattgtgggttgtaggttttgaatattttgagttgaagtttattttaagatttaattggaatggatttagggattttagattgaatttaaaaggggatatttgaatagtaattggaagattatatttatttttttgtgatagattttttattggtagaggttatcggtgatattaagtagaatgtttcgtaattttaattttttgtttttaggtattagatatatgtgacgttaattttttaggggatattttattagatattttttatttttttttttttaaatttttttgaattaggttttatattgaatagattttggattgatttttagtgattgtttattgttttaaaattttattttagttatttttaaagtttagagaaatggtgtttgaatattaggagtttttatagggaagatattttatttttttagtatagtagtatagtttttgatttagatggttatttataattattattataatggaaatatttgagatttaggaaagtaattgatttaggtgatttgggagataaggtatgtagttttaagttaattgaaaagtgtttaaaatattttgtgtttatatttttttatttgaaaattggaaatatcggttttggttatgtagagaaaaggatattaatttgaagaataagaataaattttttgttattttatggttattaaaaagaagttttattttgattttataaaaggaatagagaaaatggaggagaaaaatagtagatagtttattgatttattttattaatgtttataattttttttttaaaaaatataattttaattatattaatatttgagatataaattatttgtttttataggttatttagattatgttttaaaatgtatatgtgggtatgttttttaaaaaataatgtatagaaaggtaaaggtaaagttatttagttgatttattttttgatgaagaaagatgttattttttgatgatattattttttgatgaggttattagttgtttaagggtttgtttgaacgtgttggattaggggtaagtagttgttatttatggtttattatttatttataatgtgattttggtattgttagttatttattattatagttttttttttgaaaattggttttaattatataaatatataaataagattgtgtattatatgaaaagaaataagtggtaatagaaggatttgattttatgtattttttaataagaattttgaaaattgcgtatattgataaatgatgaatatatggtgaagaggtggggagggagagtttttgggtaaggaggatagggtgttagtaggttttttagtgggaggaagtaaggtgggattttaaggaattagaaatattttagtacggttgttgtatggagagtaaggtattgtgtggattaggagggattgaagaggtgagtagatagtggttaggttgtaggtggaagtgattttagtttttttttaaagaattatataaagtattagagagttttaagtatgggagtgtgttttaattattttggattattataataaattattataaattgggtgttaaatttaagtaataaaaatttattttttatagttttggaggttagaagttggaggtttagaaattagtatggttgagttttgatgagggtttttttttggtttgtagattgttaattttgttttgtaattttacgtggtagaaagggttagagagttttttggggttttttttataagggtattaatcgtatttgttaagattttatttgtatgatttaattattatttaaaggtttttttttttaatagtattattttgagggttaggattttaatatttgaatttttgaggaatataatatttagtttataataaaatgatatgattatttaagttgttgaagggtgtaattttttgaattttattttgtttatggttataaatataaataaagatatgtaagagaaaatttttttaaattgtaaattatagttaaattgatgatatttttgggtagggaagttgggaaataaggaaaaatgattttagtagtttataatagggatttgttgttttgattagtttaaggaagagatataattttttgtttataaattttttttagttattttagttattttaattggagtttttagaaatttagatagttatttagtgtttatttagttttaagaaattagatttttagttaattgatgtatattttaaataattatttattagatggtttttgaataaataaatgtttatattaatagagtattaaagaatattttatatttatttagggtttttttttaaaaattattgatgtaatttgattatttttaatatttagaaatgttttttatttttttgatgtttatgtaatttgtttatatttggttaatgaagatgtttttattagataaaaatttttaaaattatttttttaatagttaatgaggtgtttttatttgggaaagttttta

SEQ ID NO: 1805 - DNA, 5536 bp, Artificial Sequence
  chemically treated genomic DNA (Homo sapiens)
tatagtttttaaggtgggggggggtgttattagcgttttttgtttttagtatttaaggagttttttaggagaaagagtaagttttgaggagttttttgagttcggtattggtgttgaggagggagttagagaagagaggggttcggggtcgcgtagaggcgtagaggtgggggtatttcgggttaggtagaggtggatttttttatcgtagtgggcggagaagtatttatagtgttagaggttgaagttgagcgatatgttggttaaattttattagcggtttattaagtattcgttgttgtttaagtcggtgttgaggaagatcgaggagtcgcgcgttaaggaggtcgtcgtcgttatggtaattttgatggttagcgggagtcgttttttttgcgcggttttttgtttcgttatgattttggatttgaagtttttttatttgtttttagatcggtttcgtggagcgttttatttattacgtgaacgcgtgtatgcggtagcggtaggagcggtagcggttggcggtcgtggtgagtcgtatcgacgtttacgaggtggtggaaagtagtagcgacgaagtggataaggtgggcgtgtgtgtttgcgggggttgtcggttgggagagaggaaggtttagttggtaggtaggggttgtgttgggtattttattgaggatgtttagttgagatgggagttagtttttggttttttttacgtttacgttattcgtttttagtttttgaaggaatttttgtatttggatttgatagcgtttatttttggcgttttttcggaggagacgcggtagttgttgttggaggggagtttgaggatgaaggaggggaaggatagtaaggtgattttagggttattttatttttgtgttttgttttttttagggattttttgggttttagttattggtttttagttttgtagttttttcggtggttatttaagaattagtgattttgttatagtgaatgatagttttttgtttgttatttataaatttagtagtagggttttagtttttgaaggtattagttgtgtttatttgttggtgttatatgggtttttggtgggagggtagttatattttataagtgggttaggaattttagagttttgttattgtgttatggtttttttaggtatggggtaggttgagagtttgtatacggtgattttaaagttattagttttttttttaatgtaaatttgtattgagataagttattaacgtatattttagtgaaagagaattatttttttttttattttaattttatttgaaggtttatggtgggaggagtgtttgataaaaatcgagtgtttttaggggaggttggtgttatagtttttggttttgattttgttggtttttttggttatttttttttttgttattgtagatggatgtgtattgttttttttttacggatttgttgttggtgattaaagtagtgaagaaggtagagaggattagggttattaggttatttttgttcgtggataagattgtgtgtcgggagttacgggattttggtaaggagttttggttttttgtttttggttaggggttgtgatgggtgggggttatcgtttttgttgatattgatttgggttttttttaattagggttttttttttttatttatttgaatgagttttatagtgttgtaggggtttatacgttttaggttagtggttaggttttgtgtcgtggttgggtggatattatttataatgtttaggtgagtgtagagtagtgagtgggtgggtaaggtagattagggagatgttggttataatttattttgttttatgtattttaattttgtttgtagaattagttgtaatagttgcgtgtataggagtttttaggtagttagtagtttttgtagagtttggaagaggaggaggatgagtaggaggaggaagaggaggaggaggaggaggaggaggaaggcgaggatagtggtattttagttgttagtttttttattattatgcggaaaagtagcggtagtttcgatttttagtattggtacgtttgtttatgattatttagtaggttaaattaggataagtattttagtttaggatttttgaaggtttagttacgtttttttttttttaatggttttttgttatgaatattgtgggagcggggttttgttttttttagagttcgggtggggagggtagatatttttttatgtgttgttagttttgatttattcgtggtagttgtttggggtgttgtgttgaggatttttagggtagatttagttttggtagggaagagtgttgggttcgttattgaggtttgttgtgggtattggagttggaagatttgttatatttgttatatgttgttatttttgagtttttagttttaggagggtagagggtataaattatcgtgtattgtttagtttggggttgttttaggttatttaggttttatggtttgggttgattttgtttttggttttatagtgttttagatggttttacggagattttggttatggttgtggtagagtttggggatacgttgttttttttcgagttcgatagcggtttttttagtttttagtttgatgagattttttttagtattattgttttatttgttacgtttattagtgagttgttgtttttgggttcggtggacggtcgtttttgttttatggattttgtttacggtattttttttttaatttttttataagattttgtggttttaggtttaatggtagagttagtgtttcgggttttagagtttttacgagtttttttttttttattttcgtttcgttttcgtcgtcgtatttttgtttagttgttgagttgttcgttttatttgtttaagtttaagttcgaggttagttttttttagttgttggtaggggttggtatttatgggatattttttgtttttagtcgtagtttgttagagttttgtttggttgttttagttttaggtattaggatttagggttttttttaggaagttgggtttagttgggattgtcgaggggtttttagttttggtagcggttttgggttagtcggttgtttggtcggggaatttgtaggtttttataggaagaggtgtggagatttgttttcgggggttttttttagggtttagtttgagtttttattaggggtttttgtttagtataggaagttgattttggtttagttttatcgaattaggattattttgttgtttaattttacgtttattgtttcgtgagtggtttggattggggtagggtaggtggtttagggtattggtatgggggtttatttatgtttgggagtatcgtatttggggagggttatggcggagggagtttgaattttgtttagtgtttgggcgtagggggttgtggtgggtagtagtgaaggggtttgaggagtgtcgtggggaagagagggtgattagagttattttgaatggcgttagttaaagaaggattttgttttttttttattttgtagggaggtttgagtagagggaggtttttaagagtgttattgattaagagatagtagatagtttgttttttggggcgtgtcggtatttgttttagttattgttttttgtatgtatgagtcggatgttgggtaggatttttgtttacgttcgggttcgatttgcgttttgtcggattggatggagtggaggaggtttaggttatagtattattttatttgtttaggtagtttttcgttatttatttttcgaagttattagtttagttcgagtttttagggttgggtttttaggttgtttattttatttttatttttattggtttttagtgggatttatttttgttttgtttttatttttttagttttataggttatttttggtttgggttgggttttgtgaagttacgtatttattgagtttttggtttttttataaagatttgtttagattttattgggaagagttttttgttttggggtttagtgattcggggtatttgagtttagggcggtttttttgtgtttttgtgtttttttatttgttacggatgggttacggatggagtttgttatgggaagtattgggaagtaatggggtgtggggtgttattagattaatatttttagatttttttatttttagttattattagagtttttttttaggtgtttttcggggatttagggttgaatttgtttagtttttatatttaggttagtttttttgggaaggtgggttttttatgggggtttttttaggaattttttttttttttttaatatagagttttattttgttatttaggttggagtgtagtggtgtgatgtcggtttattgtaatttttgtttttcgggtttaaacgatttttttgttttagttattttagtagttggaattgtaggtgtgtattattacgtcgggttagtttttgtattttaagtagagacggtattttattatattggttaggttggtttcgaatttttgattttaagtgtttcgttcgtttttgttttttatagtgttagaattataggtttgagttattgcgtttggttttttgcggtatttttggtttaattttttttatggttggggacgcggaggtcgagagagaagttatttgttttggttttattttgaagtggtttttagggttggggcgagagtcggggtggggatcgagatgtagttttattttgtgtttttggtcgtagtaggtagtttagcgtttcgcgtgttttatttggtttgttcgttgtcgtttaatgagtttaggtttaggtcgagtagagggggtatttggtcggattcggttgggttcgggcggtttcgttttttttcgttcgttaggcgggtttttttagacggcgcggggcgggttttgcgggcgcggggttgaaggcggaattacgacgggtagagagtacggagtcgggaagtttttgggcgttcgtcggagggttatggagtagcggtcgcggggttgcgcggcggtggcggcggtgagttgagacgtaggaggttaggggtagttttgagttttgttttaagagtttcggtgaaggaaggggtttcgggcgcgtttttattttaagttttattgggggttgggttggtcgtttttttcgatttcgttaaaggtttttttagggcgtagtttttttattgagaggaaattttttttaggagggtttgggggttttaggtagagtattattagtgttttttttttaatagaaagtatgggtgggggtgggggcgttgttggatttttgttttggtggaggggaaatttgtgaggggttggtaagcgtttttttcgaagtttggtgtgtgcgcggggggaaggaagttagttttttttttatttatgggtattttttttgttcggggtttgggaagtgggttgttttgtgggtaaatgttggggtttttgaaatggaggagacgtagtagggagaggttttacgtgggtagttgcgttgagagttagtagtatttgttttttagg

SEQ ID NO: 1806 - DNA, 5536 bp, Artificial Sequence
  chemically treated genomic DNA (Homo sapiens)
tttgggggataggtgttgttgatttttagcgtagttgtttacgtggggtttttttttgttgcgttttttttattttagaggttttagtatttgtttatagagtagtttattttttaggtttcgggtagaaggggtgtttatgggtggagaggaaattaattttttttttttcgcgtatatattaggtttcggagggggcgtttattagttttttataagttttttttttattagagtaggaatttagtagcgtttttatttttatttatgttttttgttgggggagggatattgataatgttttgtttggggtttttagatttttttgggaggggtttttttttagtggaagggttacgttttggaggagtttttaacgagatcggaaagggcggttaatttagtttttagtgaggtttggagtggagacgcgttcggggtttttttttttatcgaggtttttgggatagggtttaaagttgtttttagttttttgcgttttaatttatcgtcgttatcgtcgcgtagtttcgcggtcgttgttttatagtttttcgacgggcgtttaggggtttttcggtttcgtgttttttgttcgtcgtggtttcgtttttagtttcgcgttcgtagggttcgtttcgcgtcgtttagaagggttcgtttggcgggcggggggaggcggggtcgttcgagtttaatcgagttcgattaggtgttttttttgttcggtttagatttgagtttattaggcggtagcggataggttaagtagaatacgcgaagcgttgggttgtttgttgcgattaggggtataggatagagttgtatttcggtttttatttcgattttcgttttaattttgagaattattttaaggtagagttagggtaagtgatttttttttcggttttcgcgtttttagttatggaggaggttgggttaaaagtatcgtaaggggttaagcgtagtagtttaggtttgtaattttagtattatgggaggtagaggcgggcggaatatttggggttaggagttcgagattagtttgattaatatggtgaaatgtcgtttttatttaaaatataaaaattagttcggcgtggtggtgtatatttgtagttttagttattagagtggttggggtaggagaatcgtttgaattcgggaggtagaggttgtagtgagtcgatattatattattgtattttaatttaggtgatagagtgagattttgtattaaaaaaaaaaaaaaagtttttgaagggatttttatggaggatttatttttttaagagggttggtttgagtgtgggaattgggtagatttagttttgaattttcggggggtatttggggagaggttttgatggtggttgaaggtggggaagtttgggggtgttggtttggtggtattttatattttattattttttagtgttttttatggtaagttttattcgtggtttattcgtggtaagtggaggagtataggaatataaggaggtcgttttgaatttaagtgtttcgagttattgggttttaaagtaaaggattttttttagtggagtttagataagtttttataaaagaattaaaagtttaataaatacgtaattttatagaatttagtttaagttaggggtggtttgtgggattgggaaggtgggggtagggtaggagtgaattttattggaggttagtgagggtagaagtaggatgggtagtttaggagtttagttttgaagattcgagttgagttggtaatttcggggagtaggtgacgaggggttgtttgggtaggtggggtggtattgtggtttgggttttttttattttatttagttcggtaaagcgtaaatcgggttcgggcgtaggtagggattttgtttagtattcggtttatgtatataggaggtagtagttgaagtaggtgtcggtacgttttaggaggtaggttgtttgttgttttttggttaatggtatttttgggggtttttttttgtttagatttttttatagggtggggaggggatagagtttttttttggttgacgttatttagagtggttttggttatttttttttttttacggtattttttaggtttttttattgttgtttattatagttttttgcgtttagatattgggtagggtttaggtttttttcgttatgattttttttaaatgcgatgtttttaggtatgagtgggtttttatgttagtgttttgagttatttgttttattttagtttaggttatttacgaggtagtgagcgtggagttaagtagtagggtggttttgattcggtagagttgggttagggttagttttttgtgttgggtagagatttttggtgggggtttaggttggattttgggagaggttttcgagggtaggtttttatatttttttttgtgggagtttgtaggtttttcggttaggtagtcgattagtttaggatcgttgttagggttaggggtttttcggtaattttagttgggtttagttttttgaggggagttttgagttttaatatttggggttggaatagttaggtagagttttgataggttgcggttgggggtagagggtgttttatgggtgttagtttttgttagtagttggaggaggttggtttcggatttagatttgagtaggtggggcgggtagtttaatagttggataggggtgcggcggcggagacggggcgagggtggaggggaaggaattcgtggggattttggggttcgaggtattagttttgttattgggtttggggttataaagttttgtaaggaggttggggagagggtgtcgtaggtagagtttatggagtaggagcggtcgtttatcggatttaggggtagtagtttattggtgggcgtggtagatgaggtagtggtgttgagagaggttttattagattgggagttgaaaggatcgttgtcgaattcgggggaggatagcgtgtttttaggttttattataattatggttagggttttcgtggagttatttgaggtattgtggggttaggagtagagttagtttaggttatgaaatttagatggtttgaggtagttttaggttgggtaatgtacggtggtttatattttttgtttttttggggttggaggtttagagatggtagtatgtggtaggtgtggtagattttttagttttagtgtttataatagattttagtagcgagtttagtatttttttttgttaaggttggatttgttttaaggatttttagtatagtattttaggtagttattacgaatggattagggttggtagtatatggaaaggtgtttgttttttttattcggattttgggggagatagagtttcgtttttatagtgtttatgataagaggttattgggaggaagggagcgtggttgggtttttaggagttttgggttagagtatttgttttggtttgatttgttgggtggttatgagtagacgtattagtgttgagagtcggggttgtcgttgttttttcgtatgatggtaggggagttggtagttgaagtgttattgttttcgttttttttttttttttttttttttttttttttttttttttgtttatttttttttttttttaggttttgtaggggttgttgattgtttgggggtttttgtgtacgtagttgttgtagttggttttgtaggtaaggttggggtatatgggatagaatgggttgtgattagtatttttttaatttgttttgtttatttatttattattttgtatttatttgggtattgtaaatggtgtttatttagttacggtataaggtttggttattggtttggaacgtgtaggtttttatagtattgtgaaatttatttaggtagataaggaggaaggattttggttagggaaggtttaagttagtgttagtagagacgatggtttttatttattatagtttttgattaggaataggggattagggttttttattagggtttcgtagttttcggtatataattttgtttacgagtaggggtggtttgatgattttggttttttttgttttttttattgttttggttattaatagtagattcgtgaagaggaagtagtatatatttatttgtagtggtaggagggggggtggttagagaggttagtagggttagggttagggattgtggtattagttttttttgggagtattcggtttttgttaaatattttttttattatgaatttttaagtaaaattaaaatgaagaggaagatgatttttttttattgagatgtacgttgatgatttattttaatataagtttatattaaaaagaagattggtgattttgaagttatcgtgtgtaagtttttagtttgttttatgtttgaaggggttatggtatagtagtaaggttttggggtttttggtttatttgtggaatatggttgtttttttattaggaatttatgtggtattaataaatgggtataattggtgtttttaagggttaggattttattgttggatttgtgaatggtaggtagagaattgttatttattatgataaggttattggtttttgagtaattatcgaagggattgtagagttgagaattagtgattggggtttaggaggtttttaggaagggtagggtataggggtggggtggttttggaattattttgttgtttttttttttttttatttttaggtttttttttagtagtagttgtcgcgtttttttcggggaggcgttagggatgggcgttgttaagtttaggtgtagaaatttttttaggagttggggacggatggcgtgaacgtaggggaggttagagattgatttttattttagttaggtatttttagtgagatgtttagtatagtttttgtttgttagttgggttttttttttttttagtcggtaattttcgtagatatatacgtttattttgtttatttcgtcgttgttgttttttattatttcgtaggcgtcgatgcggtttattacggtcgttagtcgttgtcgtttttgtcgttgtcgtatgtacgcgtttacgtggtggatgaagcgttttacggagtcgatttaggggtaggtgagggagttttaggtttagggttatgacggagtagagagtcgcgtaggggggacggttttcgttggttattagggttattatggcgacgacggtttttttggcgcgcggtttttcggttttttttagtatcgatttgagtagtagcgggtatttggtgagtcgttggtggggtttggttagtatgtcgtttagttttagtttttggtattgtgggtgttttttcgtttattgcggtgggggagtttatttttgtttggttcggggtatttttatttttgcgtttttgcgcggtttcgggttttttttttttttgattttttttttaatattaatgtcgggtttagagggttttttagaatttgtttttttttttggggagttttttgaatgttggaggtagggggcgttggtgatatttttttttattttggagattgtg

SEQ ID NO: 1807 - DNA, 6361 bp, Artificial Sequence
  chemically treated genomic DNA (Homo sapiens)
atatttttttttagaggacgttgtgattgttattttagggtttacgtttgataattttattgtggttgtttttttgggtttgttgttattgatttatatttttatggttatttttttttgtatttggacgtagtagtaattttttattggatgtggatattgtgttgtgacggttttgattatttggtatttttgttgggttgttttgggtttttttttaaaggacgttgcgttgtgttttgcgtggagtttagttttttgttttttattttggttttcgtgtggttggttttgaagttttttagagtaggtttagtttagttttttttgtaggaagagtttagttttatttttaggacgggttttgttgggtggttgtcgatagtttaggattttttaggattttttttttggcggtcggaatttttgttttttatttgtgagttttaggggtcgggggtttatagttttttagggttttatttatgttgaaagtttattttttatatgtatggcgttcgatttcggaggttttagagatttttaggtagttttttggagttttttgtttgtgtagttttttttttttcggagttttgtttgttaggtttttttgcggatgtttttttgagttttgatttttttttttttagttcgttaggattgttggatttgtttggatgttcgtttttgttcggttatttttaatgggtttttattttagggttggggtgattcgggttgaaaatagtttattttgagttttagtttcgagttttcgtggtaggagggaaattgttggttgtgttattttacggcggttggaacggacgggattagttttttttagaggggtatttcggttggttttagaatttttttttgttgtgaaagttgttaggtatattttatattggttattttttattttaaatgtgcgtttattaatgaaacgttttaataggattttttggattaaaatattgagtattgttttgtaatttgttttttagaaggtcgtgttttttcgtttgggattttgttgttttttcgtcggttatttcgtatacgtttcgttgtttttttgggtcggtttagttattttacgtttttgtgtgtgtattgagatatttattttggtacgttttttttttttagtacgtggtttttacgttgtgtttgtttagttcggagtttagaggttttcgtagttttttataattttatggtgtagtgatttgaggttttttttggtttagttttttttttagggttaggggtttatgtattgaattaagacgggaggtgttttttttttgagttttgtttttgttgaatttggaaggtagcgtttagtggcggtttagatttttagagttttttttgaggttcgatatttttttgttttttttagggagattttttggtttggtttttagttttcggtgtttcggtttttttatttggaaggtggggatgttgaaggtgtttggtttgtggttgtgtattaagttagggtgattgtgagtttttagagttcgaatgtttggaaggaagggcgcgagttgggtgcgtgtgagtgttttgattatggatatagagcgtggggttttttggagggttggaatttaggtgggggatgttcgggtggtgggatagagtggggttggaggagagggtttgaggaatgtttcggttatagatattttaagtttatgggaggttaggagttggttataaggaaggtgaggtggggaatagagttggggtttagggttttgatttggggtgagaggtgacgttattttcgaggtagaaagacggttaggggaggggaggaggtggggaaagtagacggacggggaggcggggggagtttagggttaggagtgttaggggtaggtatttgagatagaggtattttgaggttttttagtaggtaattgatattttggtttgtagcggggaggaatcggggttgggttggaggtttggggacgtttggggttgttttaatttttagtagatattttattttttgggaagttttagttgttttagattttttttataatgttttgattatttttaatttttaagtttttttttttttgtttttaagttcgaggttttggagttgttttcgttttgggttatgagagttggatatagagttttttaagttttacgggttttttgtatcgtcgtttgtttcgtttttttgttttttttttcggttttttttgtgagggttgtttatttaggtgatttcggagtcgtttttttacgtttttatttgttttgtatatcgtttattagtttgatagttgtttaaagtttttagagtatagaacgggtttggtgtttgcgttttcgtttcggggtgggttacggtcggttttgtgtttcgtttttttttcgtttattagcggtggattttagtttttttttgtagtagtatttaatttatatatttttttagagacgcgtagtttatttcgttttcgtagttttttttttattttttagagttttttatggtttgggtagtttattttgagtgttcgtattatacgattgtagacgtttggtttttggatttaaattttttattagatcgtgattaggatggtaatgattaggtttcggttttagttttttgtttggtttgtattggtatagtattgggtttggggagttttcgcgataggaggcgtggggttcggggtgtttatttgtttttttttttttgttggtaatggtgggtttcgggatgggggtagtgatattttgcgggtagtcgtgttaatgtagatggttgggtgttgggtagggtttcgtttttcgtttttttgggttgttttattttttttttgatgattttggggttttgtatagggtttggcggtgttggtgtcgggagagtttacgttgaatggatgaaggagtgagtgttgtatttagcggggggcgttgagcgttgggtggggagtttaggatatttttttttgttgttcgggaggtaatattttggatttttggagtttgtattttgtgagagcgggtaggttatagagaagggagaaaagggacggagggtcgaggcgggcggatacggggagtagggagcggggatagggtttatttagtaattagagaaggttttaaggaagaggtgatattttagtaaagatttggtattgtttgtgttttcggtggggtagatgggttttttttagtttttttgaggtttggtatttggggttttatgttaggtttggggttttggtgtgggagttgaagtcggggtaggaggggtatggaggaaggggtaggaggggttgagttttattgatgtttgtgttagttttgttttttgttatgttttagttttttttttttttagggtggggtggatgagacgattttggaggacgtatttgagagagtggggttggagtttcgtatcggtaggtgtaggcgttgtgtttgtttttggaggttgggcgtttttggggagttggtgagggaacgtgttgtttttgtattttggagtttttatgtttttttggggttttcgggagtggaggatgtaaggggtttttttttttttttttgtaagatttatatggttttgtatgtgggggatatttttggtagggggcgttgagggttaggatgtgagtgtattagggaaatagtagatggggttttttttttaggttttagttgtggggtgggagtttatgtttttgcgtgttttttgggggttttttttttattgggtgttatttggttttttattttgttttagagtattggggtttgggttcgtttattttggatgttggttaggagtgtatttgtttttggagttcgggacgtttggttttataggacggtgtcgtatattatagtcggtttaattttatttttgtttgttttttttttagggtcggtttgtagggttgtatattttttagttggggtgtaggttttcgggtttttgttatagatttttgtggttggttattttgttaatttttttgtaggtgagggtgggcgtaatttttaaggttttttttattagatgttattgagttttttaggggttagggttggattttggagggggttatttggttgaagttaggattaggaggggtagggggtagtcgaggggtagggggcggttttgggttaggcgtttggtagatgggtttgttggaggtgggggtttttggtgtgtagtaggcggtgttagagggggtgattgggatttgttttgggtaagtataggcggtgcgtgatagatttgggtttttattgattgtattacgtttagtagtaggaaggggttacgggggtattggcgtcgttacgtgggttacgaggttttatgtgatgtagggagcgaggtcgttacgagggatttattggtgtttgttttggggtttcgggattgtgggttgtttttattcggaggtttttttattattaggttttgtggggtagggaagtttagtggggtgtagggagttaggaagttggggtggggttagggtagggtttatagggagatcgggcgaggttggtagtttttttagttcgcgtagcgtttttgtagggggagtaagagttgtttttttattttttttaggggacgggtaggggtattttgggttttttttatttttttacgtagggatataggtttggtgggtttatgattgaaattggttagatcgtattttggtggttttattcggaagggaagtttattttgtttagtagaagttgagatgggaataggaaatttatagggtttttttattcggtaaaaatgttagttagcgtttcggggagtagtcgagggtttttgagtgtgtgagtgaggtggggaaatatagatggattttggggggtttttttttttataggaaattcggagtggattggaatggtgtagggggagaattcgttttttttatcgggcgttttttttatatcggttttttttttcggttttgtttggatagtttttgtttttcgtagggtttatttgtgttttttagcgtcgttttatttagtaggtttgagtttttttttgttgttagatattttttgttgtttatttttttgttgttcgggttttgaggtatagtttgttatatcgaggcggatttttttttttttttttttttttttttggtttatagtcgtagtaatggcgttgagtttttttgttggagtttattttgttagttgggttttcgagttgtcggtttgagtttgaggtatggagttttttggagattgggggttttttttttggagatttatttttaaaatcgacgttttgaggttggtgagttttcgagtttttttttcgtttgttcgtagattttagttttgattttagggttttttatagattttttttttatgtttttgttttggtcgttgttggtttcggcgtttagttcgttttttgttgtttggggttttcgggttaatttagatttttagtattgggtttattatagtggggtgagtagtagagttatagttttatttagtagatttttttttgcgtgtgttttttatttattatttcgtttacgggtagttggtgagtttttatttggtcggatgtgggtatttttgggggttgggtgtttttgggcgtttttgggcggggttttcgagtaggtgatttaatttttcggtagttttgattttggtgataggtgataagattagtgtgtagtagggggttggatttaggtgggtggggtggggatattttttatgtttatgtggtatttttgtttgtttagttattatttttattaggggttttcgattgtttattagttagtttaggaacgaggttacggtagagttatttttttcgatgtggttttgattagtttgttatttattgtttggtttgtgagtttttggggtttatttttggttgtttttgttggttttttaggggttagtaggtttaatttaggttagtaggggggtcggtaggttgtttgtttagtgggtttaatgtttttaggtgtggggtgtggggtttttggcgagggtagagttttagtttttagggtttcgcgttgttaggtagcgttattagggttggaggaggggcggtttttattttatttcgggttttagcggtcggtaaggttgttttatgagtttggtttggggttcgtttttgttttttttattaggtattgtcgtttttttttattgtatagagggagatttaggttgtggggttaagtttggtagagtttatagggtagttagggtattttttaatgtttgttttgatttttttagg

SEQ ID NO: 1808 - DNA, 6361 bp, Artificial Sequence
  chemically treated genomic DNA (Homo sapiens)
tttaagggggttaggataggtattgggagatgttttggttgttttgtgggttttgttaggtttggttttatagtttgaatttttttttgtgtaatggggaggagcggtagtgtttggtagagaggatagaagcgggttttaggttaggtttatggaataattttgtcgatcgttggagttcgggatagggtggggatcgttttttttttagttttgatgacgttgtttggtagcgcggagttttgggaattggaattttgttttcgttagggattttatattttatatttgggagtattgagtttattgggtagataatttgtcggtttttttgttggtttaggttggatttgttgatttttgaagagttagtaggggtagttagggatgggttttagaggtttataagttagatagtgggtgataggttgattagggttatatcggggagggtggttttgtcgtggtttcgtttttgggttggttgatgggtagtcgggggtttttgatggggatagtggttggataggtaggagtgttatatgagtatggagagtatttttattttatttatttgggtttagttttttgttgtatattgattttattatttgttattaaggttagggttgtcggggagttgggttatttgttcgagggtttcgtttagagacgtttagagatatttagtttttagaagtgtttatattcggttaaatgggggtttattagttgttcgtggacggagtggtgagtgggggatatacgtaggaggaggtttgttgggtagggttgtggttttgttgtttattttattgtggtgagtttagtgttgggggtttgggttgattcgagagttttaggtagtaggggacgggttggacgtcggagttagtaacggttaggataggggtatggggaagagatttgtgggaggttttggggttagaattgggatttgcgagtagacggagaggaggttcgggggtttattagttttaagacgtcggttttgggggtggatttttagggaggaggtttttagtttttaggaggttttatgttttaggtttagatcggtagttcgggaatttagttagtaggatgaattttagtagaggaatttagcgttattgttgcggttgtgggttagaagagaaagagaaagagaaagagaattcgtttcggtgtgataagttgtgttttagaattcgagtagtaggagagtgggtagtagggggtgtttggtagtagagaggggtttaggtttgttgggtggagcggcgttgggggatataggtgggttttgcgggaggtaggagttgtttaggtaaagtcgaggggaagggtcggtatgaaggaggcgttcgatgggaggggcgagttttttttttgtattattttagtttatttcgggttttttgtagaagggggagttttttaaagtttatttgtgtttttttattttatttatatatttagggattttcggttgtttttcggggcgttgattgatatttttgtcgaataaaggggttttgtgggttttttgtttttattttagtttttgttgaatagggtaaatttttttttcgaataaaattattagaatgcggtttggttaattttagttatagatttattaggtttgtgtttttgcgtgagggggtgggaaaagtttagagtgtttttattcgttttttgggaggggtggaagggtagtttttgttttttttgtagagacgttgcgcggattgggaaggttgttagtttcgttcggtttttttgtggattttgttttgattttattttagttttttggttttttgtattttattgggtttttttgttttatagagtttggtggtagggagattttcggatggagatagtttatagtttcggagttttaaggtaggtattagtgagtttttcgtgacggtttcgttttttgtattatatggaatttcgtgatttacgtgacgacgttagtgttttcgtggtttttttttgttgttggacgtgatgtagttaatggaagtttaggtttgttacgtatcgtttgtgtttgtttagagtaggttttagttattttttttggtatcgtttgttgtatattaggaatttttatttttagtaagtttatttgttagacgtttggtttaggatcgttttttgtttttcgattgttttttgttttttttggttttgattttagttaggtgattttttttagggtttagttttggtttttgggggatttagtggtatttggtggaaaggattttggggattgcgtttatttttatttgtaggagagttggtagggtggttagttataggaatttgtggtaggagttcggggatttgtattttaattagaaagtgtgtagttttgtaggtcggttttggagagggagtaggtaggggtgaagttaggtcggttgtggtgtgcgatatcgttttgtggggttaagcgtttcgagttttagaggtaggtgtatttttggttagtatttagggtggacgagtttagattttaatattttgaggtagggtgggggattaggtggtatttagtggaggaaaagtttttaagagatacgtaggagtatggatttttattttatagttggagtttgggagaggagttttatttgttgtttttttggtgtatttatattttggtttttagcgttttttgttaggaatgttttttatatgtagagttatgtgggttttgtaaggaagaagaagggggttttttgtattttttattttcgggggttttaggagggtatgggggttttagggtgtagggatagtacgtttttttattaattttttaagaacgtttaatttttaagagtagatatagcgtttatatttgtcggtacggggttttaattttatttttttagatacgttttttagagtcgttttatttattttattttggggaggagggaaattgaggtatggtaagagataagattaatataggtattagtgagatttagttttttttgtttttttttttatgttttttttatttcgattttagtttttatattaaggttttaagtttgatatagggttttaggtgttaggttttaagggggttgaagggagtttatttgttttatcgagggtatagatagtgttaggtttttgttgaaatgttattttttttttgaggttttttttgattgttgagtaagttttgttttcgttttttgtttttcgtattcgttcgtttcggtttttcgtttttttttttttttttttgtggtttgttcgtttttatagaatgtagattttaggggtttagggtgttatttttcgggtagtaggaggaaatgttttgggttttttatttagcgtttagcgtttttcgttaagtatagtatttatttttttatttatttagcgtgggttttttcggtattagtatcgttaggttttgtgtaggattttagggttattaggaaggaaatgaggtagtttaaggaggcgggagacggggttttatttagtatttagttatttgtattgatacggttgttcgtaggatattattgtttttatttcggggtttattattattagtagggagagggaggtaggtgagtatttcgagttttacgttttttgtcgcggggattttttagatttaatgttgtgttagtgtaggttaggtagggggttgaggtcgaggtttggttattgttattttggttacgatttggtgaaggatttgagtttagaagttaaacgtttatagtcgtgtggtgcggatatttaggatggattgtttaggttatggggggttttgagggatgaagaggaaattgcgggggcgaggtgggttgcgcgtttttgagaaagtgtgtgagttgagtgttgttgtagagggaagttggggtttatcgttggtgagcggggaggggacgggatatagaatcggtcgtggtttatttcgagacggaggcgtagatattaggttcgttttgtgttttggaggttttgggtagttgttaggttagtggacggtgtgtagagtagatggaggcgtgaggaggcggtttcggggttatttaggtgggtagtttttataggggaggtcgagggggagggtaggagggcggagtaggcggcggtgtaggaggttcgtggaatttggagggttttgtgtttagtttttatggtttagggcgggggtagttttaaggtttcgggtttggggatagaagggagaggatttgggggttgggggtggttagagtattgtgggagggatttggggtagttggggttttttagagggtgaggtgtttgttgggaattggggtagttttaggcgtttttaggtttttagtttagtttcggttttttttcgttgtaggttagggtattaattgtttgttgggaaattttagggtgtttttgttttaagtgtttgtttttgatatttttggttttgggtttttttcgttttttcgttcgtttgttttttttattttttttttttttttggtcgtttttttgtttcggggatggcgttattttttattttaaattaggattttgggttttagttttgttttttattttattttttttgtgattaatttttgattttttatgggtttggggtgtttgtggtcggaatattttttagatttttttttttagttttattttgttttattattcgggtattttttatttgggttttagttttttaaggggttttacgttttgtgtttatgattaggatatttatacgtatttagttcgcgtttttttttttagatattcgagttttggaagtttatagttattttagtttagtgtatagttataggttaggtatttttaatatttttattttttaggtgaggaaatcgaggtatcgagagttgggggttaggttagggggtttttttggggggagtagaggagtgtcggattttagaagaggttttgggggtttgagtcgttattgggcgttgttttttaggtttagtagggatagagtttagggggaaggtatttttcgttttggtttaatatatggatttttgattttgggaaagggattgagttaggggaggttttaggttattgtattatgaagttgtggggagttgcgggggtttttgggtttcgagttgggtaggtatagcgtggggattacgtgttgaggggaagaagcgtgttagggtggatgttttagtgtatatataggaacgtgaaatggttgagtcggtttagagaggtagcggagcgtgtgcggggtggtcggcggagaagtagtaggattttaggcgggagggtacggttttttgagaggtaggttgtaggataatatttagtgttttgatttaggaggttttattagggcgttttattgataaacgtatatttgaggtggagggtggttagtgtagaatgtgtttggtagtttttatagtaaaggagaattttagaattaatcgaagtgtttttttgaagggagttggtttcgttcgttttagtcgtcgtggagtaatatagttagtagttttttttttgttacgaaagttcgagattgaaatttaggatgaattgtttttagttcgggttattttagttttggggtggaggtttattgaggatggtcgagtaggggcgggtatttaggtaggtttagtagttttggcgggttgaggagaaggaggttagggtttagggaggtattcgtagagggatttggtaggtagagtttcggaaaggagggaattgtatagatagaaagttttagaaggttgtttgagggtttttgaggttttcggagtcgggcgttatgtatgtggaaggtggatttttagtatgggtgggattttagggggttgtggattttcggtttttgggatttataggtgggagataggagtttcgatcgttagggggagagttttggaggattttgggttgtcggtagttatttagtagggttcgttttgggagtggggttggattttttttgtaggaaaggttgggttggatttgttttaagaggttttagaattagttatacgaagattaaagtgaagagtaaggagttgaattttacgtagaatatagcgtagcgttttttaaaggaaggtttaaaataatttaataaaaatgttaggtgattaaagtcgttatagtataatgtttatatttaatgagaaattgttgttacgtttagatgtagggaagagtaattatgggaatgtgggttagtagtaataggtttagaagggtagttatagtggaattgttaggcgtggattttgaaatgataattataacgttttttaaaggaaaatgt

SEQ ID NO: 1809 - DNA, 6089 bp, Artificial Sequence
  chemically treated genomic DNA (Homo sapiens)
ttttatatgagattatatttgttttattttttttgatggttatagttttttattgtgaggtttttagtgacgaatagttttgttgttttaggtttttatgaatagatgtgatgttatagtaaattatattgtatttgagattttaagtatttgagtaagtatatttgttagatataatagtgttttttttttaaagagttagtaaagttttttttttttggtttttggttttttaggtatggttttttttttttttttttttttttgagatagagtttttttttgtcgtttacgttggagtgtgtagtggtatgattttagtttattgtaatttttgttttttaggtttaagtaattgttttgttttaggtttttacgtagttaggattataggtgtgcgttattatgttcggttaattttttgtatttttggtggagacggggttttattatgttggttaggttggttttaaatttttgattttaggttattcgttttttttagttttttaaagtgttgggattataggtatgagttatggcgtttggttttaggtatggtttttattggttgtttttttttttttattattttttaaatatttattatttggtttgtattagggatatatttaaaggttattaatgatttgtttttttagtgtatcgtttttgatttttttgtagaatttgattttattttttaatttaggttaaaatttttttttgtttgattgttatgggagatttttttttttttttttttttttttttttttgagatacggttttatttcgtagtttagattgtagtgtagtggcgtaattttggtttattgtaatttttgttttttaggtttaaacgatttttttgttttagttttttaagtagttgggattatgtacgttattacgtttggttaatttttgtatttttagtagagattgggttttattatgttggttagattggttttaaatttttgattttaggtgatttatttgttttagttttttaaagtgttgggattataggtgtgagttattgtatttagtttgggagataatttttgttttttttttatttttttaattatgtttgttttgttttttttgtttgttttttaaaggttagtaatttggtagaggttgagggagtggagttttttgggttagttgttttagtttttttttgttttgtttaggtagttttttttatttattttattatttggattttagaggaatttgacgttttgattaatatttaagtttaaaattttttttaggtttaagttttgtatttaaaaaaaaaagtatttttttaaatttttgtattttatttttatgattttagtatttattatggattattttaaaaatataaaaagaggttaggcgtagtggtttacgtttataattttagtattttgggaggtcgaggcgggcgaattatttgaggttaggagttcgagattagtttggttaatatattgaaatttcgtttttattaaaaatataaaaattagttaggtttggaggtacgtatttgtaattttagttattagggaggttgaggtaagagaatggtttgaatttgggagacggaggttgtagtgagttgaaattttgttattatattttagtttgggtgatagagtgagattttgtttaaaaaaaaaaaaaaaaaaggtatgagtagttgtataatatgttttatttgttttttgggtggatataaataaaataggtagggtttgaatagatagatataaatagaggttttatttggaaagatagaagattgatagtggttgggtattgtggtttatatatgtaattttagtattttgggaggttgaggtaggaagattatttgagtttaggagtttaagattagtttgggtaatatgatgaaattttatttttataaaaaatataaaaattagttgggtatggtggtatgtgcgtagttttagttatttaggaggttgaggtgggaggatcgtttaagtttagaaggtggaggttgtagtgagttttgatggtgttattgtattttagtttgggtaatagagtaatattttgttttaaaaaaaaaaaaaaaaaaaaaggttgggtgcggtggtttgtatttgtaattttagtattttgggaggtcgaggcgggtcgattacgaggtgaggggattgagattattttgtttaatatggtgaaattttgtttttattaaaaatataaatattagttgggtatggtggcgtatgtttgtaatttcggattatgaggttaggagatcgagattattttggttaagatggtgaaattttatttttattaaaaatataaaaataaaattagttagatatggtggtgggtgtttgtagttttagttattttggaggttgaggtaggagaatggtatgaatttgggagtcggagtttgtagtgagttgagatagcgtttttgtattttagtttgggtgatagagtaagattttgttttaaaaaaaaaaaaaaaaaattaaaaaaaaagaggaagattgatagtaattattgtttttggtaagagagaggaaatttagggtaggaaaaagatttattttttattgaaaaatttttggtattgtttgaatatttattttttaataatatgaattttaaaaataagaattattagtggttgggcgcggtggtttatatttgtaattttagtattttgggaggttaaggtaggtggattacgaggttaggagattgagattattttgtttaatatggtgaaattttgtttgtattaaaaatataaatatttgttgggtatgatggcgtatgtttgtaattttagttatttcggaagttgaggtaggagaattatttgaattcgggaggtagaggttgtagatcgtattattgtattttagtttggtaatagagggagattttattttaaaataaataaataaataaataaataaataaataaaaaattatttaggttaggtggtttatgtttgtaattttagtagtttgagaggttaaggtcggtgggttatttgaggttaggagttcgaaattagtttgattaatacggtgaaatttcgtttttattaaaaatataaaaattagttaggcgtggtggtatgtatttgttattttagttatttaggaggttgaggttagagaatcgtttgaatttgggaggtggaggttgtagtgagtcgagatcgcgttattgtattttagtttgggtaataatagtgaaattttagtttaaaaaaaaaaaaaaaaagaataagtttttaaaggttggggtgtttggaggatgaaataaagtagaagggatggtaggtttttttggtatattttttgggttttaagaaagtgtaaagaataagaaaaatataataaaaggaaaataataaatattaatgtatttattatttagtttaataaagaaaatataataaatataggtgaagttttttttgtgtttttttttttttttattatttattttagagataattattatattgaattaggagtttgttatttttttaaattttaattgagttttgtatttttgataaatatttggacgtttttatatgggtattttatttagtatggttaaaagtaaatttaagttgggtttagtggtttatatttgtaattttagcgttttgggaggtcgaggtgggtggattatttgattttaagtgtttgagagtaatttgggtaatacggtaaaaatttatttttataaaaaatataaaatttattaggcgtgttggcgtatgtttgtagttttagttatttggaaggttgaggtgggtagattatttgaatttaggaggtggaggttgtagtgagttgtgattgtgttattgtatttagtttgggagatagagtgagattttgttaaaaaaaaaaaaaaaggtaaatttaagtgatttatttatgtaaatagaaaaatgtattatataaatgtatttatttagaatttagggatcggtgaaataaaagatatcgtatcggtaggtttgtttgtaatttttgggatatattaggtgttagcggtgatgatttttggatgtttggattgtggatttttaaaatggttttatttgtttatttgtatttttaaatttttaataatggaatatagattattgtattattattataatattttaaatttattttttttttagttttttttttacgagtttttattttaaatgtttttttttttgttagtggtattgtgcgttttttttagtgtattatttttgatttttttgtagaattttttttttttttgagatagagttttgttttgttatttaggttggagcgtagtggtttgattttggtttattgtaaatttcgttttttgggtttaagtacgtttttttgttttagttttttgagtagttgggattataggtgtttgttattatgtttgattaatttttgtatttttagtagagacggggttttattatgttggttaggttgttttggaatttttgattttaagtgatttatttgtttcggttttttaaagtgttgggattataggagagcgttacggcgtttagtttatattagattattttttaaaatgtttttgtaaagttagggtttcgttatgttgtttaggttgattttgaatttttgggtttaagtaatttttttgttttttgatttttaaagttttgggattataggtgtgaatttttgtagttggttttaatgttaagattttaaggggtatagtatagattttgttttgtttatttttttggtattttttatagagtatagtttattaatagatgttttagaaattgttattgaatattcggtttgatgttgtgggtttgtttgtattttgtaattgttatttggttgagaaattttttttataaataagtagtttttgttttagatgtgatatgttttgatatttatattttgttttttattttatttaagatttaaatttagaaatttgaattagatgtggtatttaaatttttagttgtcgcgaagatatagatagttttcgtaagaatttacgaagtaggcgaagtttattgtttttaatattttagttgtttttgttgtatttgttttggaatttttgtagagatattatttgtttttttaggttgttttttttgtagtttttttgttttttttttgtgattatgttgtagatggttgggtagtgtttttaaaatgaatattttgatagtttgttgtatgtttgtatattttgttaatttcgatgtttttttaatattttttttttaatatgttagcgttattgtaatgtaagtaagtaatattgtttgaacgattatttattggtgtgaattattttgtttatatggattgtttatttagagaattaatataatgggtatgatggtgagtttttttgaattaaaaagagaaaggaagtaaggtagtgattttaatgtttatggaaataaagtaattatttggaattgaatttgatatgatttagtattattagtaatatagattttttttaaaaattagtttttttaattaagtgatatttagaatttaaaagttaatgtttattaattaaggtgattgaatggaaataatttatatttgattattttgttattaaaataatttataatttattattttagtaaaataattaagtatgatagtcgggtgcggtggatggtttatatttgtaattttagtattttgggaggtcgaggtgggtgaattatttgaggtcggtagtttgaggttagtttggttaatttggtgaaattttgtttttattaaaaatataaaaaattagttgggtatggtggtataggtttgtaattttagttattcgggaggttgaggtaggagaattgtttgaatttgggaggtggaggttgtagtgagtcgagatcgcgttattgtattttagtttgggtaatagagtaagattttgttttaaaataaataaataaataataataataaagtatgtgaatattatgttattagtttattatttgtttgatgttttttttataaagg

SEQ ID NO: 1810 - DNA, 6089 bp, Artificial Sequence
  chemically treated genomic DNA (Homo sapiens)
tttttatgaaaagaatattagatagataatgagttgataatataatatttatatattttattgttattatttatttatttattttgagataaagttttgttttgttgtttaggttagagtgtagtggcgcgatttcggtttattgtaatttttattttttaagtttaaataatttttttgttttagtttttcgagtagttgggattatagatttgtgttattatgtttagttaattttttgtatttttagtagagatagggttttattaggttggttaggttggttttaaattgtcgattttaggtgatttatttatttcggttttttaaagtgttgggattataggtgtgagttatttatcgtattcggttgttatatttgattattttgttaaaataatgaattatggattgttttgatagtaaaataattaagtatggattatttttatttaattattttaattaatgaatattgatttttaaattttaaatattatttaattagaagagttgatttttaaaaaaaatttatgttgttaatagtgttgaattatattaagtttagttttaaataattattttgtttttataaatattaaaattattgttttgttttttttttttttttgatttaagaaaatttattattatgtttattatgttgattttttgaataagtagtttatatagatagaatagtttatattaatgaataatcgtttaagtaatattatttatttgtattataataacgttgatatgttagaggaggagtattagaagaatatcgaagttgataaggtatgtaagtatgtaataaattgttaaaatatttattttgggagtattgtttagttatttgtaatatgattataaaaagaaaataagggagttatagaaagaatagtttggaaggataagtaatatttttataagaattttagagtaaatgtagtaagagtagttagaatgttgagaataatgaatttcgtttgtttcgtgggtttttacgggggttgtttgtgttttcgcggtagttaaggatttgaatattatatttaatttaagtttttaagtttgagttttggatggggtaagagatagggtgtaaatattagggtatattatatttgaaatagaaattgtttatttatagaagaaattttttagttaggtgatagttgtaagatgtagataagtttatagtattaagtcgaatgtttagtaatagtttttggaatatttgttaataagttgtattttgtgagaggtgttagggagatagataagataaggtttgtgttgtgttttttaagattttaatattgaggttagttgtaggggtttatatttgtaattttaggattttgggagttaaaaggtaaaaggattgtttgagtttaggagtttaaaattagtttgggtaatatggcgaaattttgattttataaaaatattttaaaaagtagtttggtgtaagttgggcgtcgtggcgtttttttgtaattttagtattttgggaggtcgaggtaggtggattatttgaggttaggagttttagaatagtttggttaatatggtgaaatttcgtttttattaaaaatataaaaattagttaggtatggtggtaggtatttatgattttagttatttaggaggttgaggtagggagacgtgtttgaatttaggaggcggagtttgtagtaagttaagattaggttattgcgttttagtttgggtgataaagtaagattttattttaaaaaaaaaaaaaattttataggaagattagaggtgatgtattaaggaagacgtataatgttattgatagaaaaagagatatttagggtaagagttcgtggaaagagggttgagaggaagataggtttggggtattataataataatataataatttatgttttattgttgaaaatttagaaatatagatgagtagataaaattattttaaaaatttatagtttaagtatttagaagttattatcgttaatatttggtgtattttagaagttgtaaatagatttgtcgatgcgatgttttttgttttatcgatttttgaattttagatagatatatttatatagtgtatttttttgtttatataaatggattatttgaatttgtttttttttttttttttgatagagttttattttgttttttaggttgagtgtagtgatataattatagtttattgtagtttttattttttgggtttaggtgatttgtttattttagttttttaagtagttgggattatagatatgcgttagtacgtttggtaagttttgtattttttgtagagatgggtttttgtcgtgttgtttaggttgtttttaaatatttggggttaagtgatttatttatttcggttttttaaagcgttgggattataggtgtgagttattaagtttagtttgaatttgtttttaattatattgagtgaaatatttatatagagacgtttagatgtttgttaaaaatgtaggatttaattaaaatttgaggaaatggtaaatttttaatttagtatagtgattatttttgaggtaagtggtggggaagaaggggagtataaaaaaggttttatttgtgtttattatattttttttattaagttgagtggtggatatattgatatttgttgttttttttttgttgtattttttttattttttatatttttttaaggtttaaggagtgtgttaaggaaatttgttattttttttattttattttattttttaagtattttaatttttaaaaatttattttttttttttttttttttgagttggagttttattgttattgtttaggttggagtgtaatggcgcgatttcggtttattgtaatttttattttttaggtttaagcgattttttggttttagttttttgagtagttgggatgataggtgtatgttattacgtttggttagtttttgtatttttggtagagacggggttttatcgtgttggttaggttggtttcgaatttttgattttaggtgatttatcggttttggttttttaaattgttgggattataggtatgagttatttagtttggatgattttttatttatttgtttgtttgtttgtttgtttgttttgagatggagtttttttttgttgttaggttggggtatagtagtgcgatttgtaatttttgtttttcgggtttaagtgatttttttgttttagttttcggaatagttgggattataggtatgcgttattatgtttagtaaatatttgtatttttagtatagataggattttattatattgggtagaatggttttagttttttgatttcgtgatttatttgttttggttttttaaagtgttgagattataggtgtgagttatcgcgtttagttattgataatttttgtttttaaaatttatattattaaaaaataagtatttaaatagtgttaaagattttttaatgaaaagtaagttttttttttattttggatttttttttttttgttagaggtagtaattattgttagtttttttttttttttttggttttttttttttttttttgagatagaattttgttttgttatttaggttggagtgtaggggcgttattttagtttattgtaagtttcgatttttaggtttatgttatttttttgttttagtttttagagtagttgggattataggtatttattattatgtttggttaattttgtttttgtatttttagtagagatggggttttattattttagttaggatggtttcgattttttgattttatgattcgggattataggtatgcgttattatgtttagttaatatttgtatttttagtagagatagggttttattatgttgggtagaatggttttaatttttttatttcgtgatcgattcgtttcggttttttaaagtgttgggattataggtgtaagttatcgtatttagtttttttttttttttttttttttaagatagggtgttgttttattgtttaggttggagtgtagtggtattattagggtttattgtagtttttattttttgggtttaagcgatttttttattttagttttttgagtagttaggattacgtatatgttattatgtttagttaatttttgtattttttgtagagatgagattttattatgttgtttaggttggttttgaatttttgggtttaagtgatttttttgttttagttttttaaagtattgagattatatgtgtaagttatagtgtttagttattgttagttttttgtttttttaaatagagtttttgtttatgtttgtttatttagattttatttattttatttgtatttatttaggaggtagatagagtatattatataattgtttatattttttttttttttttttttaaatagggttttattttgttatttaggttggagtgtggtggtaaaattttagtttattgtaattttcgttttttaggtttaagttatttttttgttttagtttttttagtagttgggattataggtgcgtgtttttaggtttggttaatttttgtatttttagtagagacggggttttagtatgttggttaggttggtttcgaatttttgattttaagtgattcgttcgtttcggttttttaaagtgttaggattataggcgtgagttattgcgtttggtttttttttgtatttttaaagtagtttataataaatgttaaaattatgaaaataaaatgtagaaatttaaaaaaatatttttttttttaaatgtaggatttgagtttaggaaagattttgaatttagatattgattaaaacgttaaatttttttggggtttaggtggtgaggtaagtgggagaggttgtttaggtaggatagggagaagttgaagtagttggtttaggaggttttatttttttagtttttgttagattgttgatttttggaagataggtaaaggagataggataaatatgattagagaaatagggagagaataaaaattattttttaggttgggtgtagtggtttatatttgtaattttagtattttgggaggttgaagtaggtggattatttgaagttaggagtttgaggttaatttggttaatatggtgaaatttagtttttattaaaaatataaaaattagttaagcgtggtggcgtgtataattttagttatttgggaggttgaggtaggaggatcgtttgaatttgggaggtagaggttgtagtgagttaagattgcgttattgtattgtagtttgggttacggagtgagatcgtgttttaaaaaaaaaaaagaaaagaaagaaaaaaaaattttttataatagttaagtaaggagagattttagtttgagttagggagtggagttaaattttataggaagattaggggcgatgtattaaagaagtaggttattgatggtttttgagtgtgtttttgatgtaagttagatggtagatatttaaggagtggtgaggaagaggaggtagttaataggagttatgtttgaggttaggcgttatggtttatgtttgtaattttagtattttgggaggttgaggagggcggataatttgaggttaggagtttgagattagtttggttaatatggtgaaatttcgtttttattaaaaatataaaaaattagtcgggtatggtggcgtatatttgtaattttagttacgtgggagtttgaggtagggtaattgtttgaatttgggaggtagaggttgtagtgagttgagattatgttattgtatattttagcgtgggcgatagagggagattttgttttaaaaaaaaaaaaaaaaaaagggaattatatttgggaagttagaagttaggggaagaaagttttgttaattttttggaaagaaaatattattgtgtttgatagatatatttgtttaggtatttaaaattttaggtataatgtagtttattgtgatattatatttatttataagagtttagagtaatagaattgttcgttattgggagttttataatggaagattatggttattagaaagaatgagatagatgtggttttatatgaaa

SEQ ID NO: 1811 - DNA, 6167 bp, Artificial Sequence
  chemically treated genomic DNA (Homo sapiens)
tttgttcgtgattttaggatatgagttattaaggggttggttcggtatatttagggcgttgagataagtaggattgaaggataagaaaaggttatttgttttggttgtgggttagttttaagtagggaaggagtagggttttcgttgtttaagtaattttgtaagatagatttttattgggattttgaggttaggttagaaggagttggttttgtggttggttttgaaagtttattttaaaaagaatattgtatggagatttttttatggtggaaagagttttttttagtataattatagtttagttttttaaattgtttttagttatatatagtatttgttgtattttaattttttgtacggttttttagtaggtgttttttagttattgaggagtttattaaaaagttagatattaggtttttaatagatatgggcgtggggtttaggattttgtatgttttataagttttttagatgatttttatgttggttgaagttggaaagttatttttttaaaagatttattagaatgttcggtatatagtaggtgtttaataattgttagtggatagatcggttgttttcgtatacgtggtttgttcgtggttttgtttttttttattttcgtttgtaggagtgtagttatttatttattggggtgggagatgttaggggatttttgagggttgtagattgagttgggaagtgaggagaggttttagggagtgtttggttaagagtttagattttgtatatgtagtttttgagttgaggatttgagggttatagttttatttttgtttgaagattgtgttgttaataaggagtaaatggggatttttttgcgttgtggggttgggagtttattagatgtatggtttgggagtttgggttgggtatatagggtttaggagtgattgggttggattgggtttttgagttttgattcggatatttatgtatttatttatttatttatttatttatttttttaagtttttatttttttatcgttttttgcgtattttttattttgtatttggtttttatttattttaattttattaagtttttcgttaggtattttttgggttagaatatataggagatgtataagaagggatttaattaagggaaatagagggaattaagagtaagtttttttattttcgggtattatatagtttagtagtgtgagagttttatgttgagaagagttttttggttatggagaggttattaaattaggtttgaattcgttgtatttcgtattagttggataagtatattataaagtttgttttttatttggtgtaagataaagtgtgtaagttatttttttataatcgttagtattataattattaagagaggtgagggtcgtgtaagtaattaatatcggagtaagtgttatgttaatagtttgtagacgtattatgttattttgtttagtttgttggggtgtggttaagggtggttttataggagagtacgagtggagttgtgattggaaggataagtaggtgattattaaataaataaagaggaaaatatattttaggtagaggaatttgtatggataaaagtatggaggtgggaatttagggttgtttcgaatgtttagggagttggtttgtagagttggggttcgtggtggggttttgtttggtgggttagttgggttaggatatgaaggtttttagtgttttgtggaggaggttgaaattagttttaaaggttatggagagttatgggttaggttgttttttaattttggcgttttggacgttttgggttgggtaattttttgtggatgaggttgttttgagcgttgtgggatgtttggtagaattttggtttttatttgtgagatgttagtagtatttttttttgttttttgtagttgcgattatttaaaatgtttttagatattgttaaatgtgttggggtgggagagggggtaaaatgatttttgggttgagaaattttgggttaggagagtggtatgagtggttaatgttttgtagggttgggtttgattattttacggaaaggtagattcggggatagagtttgaaggttagagttttatcgggaggtttagagcgttatgggtgggagatagagttagggttgggttgtggggtagaaggagagagtttaggttttttatattgtttttgttgttattgagttttattatattttttagtggtaggtataatatggtgagtgttaagattaattttttttttatttatattgaagaaaaagtttcggattacgtgtgtaggttatgtggagagataaattggtttagttagaattggttatcgttatttttagtttaaataagatgtggggttggagaagttaagagagaggattttggggaaggagtcgttattgggttgagtgttttttgttgttttttggagcggagagggtatttttttttattttgggttaagtaggaggggatacgagggagttatttgggggttttatattttaggagtttaaggattataatataggtggaagatttttgtttattttgtttattgttgagtttttagtattttagggttggtatatagtaggtgtttaataaaggagtttgtggttggatggatttgagttagtattgttggagtgagttagggtgtacggagagttagttgggttgttattggtgcgtagtaaagggtaggtaattatggattttagcgaggaggttagtttgattatttttattttaaagtgttttttagtaggtaaggcggttttagtaggagaagttaggaggatattattttgtaggagttgaaggggaggtggtgaattgtggttagtaggaggtgtaggtattttaggtgttggggagttgtggttagtggagttagtaagaaggtttttaagaaatttgtattagagttttagagagaatgagttggaaattgtttttaaagtttttagtgttagatgggtgataattttggttgttatggaatattgtgtttttttttttttaaatttttatttttgggtttgattttggagttaagaattgtatttggtagagtttagagagaagtcgtttgtttttaagtttgggtcggtttggagaaggggagaagttttatgttgtatagagattaagtttgaattcgtttttaggatgggatttaagtttgggaggatttttatttttaggaggtgatggtgttatttattgggatagggaaattggtaggaggagtcggttgttgagggttgggggtgtagatagtttgttggatttattggttttgaggtgtgtggaggataattagagagaattattgttttttgtttttacgaggtgatattttttttttgtttttagttttattttagggattaaggagtttttggagttgtttttaggtatttttataagggttagaagagttttgtatgtttgtttagcggttttgtagagttaaggttgtgggttatattagttatatttttagcgtggtttatgttatagaaatatgtggaaattaggtgattttttagttttttggttaggaggtggggttttttatttttagggagttattttttagttttttatttagtatttagtatttagaagtattatttttgtaggttttattgtggggttggtggtcgggagtaagggtttttgtatttttttaggtagtttgtagtgaggaaatagggaatagaatagttttttgttatttagtttattttaatttttagaaatgttttatgtgttgggggttaggattttcgtaatttagggttggaggaatgtgttttggtttcgtagggttggttttgtattagggttggtatttaaagtggggatggggggatagattgtagttggaatgggtgttcggttatgatgtaaattttggggaagttagtttttttgggtttggttttagtagttttttagggttttgtagtttttttggtgatatttttttttagtttttgtttatttgttttttgtttgggtaggagatttgagtagggaagtgtagagttttttttttgtgagaaggttggatgcgtgtttaaggataaatgaatacgcgaagagtagtaataatagttaagatttataaatgtttattgttatatatgtagatatttatttaagtatatataaagtatagattgtattatgtatattatatatttttaaatttttagaatagttttatgaggttagtttagagatttagatttaggtggtttggttttagagtttaaataggtcgagtgtagtggtttatatttataattttagtattttgggaggttagaggcgggaagattatttgagggtgggaagaatacgtgagtttaggagttcgagattagtttggataatatggcgaaattttatttttataaagaaattagtttagtatggtggttcgagtttgtagttttagttattcgggaggttgaggtgggaggatcgtttgagcgtaggagttggaggttgtagtgagttatgggtgaaagagtgagattttgttttaaaaaaaattaaaaaataagaattaaatatatttaaaatagagtttaaataagtgaatgatttagaatttttttggtttttttaaagtagttgttaattttgggggatgtttttttaaattagtgttttatttttacgggatagggaagtttgtgggagttgggagggtaggtggaggtcgggtaggtggagatggtgattcgaagaggaggggacgataggaggaggttgaggggttattcgagtgttgggagtgacgttggaggtatcggtttagcgatgttggagtggtcgggtcggaggtttagtagtagcgtttggggaggggcgtgggggaggcgtgtttaaggtcggttggtttcgtttcgtttcgtcgtttggtttttggttcgttggggcgcgggttttcgtttttagtcgagggttagcgagcgtagcggagtttggagagaaggcgttgggttgcgagggcgcgagggcgcgagggtagggggtaatcggatttcgttcgtatttatggcgttcgtcgtcgtttgggtcgcgttggtcgtcggattggagttttgggttgcggcgtacgttttgttcgtttaggtgggtgattcgcgcggtttacgggggatagtcgtttcgtatgtttattcggttggtgcgtagttttcgggtgttcgggtcgcgttttttcggggcgttgttacgggttgggaggttgggagttttagtcgtcgttttttattcgtattagatacgcgcgtttttggggattcgttggggatttcgggttcggtatacgtgcgttcggggtataattttggttttcgaagttttttttattcgcgtcgtgataggggcgtattttggttttttcgcgagcgtaggtcggggtatttggggttgagtagcgggttttgggtagattttcgttagattcgggatttttttttttttatttcggcgattgtcgcgatagttttttttttttacgcggtggagaaggggttgtgtcggggcgttgttttattgtttacgtcgggtattttttttaaaagattttttttttttttgggcgacggtttttcgattttttagaaatattagggttttgtgtttgaagagtaggattaggtgtgtgttaggtttattgagggtatagttggagggcgagttgtttgtttgtttttttcgatgcgttcgggggttattgtagagtttgttttttgcggtttttggggatagggtaagcgagggaggtttgggttggtaatcgagtaaggtaaatgaagttttcgggggtcgtaggaaaatggagatagtagaaattttagggtttttatttaatatgaacgttatttttatagtagtaacgggcgtataagggattgtgtattttttgtttgtttttgattgttttttggtttggtaatataggataattttatttttgttttattgtttttatggtttggtaagataagataaattattttttagagaaggaaaattgaggtttagagaatttgtattttatggaagggtttggggggaattttttttttaaagggggttttttttgttttcggtttttgtgttttga

SEQ ID NO: 1812 - DNA, 6167 bp, Artificial Sequence
  chemically treated genomic DNA (Homo sapiens)
ttagggtataggggtcgaaggtaggagaggttttttttggaggaagagttttttttagatttttttatgaaatataagttttttgagttttagttttttttttttaaaaaatggtttattttattttattaaattatggagatagtaaaataaaaatggggttattttatgttattagattaggagatagttaaaaataggtaaagggtgtatagttttttgtacgttcgttgttattgtgggagtgacgtttatattgaataggagttttagggtttttgttgtttttatttttttgcggttttcggagattttatttgttttgttcgattattagtttagatttttttcgtttgttttgtttttagaggtcgtagaaaatagattttgtagtagttttcggacgtatcggaggaagtagataggtagttcgttttttagttgtgtttttagtggatttgatatatatttggttttgttttttagatataggattttggtatttttaagaaatcggaaaatcgtcgtttagaggaaaaggaagttttttgaagagggtgttcggcgtgggtagtggggtagcgtttcggtatagttttttttttatcgcgtgggagggaagggttgtcgcggtagtcgtcggggtgagggaagaggggtttcgggtttagcgggggtttgtttaggattcgttgtttagttttaaatgtttcggtttgcgttcgcggaggaattagggtgcgtttttgttacgacgcgggtaagaggggtttcgggggttagagttgtgtttcgagcgtacgtgtgtcgggttcggagtttttagcgggtttttagaggcgcgcgtgtttgatgcggatggggggcggcgattgggatttttagttttttagttcgtgatagcgtttcgggagagcgcggttcgggtattcgaaggttgcgtattagtcgggtggatatgcggggcggttgtttttcgtgggtcgcgcgagttatttatttgggcgggtaaggcgtgcgtcgtagtttagagttttagttcgacggttagcgcggtttagacggcgacgggcgttatgggtgcgggcggggttcggttgttttttgttttcgcgttttcgcgttttcgtagtttagcgttttttttttaggtttcgttgcgttcgttagttttcgattgaaagcgaaagttcgcgttttagcgggttagaggttaggcggcggggcggggcggggttagtcggttttggatacgttttttttacgtttttttttagacgttgttgttgggttttcgattcgattattttagtatcgttgggtcgatatttttagcgttatttttagtattcgggtgattttttaatttttttttatcgttttttttttttcgaattattatttttatttgttcggtttttatttgtttttttagtttttataggtttttttgtttcgtgagggtgaggtattaatttggaaaaatattttttaaagttgatagttgttttaggggaattaagagaattttagattatttatttatttagattttattttaaatatatttaatttttattttttaattttttttgagataaggttttatttttttatttatagtttattgtagtttttaatttttgcgtttaagcgatttttttattttagtttttcgagtagttgggattataggttcgggttattatgttaggttgatttttttatagagatggggtttcgttatgttgtttaggttggtttcgaatttttgagtttacgtgttttttttatttttaagtgattttttcgtttttggttttttaaggtgttgggattataggtgtgagttattgtattcggtttgtttagattttagagttagattatttgggtttggatttttgaattgattttataggattattttaaaaatttaaagatatgtaatatatataatgtagtttgtattttatatatatttaagtaagtatttatatatataataataggtatttataaattttggttgttgttattatttttcgcgtgtttatttatttttaaatacgtatttagtttttttatagggagaagattttgtatttttttgtttaagttttttgtttaggtagggggtagatgaatagaggttgggagagaatgttattagggaagttgtagggttttgaggggttgttgagattaggtttaggagagttggtttttttaggatttatattatgatcgagtatttattttagttgtaatttgtttttttatttttattttgagtgttagttttaatatagggttagttttgcggggttagagtatatttttttagttttggattacgggggttttagtttttagtatatagggtatttttaagggttggggtgggttgggtggtaggaggttattttgttttttgtttttttattgtaggttgtttgaagaggtatagagatttttgttttcggttattagttttatagtggagtttgtaaggatggtgtttttaggtgttgagtgttgagtgagaaattgggaagtgattttttggggatggaaaattttattttttgattaggaggttgggaaattatttggtttttatatgtttttgtgatatggattacgttgagggtgtggttggtatgatttatagttttaattttgtagagtcgttggatagatatgtagagtttttttggtttttatgagaatgtttaggagtagttttaaggattttttgatttttaaaatagagttgaaggtaggagggagatgttatttcgtggaagtaggggataatagttttttttagttgttttttatatattttaagattaatgggtttaatagattgtttgtatttttaatttttaataatcggttttttttgttagtttttttattttagtgaatggtattattattttttgaaggtggggatttttttaggtttaggttttattttgggaacgaatttaagtttaatttttatgtaatatggggtttttttttttttttaggtcgatttaggtttgagagtaggcgatttttttttgaattttgttaagtgtagtttttgattttagggttaggtttaggggtgagggtttgggaaggaaagggtatagtgttttatggtagttaaagttgttatttatttggtattggggattttggggatagtttttagtttattttttttggggttttagtgtaggttttttggagatttttttattgattttattggttatagttttttagtatttgaaatgtttgtattttttgttggttataatttattattttttttttagtttttataggatggtgtttttttggttttttttgttgaggtcgttttatttattaggaagtattttgggatggagatggttaggttggttttttcgttggggtttatggttgtttgttttttgttgcgtattaatagtagtttagttaatttttcgtgtattttggtttattttagtaatgttggtttaggtttatttagttataggtttttttattaagtatttattgtgtgttagttttggagtgttggggatttagtagtggataaaatagataagaattttttatttgtgttatggtttttaaatttttgggatatgaagtttttagatggttttttcgtatttttttttgtttggtttaaggtaagaggaagtgtttttttcgttttaaagggtagtagggggtatttagtttaatggcgattttttttttaaaatttttttttttggtttttttaattttatattttatttaggttggaggtggcgatggttagttttggttgaattagtttgtttttttatatgatttgtatacgtggttcgggattttttttttagtgtgggtgggggggggattgattttgatatttattatattgtatttgttattggggaatatggtaaaatttagtgatagtagaggtagtgtggagggtttggattttttttttttgttttatagtttagttttggttttattttttatttatgacgttttgggtttttcgatgaggttttggtttttaggttttgttttcgaatttgttttttcgtggagtggttaggtttagttttgtaaagtattagttatttatgttatttttttagtttaggattttttaatttagaggttattttatttttttttttattttagtatatttggtaatgtttggagatattttgggtggtcgtagttgtagggggtagggagaggtgttgttggtattttataggtagaggttaggattttgttaaatattttataacgtttaggatagttttatttatagagaattatttagtttaaagcgtttagaacgttaaggttgagaagtaatttagtttatggttttttatggtttttagaattgattttagttttttttataagatattggaggtttttatgttttggtttagttggtttattaggtagagttttattacgaattttagttttataggttaattttttgggtattcggagtaattttgagtttttatttttatgtttttgtttatgtaggtttttttgtttgaggtgtgtttttttttttgtttgtttggtgattatttatttgtttttttagttatagttttattcgtgtttttttgtgaaattatttttgattatattttagtaagttgggtaggataatatggtacgtttatagattattagtataatatttatttcggtattagttgtttatacggtttttattttttttagtaattgtgatattagcggttatggaaagatgatttatatattttattttgtattaggtggggggtaagttttatggtatgtttatttagttaatacggggtatagcgggtttaaatttggtttggtggtttttttatagttaaggggttttttttagtatggagtttttatattgttgaattgtgtgatattcgagggtagggggatttgtttttggttttttttattttttttgattgagtttttttttgtgtattttttgtatgttttggtttaggagatatttaacggggggtttgataaagttgaagtgaataaggattaaatataggatgaagggtacgtaggaggcgatgaagggatgaagatttgagagaatgaatgaatgaatgaatgaatgggtatatggatgttcgggttaaggtttaggaatttagtttagtttaattatttttaggttttgtatatttaatttagatttttaagttatgtatttggtagatttttagttttatagcgtagaaaagtttttatttgttttttgttgataatatagtttttaagtagagatggaattgtggtttttaggtttttaatttaggggttgtatgtgtagaatttgagtttttggttagatattttttggagtttttttttattttttagtttagtttatagtttttagaggttttttgatattttttattttagtaggtggatgattgtatttttgtaagcgagggtggaagaaggtagggttacgggtaggttacgtgtgcgaggatagtcggtttgtttattgatagttattgaatatttattgtgtatcgggtattttagtggattttttggaggagtggttttttagttttaattagtataagaattatttggaaggtttgtgaaatatgtagagttttgggttttacgtttatgtttgttgagggtttaatatttggttttttaatggattttttagtgattgaggggtatttgttgagaaatcgtatagagggttgaggtgtagtaggtgttgtgtgtggttgagggtagtttggaaggttgagttgtggttgtgttgggaggggttttttttattatggggaggtttttatgtaatattttttttggagtgagtttttagagttagttataaagttaattttttttgatttggttttagggttttagtgggaatttattttatagggttgtttggatagcgggaattttattttttttttgtttaaggttggtttatagttagggtaagtaatttttttttgttttttagttttgtttattttagcgttttgaatgtgtcgggttagttttttgatgatttatgttttaaaattacgaatagg

SEQ ID NO: 1813 - DNA, 8524 bp, Artificial Sequence
  chemically treated genomic DNA (Homo sapiens)
taggaattagttatatggttggtttatagttaaagttaataggttttttgtattttgtattttagggagttagatagtttttttttaggtttattaaaggaggtagaattcgttttatatttatagtttaaaattttaatttttttttttttgtttatatagtaattttggggaggaaggaggtttttggttttattgagtagttaggtgtttataggagaaggttatttttttttttttcgttaagggtggggtagtggaaatttaaaggaagttttttatggagattgagaggtgattgtaagtatggggtgttgggatgttgttttttgatgggtggtggattgtgggtagtggattgtgtttatttgagtagggtagaggagaggtgagaagaggggtattgtggtgtagttgattggatgcgtgagtttttttaggttaagtggacgttgtagtaattagtttggttggagtatttttttggtggtttatttaagtaggttgattgttgggtaagagggttaggatattggtaggttttaggtggtggggtggggtaggcgaggttaagtttgggttggatgattttgtgagagaattgtgtagtggagaagtcgttaaggaatttatttatttgtttatgagaaattatatatggatacggggttggggtgggggtggtagggtatgttttttaattagattattcgttttatttttattaagtttttttttttttagtaggtagggttttggtttaagttaatttttgaatgagtaagagagaagataaaatgagatttaaattgagtttgagaataaaggtttaaaggatggaggtttaataatagaaagtgatttaaaagtaatgtaatttgtttaaaatgttattaagggatggaaaagggagatttaatatagtatggttgaaggtagagattaggggagaaaatttttattattatattttatagagttgaatcgttttaatatattggttttataagtaaatagaaaaattgaaatatagtgtggtcgggttagagttttgtttgggtaaagttgttttaggttttgagagagtatagggggataggttggttgttagagagagatttttagaggagggttgtttgagatggattttgaagggtgagaaagagttggttaggtgaaaggagagtggtagtgggaagggagttttttaggtagaggtgatagtacgggatatttggggagtggggttggagtatgaaggggaaggtaggaaggatgtttagagatgtatattaggaggtttatggttttgtagttttgtaagtttaaggggtgagggttttggagagttattttaaattttggagtaatataattggatttgtatattagatagaatattttggatgttagattttggtagcgttgtggatattggatttttaggtatgttttttatttatttatttggtattgtgaatttatttttttataaaggttattttatttttgagtttttaaaattttggttttttatttttttgaatgttttttgttttatttttattgtagaattttttattgttttttttttgattggttttcgaatattgttatttttttttaaattattttttcgttttttttttttagtatattttttttagtttaataagattttaggttttttttgggtttgtgtttattagtatatgtttttttaggatatgtatatattaaaatattttttttttattttatttggttttcgttttatggggtaattcgaaggttaatatttatttttttatatattaatttaagttgttttaattgttgttatgatatgttttatataatataattaatgttttaattttgtgtatttgtttttttaggtagttttgtgaaaggtttaattttggaattaagtaaataaagaataagtaatggttgaaattattatagtaatattttttttttaaaggatttaaaatcgtgtttgttttttttaaagtatgttaaaaagggaaaagatattttaattttttttttattttgggtatgtttgggtggttttaatgaagttttttggattttgattttaagagtttttggttttttggtatttgattattatttttaagaggttattgtagtttgaggtttgtgttgagattattagtttcgtattttttgttattaattttttgttatgattggaggttgtatttaggatgagaagttgttgaatttatttatttatttatttatttatttagtatttatatattggtgttttattatgtatttaggattgggatagatttagttttgtttttagggagtttatagttaaatgggattaggtagaaggagttatgagttggtatgttaaatgttgtggtaatataggggaggaggtagggtgggatagagtatttatttttgttttagggagttggggaaggtgtaagaggaggtaatatttaaattgtttaagaaaggagaaggaaaggaaggaaatattaagagtaatgagataaatcgtaaggaaaaaagattgtgtgtttgggaagtggggagaggttgaagttagtgtgtatgggaggacgtggtaggaagtaagtatagaaagagaggttggggttgagtgaggaagggtgtgttttgttaggataagaaatttggattattttgagggtgtagggaaatttaaagaggtttttatgtaggaaagtgttttagtcgattagatttggagtttattaagagaatcgtagtagtgtaaagagttgtttggtatatagtaggtgtttaataaattttgtggaatgagagaggttgttgggatagtttagatgaaagatggtattttttgaattagggtagtggtagaggtgatagaaaataagggatggattttagaggtagaatttataagatttgtaaatgtgtttttaatagtagaagttatgagaatggggttagaagtgttttttttttttattttttttgatttgtgaggtttggttttttgtttttttttagaaattgagagtttggagggttattattttaatcgttgtttagtttaagtttttaagttttttttggagaaaaatttaggtttaagggaatatagttttttagaggtagaggttgtattagaatttaggtgttttatgttgtaaagtagagtgttaatattggtttaagaatattttgagggttaggtgcggtggtttatgtttgtaattttagtattttgggaggttaaggtaggcggattatttgaggttaggagtttgagattagtttggttaacgtggagaaatttcgtttttattaaaaatataaaaattagttgggcgtggtggcgttagtttgtaattttagttattcgggaggttgaggtaggagaattgtttgaatttaggaggtagaggttgtagtgagtcgagattatgttattgtattttagtttgggtaatagaatgagattttgttaaaaaaaatttaaaaattaaaaattaaataaatatttaaaaaataaaacgaaataaaaaataaaaaaataaaagtacgtttttagagtttatgaatttaggaaatgtaggtataagtgtgtgtgtttttgtaaaatgagagggtttcgagttttttaatatatttaaagtgttttatgatgttataaaaggttggtttattttttttttttttttgagatggagttttgtattgtcgtttaggttgaagtgtagtgatgtaattattgtaattatggtttattgtaattttgattttttgagtttaagcgatttttttgttttagttttttgagtagttgggattataggtgtttgttattatgtttggttaatttaaaaatttttttattttgtagagatgggggttttgttatgttgttaggttggttttgaatttttggttttaagtaatttttttttttggttttttaaagtgttagattataggcgtaagttatcgcgtttggtttttatttttatttttatttttatttattatttattttttttttttttgagattgagttttgttttgttttcgaggttggagtgtagtggtacgatttcggtttattgtaatttttgtttttgcggtttaagcgatttttttgttttagtttttcgagtagttgggattataggcgaacgttattatattcggttaatttttgtatttttagtagagacggagttttattatgttggttaggttggtttcgaatttttgattttaagtgatttgttcgtttcggttttttaaagtgttggattataggcgtgagttatcgcgttcggttttatttttaataaatgtttgtttttaggtgttgggtgggaggtgggatggaatggaatgaggtgaggacgtatggatgtatggatgaatggatgggaagttgagacgacgcgtttatacgagggaattttttttgaaagagagcgaaattttgagttgggaaatttttttttgaaacgtttttttatattttagttgtggttttttcgttttttgcgtggtggtgtggggggaatttttttaggttttttcgtagtggagtttttttcggttttgttaggatatttagaggtagcggagagcggggtagggaggggaaaatcgtgagggtttttgtggtaggttttagtatttatgggattttttttcggtcgtaggaagtaggttagtttttagttcgtttcggtttggtttttgtgggatttgggggtaaagaagaagagttgtttttgggattatgttttttttcgtatatagtaagatgcgtttttaaattttcgggggaattagatttgtgggaatgttttggggaaatttttgcgcggtgaattgttgggggtttcgttttttcgataggtggatcgcgattggtttttgaagatttcgttttttttttgggcggggttaaggttggggtaggggagttagtagaggtttcgttcgggcgtttagtggttttgtcgtttggttttatttcgttatggttcgtttgtttttgtagtgcgttttttggggttgtttgttgatcgttgtgagttgtttttgtttcgattagacgggagttgggagtggggaatgagaaggaaagggaaggaagatttcggggaagaggtttttttggttgatttttgtgggggtaggagggtgggtgggagttgggtaaggtgttttcgtttttggttgaatggggtgggttgttttttttttttttcgggttggggtttcgggagcggtttataggggtcgtttagggaaggtattggttgtttaagcgtgtttagacggtttggacgggtttagggagttttagaggttggttatatagagattggtagggggtttagagggcgggaagtgaggcggattaagggaaggggcgggtttggttcgttttttgttttttttttattgtggatagatgttagtttttgtaagtagttattatttttttgttagttggggttgtttttttttagggtattttgtgggaataagagatgggtgtagaggtttaggtatttttgtgagaaggtaaggagtttttaatatcgttttttatttcgaatcgtattttgggtgttttaatttaggaggaatttttagggttttgttttttttttttgaatttaagatgatataggagatttttggggagatgaatagtttatgggatataataaagggttaggagattagagttttggttggttttgatagggttggtgattagagggttggagaaattaggggtttttttaggtattagaggggtttagagttaattaagtatattttcgggatttttagaagtttatatttgatttattttttgtttaaatgtatttttgtagttttttattttggaggttgggaattttttaagtatttggtttttttattttagtttttttggtttttttttattttagagggttgtagatttttgtttgaagtttgggtaggaatgatttatggtattaaggaaagtaagggaagtagtaagggaagagagggagtggggaggttgttttggttttatagtttttatttttatttgaagtaatggtttttagggaatagggaggtagggggagggcggagttggaaagaggtaaaggggggtttttgtggtaggagtggagaaagagttagaggaggtggggtgaagggtgtgatttaggttttttaagagtagagtttgtttttataatttttaattttggttttaggtagaggttgggttgtgataataatgttagaagttatttattgagggttttttgtgtgttaggttttgagttaaatattgtttgttttttttgtttgattttttataatttttttattatatagatgggtaaattgaggtttagaaagggggattgttttgttaaaggttttatagttagttaatggaagaatttggttgtgaatttatatttgtatgattttcgagtttgttttttagatagtgagagtttttaagttttggttttgagttgttttgtggtagaaggattagaattatggggagtgagaattggagattgatagatttttaggggagcgttttattttttatgtgtttgaagatggtattaaggatttttttatttttgggagtgtgggagttttacgtttataggatggtgttttgtaatgagttggtggggggtagtagttttttttatttttttttttattttgggtaagatatatttttgtaagtaatttgttgagatatttaggttgaatgagagttattagttaggtaggattttggatagttagttaggtagtcgggttgtttgttatatattatgtaagtagaaataaatgaatgatgattaaaattgttatttaatgagtatttattatgtttttgatattgtgttaggttatatatatgtatttttttttattttcgtaatttaatttgtagggtaggtattattatttttattttagagatagagaaattgaggttaagagaagtaaaataattagtaagtgttataaagttaggattggagtttaaagttgtttgatttttaaatttgtgttttttttattggttgtttttaaattgtgggatagttttaaggagtatatggatatagaattaaatatatatttattttatagtttttttaaaaattttttttatttttttaaagaggaagtttttggagttagaatagagttaatgttttttaaaggtttgttaattttttttttaaaataaaaattaagagtaggtttgggagggtttttaataagtaaataattagttgggttttaataattttgttttgtttttttagaatttatttttagggttattttttatttatgagaagtgatattggtttttgttttttggtaatgatgtgaggtttatatttaaagtaaatgtatcggttaggtacggtggtttgtgtttgtaattttagtattttgggaggttaaggtagttagattatttgaggttaggagttttagattagtttggttaatatggtgaaattttgtttttattaaaaatatataaattagtcgggtatagtggtatatatttgtaattttagttatttaggaggttgaggttggagaattgtttgaatttaggagatagaggttgtagtgggttgagatgatgttattgtattttagtttgggcgatggagcgagattttgttttaaaaaataaaataaaagtattgaaattaataataagtaattaatagtatgggtggtatttggatgtagtaaaatggtgaagatgaaatataagttgatggagagaggagtattgagatttgagtttttatttggattttgttattgtgagattttgggtaagtgatttttttttttggtgtttagttttaattatttgtaaaatgaaagtgtgagtttatttttttagttttatattttagtattttatgagggaagggttggatgaatagatgatgaggagttggaggaagaaaatatgatgggttttggaaaggagtaggaagggaagtagaagaataggaggaagaggttaagtgttaaatatagttttaaatagtattgggattagttgaagttagttagttttaggattttaggggagttgttggagtttttatattttatgggatttttgggaagaggaatgatttaggtattaagttttaaggaattttgttttgtttagagaatattgtgagtttatagtattattgttttgtaaaaatattagaatgattttttgggtgcgattataattagtttagttgataatttatttgaaaataaatatgttaaatattatgtaggttttattttttgttttgatttgtattttagtttgtagtttttgttttggatgatttttatttttttgttgaagaagttgtaacggagattttaagatttttttaaattgtataattttgtttttagg

SEQ ID NO: 1814 - DNA, 8524 bp, Artificial Sequence
  chemically treated genomic DNA (Homo sapiens)
tttaaaaatagaattgtgtaatttgaagggattttgaaattttcgttgtaatttttttagtagaaaggtaaaagttatttaggatagaggttgtaaattgaagtgtaagttaaaatagaaagtggaatttgtatgatatttggtatgtttgtttttaagtaaattgttaattgagttgattataatcgtatttagagaattattttggtatttttataaagtaatggtattgtaaatttataatattttttgaatagaatagaattttttggggtttgatgtttgagttatttttttttttaaagattttataggatatggggattttagtagtttttttggagttttgaagttggttgattttagttggttttagtgttgtttggggttatgtttagtatttggttttttttttttatttttttgtttttttttttgtttttttttaaagtttattatgttttttttttttaattttttattatttgtttatttagttttttttttataaaatgttagaatgtaaagttggaagggtaaatttatatttttattttatagatagttgagattgagtattaaagaggagggttatttgtttagagttttatagtgatagagtttaaatgagaatttaggttttaatgtttttttttttattaatttgtgttttatttttattattttattatatttaggtattatttatgttattaattatttattgttaattttaatatttttattttattttttgagatagagtttcgttttatcgtttaggttggagtgtagtggtattattttagtttattgtaatttttattttttgggtttaagtaattttttagttttagttttttgagtagttgggattataggtgtgtattattatgttcggttaatttatgtatttttagtagagatagggttttattatgttggttaggttgatttaaaatttttgattttaagtgatttgattgttttggttttttaaagtgttgggattataggtataagttatcgtgtttggtcggtatatttattttaaatgtaaattttatattattgttaagagataagaattagtattattttttataaataaaaggtaattttaaaaataaattttggggaaataaaataaggttattaaaatttagttggttgtttgtttgttgaaggtttttttaggtttgtttttgatttttgttttaaaagaaggattagtaagtttttgagaggtattaattttattttagttttagagattttttttttgaaaaaatgagaaggatttttaaaagaattgtaaagtaagtgtatgtttaattttatgtttatgtgttttttaaaattgttttatagtttgggaatagttagtgaaaagaatataagtttgagagttagatagttttagattttagttttgattttgtaatatttattagttattttgttttttttagttttagtttttttatttttaaaatgggagtaataatgtttgttttgtaggttggattacgaagataagaaagaatatatgtatatggtttagtatagtgttaggaatatagtaggtgtttattaaatggtaattttaattattatttatttgtttttgtttgtatgatatatggtaagtagttcggttatttggttggttgtttagaattttatttaattggtggtttttatttaatttgggtattttagtaaattatttatagaaatgtgttttatttaaaatgggaaaggaagtagaaaaggttattgttttttattagtttattgtaagatattattttgtgaacgtggagtttttatatttttaaagataggaaagtttttgatattatttttaaatatatgagaaataaaacgtttttttaaaagtttgttaatttttagtttttattttttatagttttggtttttttgttataaaatagtttaggattagagtttggagatttttattatttgagaggtaggttcgggaattatgtagatgtagatttataattaggtttttttattagttagttatgagatttttggtaagataatttttttttttgagttttaatttgtttatttgtataatgggggagttgtgagaaattagataaagaaaataggtagtgtttggtttagagtttgatatataagaagtttttaatagatagtttttgatattgttgttatagtttagtttttatttggagttaaagttgggagttatgagggtaaattttgtttttgagaagtttggattatattttttattttattttttttggttttttttttatttttattataagggtttttttttatttttttttagtttcgttttttttttgtttttttgttttttaagagttattgttttaggtgaaagtgaaagttgtgggattaaagtagtttttttattttttttttttttttgttgttttttttgttttttttgatattatgggttatttttgtttaggttttaggtaggaatttatagttttttaaagtagggggaggttagaggggttgggatgaaggagttaggtatttgggggatttttagtttttagaatgaggaattataaaaatatatttaaataaaaagtgagttaagtgtaggtttttgaaaatttcggagatatgtttggttggttttgagtttttttggtgtttggagaaatttttggtttttttagttttttgattattagttttgttagagttaattagaattttggttttttaattttttattgtgttttataaattgtttatttttttaggggttttttatgttattttaaatttaggagaaaaaggtaaagttttggggattttttttaggttggaatatttaagatacggttcggggtggaaggcgatgttaaaagttttttgtttttttataaaagtatttgggtttttgtatttattttttgtttttataagatgttttggaagaaggtagttttagttggtaaggagatgataattatttatagaggttggtatttgtttataataagaaggggataggaaacgggttagattcgtttttttttttggttcgttttatttttcgttttttgaattttttattagtttttgtgtggttagtttttgaggttttttaaattcgtttaggtcgtttaggtacgtttgggtagttagtgttttttttgagcggtttttgtaggtcgttttcgggattttagttcgggagaagagagaggtagtttattttatttagttaggagcgggggtattttgtttagtttttatttatttttttgtttttataaaaattagttaggaaggtttttttttcgaagtttttttttttttttttttttattttttatttttaattttcgtttggtcggggtaaaaataatttatagcggttagtaagtagttttagaggacgtattgtagaggtagacgaattatagcgaggtgagattaggcggtaggattattgggcgttcgagcgaggtttttgttgatttttttgttttagttttggtttcgtttaggaaaggggcggggtttttaaagattaatcgcggtttatttatcgggggggcggagtttttagtaatttatcgcgtaggagtttttttagaatatttttataagtttaattttttcgggagtttagggacgtattttgttgtgtacgggaggaggtatggttttagagatagttttttttttttgtttttaggttttataaaggttaagtcgaggcgggttaggagttagtttgttttttgcgatcggagagagattttatgggtgttggggtttgttatagggatttttacggtttttttttttttgtttcgtttttcgttgtttttaggtattttggtagaatcgaaagaggttttattgcggagaggtttgaggaagttttttttatattattacgtagaaaacgggaaggttatagttggggtatggggaggcgttttaaggaagagttttttaatttagaatttcgtttttttttaaaggaaattttttcgtgtgggcgcgtcgttttaattttttatttatttatttatgtatttatgcgtttttattttattttattttattttattttttatttagtatttggagataggtatttattaagagtggggtcgggcgcggtggtttacgtttgtaatttagtattttaggaggtcgaggcgggtagattatttgaggttaggagttcgagattaatttggttaatatagtgaaatttcgtttttattaaaaatataaaaattaatcggatgtagtggcgttcgtttgtaattttagttattcgggaggttgaggtaggagaatcgtttgaatcgtagaggtagagattgtaatgagtcgagatcgtgttattgtattttagtttcgaaggtagagtaagatttagttttaaaaaaaaaaaaaataaataataaataaaaataaaaataaaggtgggggttaggcgcggtggtttacgtttgtaatttaatattttggaaggttaaaaagggagattgtttgaggttaggagtttaagattagtttggtaatatggtaagatttttatttttataaaataaagaaatttttaagttagttaggtatggtggtaaatatttgtagttttagttatttaggaggttgaggtaggaggatcgtttgagtttaagaagttaaggttgtagtgagttatgattgtaatgattatattattgtattttagtttgggcgatagtgtaaaattttattttaaaaaaaaaaaaagagtgggttagttttttgtggtattataaaatattttaagtatgttaggaaattcgggatttttttattttgtagaaatatatatatttgtgtttatattttttgggtttatgaattttgaagacgtgtttttgtttttttgttttttgtttcgttttgttttttgggtgtttgtttggtttttggtttttgggttttttttgatagagttttattttgttgtttaggttggagtgtagtggtatgatttcggtttattgtaatttttgttttttgggtttaagtaatttttttgttttagtttttcgagtagttgggattataggttggcgttattacgtttagttaatttttgtatttttagtagagacggggtttttttacgttggttaggttggttttaaatttttgattttaggtgattcgtttgttttggttttttaaagtgttgagattataggtatgagttatcgtatttggtttttaagatgtttttgaattagtgttaatattttgttttgtagtatggaatatttgggttttggtgtagtttttgtttttgaaggattgtgtttttttaggtttaaatttttttttaaggaaaatttaggagtttgaattagataacggttgaggtgatgattttttaagtttttaatttttggaagaggataagaggttagattttatagattagggaggatggaagaggaggatatttttaattttatttttatggtttttgttgttaagggtatatttgtaagttttgtggattttgtttttaggatttattttttattttttgttatttttgttattgttttaatttagagggtgttattttttatttggattgttttaatagttttttttattttataggatttattgagtatttattatgtgttaggtaattttttatattgttgcgatttttttgataaattttagatttgatcgattgggatatttttttgtataaaagtttttttgggtttttttgtatttttaggatgatttaaattttttattttggtaaagtatatttttttttatttagttttaatttttttttttatgtttattttttgttacgtttttttatgtatattggttttagtttttttttattttttaggtatataattttttttttttacggtttattttattgtttttgatgttttttttttttttttttttttttttaaatagtttaaatgttgtttttttttatattttttttaattttttgaggtagaggtaggtattttattttattttgtttttttttttgtgttgttatagtatttagtatgttagtttataattttttttgtttggttttatttgattgtgagttttttgagggtaggattggatttattttagttttaggtatataataggatattaatatatgggtgttgaatgaatgaataaatgaatgagtgggtttagtaattttttattttaagtatagtttttaattatgataaagagttggtggtagggggtgcgaagttggtaattttaatatagattttaagttgtagtggttttttgagaatggtggttagatattaaaaggttagaaatttttgaaattagggtttagggaattttattaaagttatttaaatatgtttaggatggagagaagattaaaatattttttttttttttaatatattttgaaaaaaataagtacggttttaaattttttgagagaggggtgttattataatgattttagttattatttattttttatttgtttgattttaaaattgggttttttataaaattgtttggggaagtaagtatatagaattaaaatattaattatattatataaaatatattatagtagtaattaaagtagtttaaattaatgtgtgaaggaataaatgttagttttcgggttgttttatggggcgaagattagataagataaagggaagatattttagtatatatatattttgaggaggtatgtgttggtgggtataggtttagagaaggtttagaattttgttgagttgagaagagtgtgttggaggaggaaagcgagaagatgatttaagggaaagtggtaatattcggaggttaattaaaaagggaataatgaagggttttgtaataggaatggggtaaaggatatttaaaagagtagggagttaggattttggaaatttagagatgaaatggtttttgtagggaggtgggtttatagtgttaggtgaatgggtgaggagtatgtttagaggtttagtgtttatagcgttgttagaatttggtatttagagtgttttgtttaatatgtaaatttaattgtgttgttttaaggtttaaagtggttttttagggtttttattttttaagtttgtagagttgtaaggttatgggttttttggtgtatatttttaagtattttttttgtttttttttttatgttttagttttattttttagatgtttcgtgttgttatttttgtttggagagttttttttttattgttattttttttttatttggttaatttttttttattttttaaggtttattttaggtaatttttttttggaaatttttttttaataattaatttatttttttgtgtttttttagaatttggggtagttttatttaagtaagattttagttcgattatattgtattttaatttttttgtttatttgtggagttagtgtattgaggcgatttaattttgtggggtataatgatgaagatttttttttttaatttttgtttttagttatgttgtgttgaattttttttttttattttttaatgatattttgggtagattgtattatttttggattattttttgttgttaaatttttattttttagatttttatttttaaatttaatttaaattttattttatttttttttttatttatttaagagttaatttgagttaggattttgtttgttaggaggaaaaggatttggtggaggtggggcggatggtttgattgggagatatattttattatttttattttaatttcgtgtttatatatggttttttatgggtaaatgagtaagttttttagcggtttttttattgtataatttttttatagggttatttagtttaggtttgatttcgtttattttattttattatttagggtttattagtgttttgatttttttgtttagtagttaatttgtttgagtaggttattagaaaagtgttttagttaggttgattattgtaacgtttatttgatttagagaagtttacgtatttagttagttatattataatgtttttttttttattttttttttattttgtttagataggtatagtttattgtttatagtttattatttattagggaatagtattttagtattttatgtttgtagttattttttagtttttatgagggattttttttgaatttttattattttatttttaacggggagggaggaaatggtttttttttatgaatatttgattatttagtaaaattaaggattttttttttttttaagattgttgtatgggtaaggaagaggaaattggaattttgggttgtgggtgtaaagcgagttttgttttttttagtaaatttggagggaaattatttggttttttaaaatatagggtatagaggatttgttggttttggttgtgggttagttatgtggttgattttta

SEQ ID NO: 1815 - DNA, 925 bp, Artificial Sequence
  chemically treated genomic DNA (Homo sapiens)
gatttatcgatatattaggttgtttgggttggtttttgggttgggagttgttttaggtgttgaggagggtagttttttggttggtgaggttttttttagaattatttttggattgagttttggggagggatggtattaggtgggtgaggggggttgtttggggagggaggggtttttatggggcgtggcgaggttggtttagtttttttttcgtttatatatgtagggtagtagtaggatgggtttttggatttgggcggttttttcgtaggcggatcgggggtaaaggaggtggtatgtcggttaggtatagtagggttttgtgttcgcgttgagtcgcgttttttttgttttagtaaggattatgagggcgttggaggggttaggtttgtcgttgttgtgtttggtgttggcgttgtttgttttgttgtcggtgtcggttgtacgcggagtggtagaaatatttatttatttttggcgggacgtagagataggggagcggttggtgtgcgtttagtgttttttaggtatttttgtgtagcggtcgtgtcgtcgagatagttttacgacgtgtggttcgtgtttatcgcgttattatacgtagttttggaattatttagagcgttgtcgttattgtaacgttttttgcggggagcgtgaggaggaggtacgggtttgttacgttatttataatcgtgtttgtcgttgtcgtatcggttttttcgcgtacgttggtttttgtttggagtacgtatcgtgtttatttggtgtcggcgtgattgtttcgggtgagagttgggcgaggggaggggtttttaggagtggtggtcggaggtgtggtaggggttaggttgttggttttagttttgtattttgagttaggatattagtttttttgattttgttttttttttttggttgtagg

SEQ ID NO: 1816 - DNA, 925 bp, Artificial Sequence
  chemically treated genomic DNA (Homo sapiens)
tttgtagttaggagggaagaatagggttaggggaattggtgttttagtttagggtgtaaggttgggattagtaatttgatttttgttatattttcggttattatttttgggggttttttttttcgtttagtttttattcggggtaattacgtcggtattaggtggatacgatgcgtgttttaagtagaaattagcgtgcgcgaagaagtcggtgcggtagcggtaggtacggttgtgggtggcgtggtaagttcgtgttttttttttacgtttttcgtagaggacgttgtagtagcggtagcgttttaggtagttttagaattgcgtgtagtggcgcggtggatacgggttatacgtcgtggggttgtttcggcggtacggtcgttgtataaaggtgtttggggggtattgggcgtatattagtcgtttttttgtttttgcgtttcgttaggggtaggtgggtgtttttgttatttcgcgtatagtcggtatcggtagtagggtaggtagcgttaatattaggtatagtagcgataggtttggtttttttagcgtttttatggtttttgttggagtagggagagcgcggtttagcgcggatataggattttgttgtgtttgatcgatatgttattttttttgttttcggttcgtttgcggaggggtcgtttaagtttagaagtttattttgttgttgttttatatatatgggcggggagagggttgggttagtttcgttacgttttataggaatttttttttttttaggtagttttttttatttatttggtattatttttttttagagtttagtttaagggtggttttgggaggggttttattagttagggagttgttttttttagtatttggggtagtttttaatttagagattagtttaggtagtttggtgtgtcggtggatt

SEQ ID NO: 1817 - DNA, 5429 bp, Artificial Sequence
  chemically treated genomic DNA (Homo sapiens)
atgtagttaaagtagatttttaagggaagtttatagttttaaatgtatatattagaaaataagaaatttttaaattaattaagtatttaatatattagaaaaagaatggtaaagtatgtcgggtgtagtggtttatatttgtaattttagtattttgagaggttaaggtaggtggattatttgagtttaagagttcgagataagtttgattaatatggtgaaattacgtttttattaataatataaaaattagttaggtgtggtggcgtatatttgtaattttagttattaaggaggttgaggtaggagaattatttgattttaggaggaggaggttgtagtgagttaagattatgttattgtattttagtttgggtaatagagtaagatagtttaaaaaaaataataataataatagtgaaatagttatatataagtaaattaagttttattaggtttttaaggaatagattatttttattgtatataatttgtatataaaaaaataaaaaatagtatttaaaaaataagtggttaaagtaaggaaaatagaatcgtgttatagaaattaagggaagtaataatttttatgtaggtggagagttgttagattttatatatttttgttaaattttgttttttggatgaggtattttttattttttaaatttttttattaggggtatagatatttatattgtattttaatttttttttttatagtaataatgattattattaattaattttaattttgttttgttttttgggttttgtgagatgaggttttgttttattttttaggtttgagtgtattggtatgattatggtttattgtaatttcgattttttgggtttaagtgatttttttattttagtttttcgagtggttgggattataggtacgtgttattatatttagttaatttatttttattatgtgtagagacggggtgttattttgttgtttaggttggttttaaatttttaggtttaagtaattttttcgtttcggttttttaacgtgattgggattttaggtgtgagtcgttttatttggttaattttatatttgtttttgagattatatgatcgatgtttgatttttatattggtgtgttaatttcgttagggtagaaattatatatttgtttgtttgttttttatttttgtgttttattatttggttggtttttaatataaaatgaatgtgtaaaaaacgtttgttaaatgaatgaggaggtttaaggggttttgagttttttgacgtttttattttataattgtggatagagtcgttatagtataaagttgagttggattatttaatgtttagttagtgttttacgtgttaggagatattgggagttgtgttgggtttttgaggagtgggtagaggttggaaatatttatagttggttagttttttgtgttatttagattggggaggtgtagaaatgaaaattatagagttgcgaggatttagaattttattaatgagtttaatttattgttttgattaggtggttttttaaagttttgttgggaaggaggttttaaggtggtgggggtagtagtgttggtggtggttatcgaagaaagtgggagtcggggaggaagtaatggggagtaggggataaagagggttagataaatttagagttttaggtgatgagatttaggaagtttaagttaggaatagtgattgcggatatttttgttttataatagaatttttttttaaggaaaggttttgtagagattggttttgttgagcgttttaataggttattgatttataaaaattggagaaaaaagataaagtttgttatatttaatagttttttgtttagagttggtttagaggaaattttaagtaagttttgtgtttaataatttgggtttgaggtagggtataggtaagggaatagataggagatacggaggtaagaataagattttagttgaaagagaaattagagttagaggtagttataagaatatttaatttattggaatttatgtaggtggatagtttgtttaggatttgttttgagtgggaagtaaagagtattttatttagattttaaggagtagggtgtttttggttgatatttaggttatagttattgggttaggtggagggttggttaggtttttttaaaagttatgagaggttaggtatagtggtttacgtttgtaattttaatattttgggaggtcgaggagggtagattatttgaggttaggagtttgagattagtttggttaatatagtgaaatttcgtttttattaaaaatataaaaaattagtcgggtatggtggtcggtgtttataattttagttatttgggaggttgatgtataagaatcgtttgaatttgggaggtaaaggttgtagtgagttgagattatgttattgtattttagtttgggtaatagtgagagatttttttttaaaaaaaaaaaaaaaaaaaagaattaaaaaaagttatgagagtttttagagtttttaagaagggttgttgtgggtttgtttttggaaaggaaagaaaagtagggagttgttgagaaaatattatatgtttttatgttttagttaggtatgggggagaggttgattttaaaagagaaagtggttgtgtgagattttaaggaagatgttagcgggttgtattttagggtttttagataaaaggaagggtttagttaggtatggtggttcgtgtttgtaattttagtattttgggaggtcgaggtaggtagattatttgaggttaggtgttttggtttagtttggttaatatgataaaattttatttttattaaaaatataaaaaataagttgggcgcggtggtttttttttgtaattttagttaaggtgggcggattaatttgaggttagtttgattaacgtggtaaaattttatttttattaaaaatataaaaattagttgagcgtggtggtacgtatttgttattttagttatttaggaggttgaggcgtgagaatggtttgagtttgggagatagaggttgtagtgagttgagattgtattattgtattttagtttgggtgatagagtgaaatggagggaggaaaaaaaaaaaaaaggaaggtttcgtttagggagttagtttaggatggggaaggtttattagaagtggatgtaaagagtgttggagatgagtttattttatttgtttaggaaagaaaaacgtttagaaatttggtttttttttttttggtcgaggttttttaggaaagttaggtagattttgtttttgttttgattttttggagaagtgatatgtagaaaagaggagatgggttttggtttagaggatagtagcgttaggttagtgagtagtttttagtcggtttaaggttgttaggtttagcgaattgtaagtttttgttcgataagtttttttttaaaggtttttagttttttatgatttttttgagggttttatttatttttttagggtttgtagttagttagttattttattgttttatgtttgtagtgaagatatttattataatttggaaatggttggtgatagaaaagtttttagggttatagtattttttgcggtgggaatttaggtgttttgtttgatggtgataaggttggttttgtataaatagttttttgaattatatttagatgtggtttttgatttgagtggatttttatgaagagttgtagagggggttgggaaaagataagagaatggagaaaatgaggagaaaggaaattatagagtgagatagagaatagatttgataggtgtgattatagtagtgtgatatttatgaatagtgtggaaataacggtaaagtttttgaattaaaaattttttggggaaataagttattttatatatcggttgttgaggaaagagtggaggaggttgttgattcgtgtgtgtttttatgatttaaagagggaaaagtttagttgtttttaatatttcgaaattagttttgttgggagaattgggaaaataaaaaagagatgattttcgtaggaagttatttttaattttaagtgtttaaggttaggagagaagatgttttaggcgatttaggatattagtgattgatatagttagaggtgggaaaggggaggataaagatggtataaaagtgaggagtgagtaagggtttgagagggaaggttatgtgggtagtaggtggtatttatattagagattgatatgaggattaaaggagagtataggtgatcggttagagtgtgatagaagagaggtagttttatattttttgtttgtaattttgagtattttgtagtaaattcgtttggttattaaattagattttaattgagataaggttatttaagtttttttttagttggtgtaaatatttaatagttttgttgtagaaatgttgcgtttgattatgagattattttaattttttaagggtgttttgtggtgttggtttttgtataaatttgaaaaattttgaattttaaaatttatttgatttttaaagttttagataagagtttgtggatttgtgtttaattttggtttttttttttttttttaattgttgtttgtgaaaggagggatgtaggtatgggagataggagttttgcgaattcgtttgtaaattgtggacgggggggtgggtggggggggtaacgtgggtatttttgtgtataagtgtatgaataggaggggtgagtaattgtgtgtttattatttttttgttaaagaagtaggagttagtgggttacgtgttttatgagtaggagaggcggaaattaaggaaggtttatgtgttggaggaagtatgtttgaagagtagtaggttttatagagtttgttttttaatattttttttagtatacggaaggggaagggggtggaggttgttgttatgagagagaaaaaaaaaatagttataatagagattttgtttttaaaggttggtttgttatttgaagtagttattgtttagggggtgtaaagaagagatagtagcgtttagtttggaggtgttaattttagaggttagtattagtaattgggtatagaaaggagtcgtttgggtagggattatggtacggttatatttttggtggttgtgcgttttggggattttggtggggtttttagttattttagtttttaagagttgtttagagaggtattattgggtttagggaaagttgtgttgttagatgtgtgagttaggtaagagggggttttggtaagggttaggtgattggcgaaagagagaggattggggttaatatagtaaataggcgtagggtgagattgagtttaagtaaggagggaaattttgtagttgtggggaggtattattttgaagagggtagagaattagttttttttaggttttgattttttattttttttttttagg

SEQ ID NO: 1818 - DNA, 5429 bp, Artificial Sequence
  chemically treated genomic DNA (Homo sapiens)
tttgggaggagagggtaagggattaaggtttgagaagggttggttttttgttttttttaaggtggtgtttttttatagttgtaggatttttttttttgtttgagtttagttttattttgcgtttatttattgtattaattttagttttttttttttcgttagttatttggtttttattaaggtttttttttatttggtttatatatttggtagtatagttttttttgagtttagtagtgtttttttgggtagtttttgggggttggagtagttgagagttttattagggtttttagaacgtatagttattagggatgtggtcgtgttatggtttttgtttaggcggtttttttttgtgtttagttgttgatgttggtttttggagttagtatttttaagttgggcgttgttgttttttttttgtattttttgggtagtggttgttttaggtggtaagttaatttttgaaggtagaatttttattgtggttgtttttttttttttttttatagtagtaatttttattttttttttttttcgtgtgttggggagagtattaaagagtaaattttgtgagatttgttgttttttaaatatgttttttttaatatatgagttttttttagttttcgttttttttgtttatgaagtacgtagtttattgatttttgtttttttgataaaaaggtgatggatatatagttgtttattttttttatttatgtatttgtgtataaaggtgtttacgttattttttttatttattttttcgtttatagtttatagacgaattcgtaggatttttgttttttatatttgtatttttttttttatagataatagttgaaagaaggaaggagaattagaattgagtataggtttataagtttttatttgaaattttgggggttagataagttttggaatttagaattttttaggtttatatagaaattagtattataaaatatttttggggagttggggtagttttataattaaacgtaatatttttgtagtaaaattattgaatatttatattaattgggaggaagtttaaatagttttgttttaattgaggtttggtttgatggttaaacgagtttgttatagaatgtttagaattgtaagtaaggggtgtagagttgttttttttttgttatattttgatcgattatttatgtttttttttaatttttatgttagtttttgatgtgggtgttatttattgtttatatggtttttttttttagatttttgtttattttttatttttgtgttatttttattttttttttttttatttttggttgtgttagttattggtgttttggatcgtttggagtatttttttttttagttttgggtatttgggattaaaggtagttttttacgggggttattttttttttatttttttagtttttttagtaagattgatttcgggatattggaaatagttagatttttttttttttgagttatggggatatatacgggttaatagttttttttattttttttttagtaatcgatatgtggagtggtttatttttttaggaagtttttaatttaggggttttgtcgttgtttttatattgtttataaatgttatattgttgtggttatatttgttagatttgttttttattttattttgtagttttttttttttttattttttttatttttttgtttttttttagttttttttgtagttttttatgggggtttatttaagttagaagttatatttgggtgtgatttagagagttgtttatgtaaaattagttttgttattattaggtaaggtatttgaatttttatcgtagagagtgttgtggttttgaggatttttttgttattagttatttttaggttgtggtaaatgtttttattgtaggtatggggtagtggggtggttagttgattgtaggttttgggagggtggatgagatttttagaagaattatgaggaattggggatttttaggaagaaatttgtcgaatagggatttgtagttcgttgagtttagtaattttgaatcgattgggaattgtttattagtttaacgttgttgttttttgggttaaagtttatttttttttttttatatattatttttttagggggttagagtaggagtagggtttgtttggtttttttggagggtttcggttaagaggaggaaggttaggtttttggacgttttttttttttaggtaaatagaatgagtttatttttagtattttttgtatttatttttggtgagttttttttattttaggttggttttttggacgggatttttttttttttttttttttttttttttattttattttgttatttaggttagagtgtaatgatgtaattttagtttattgtaatttttgttttttaggtttaagttatttttacgttttagttttttgagtaattgggatgataggtgcgtgttattacgtttagttaatttttgtatttttagtagagatggagttttgttacgttggttaggttggttttaagttgattcgtttattttggttgggattataggggagagttatcgcgtttagtttattttttgtatttttagtagagatggggttttgttatgttggttaggttggattagaatatttagttttaggtgatttgtttgtttcggttttttaaagtgttgggattataggtacgagttattatgtttggttgggtttttttttttgtttagaggttttgggatgtagttcgttgatattttttttgaaattttatataattatttttttttttggggttagttttttttttatgtttggttggggtataaaaatatatggtatttttttaatagttttttgttttttttttttttttagaaataggtttatagtagttttttttgagaattttgaggatttttatgattttttttggtttttttttttttttttttttttgaaaaagggttttttattgttgtttaggttggagtgtagtggtatgattttagtttattgtaatttttgttttttaggtttaagcgatttttatatattagttttttaagtagttgggattataggtatcggttattatattcggttaattttttgtatttttagtagagacggggttttattatgttggttaggttggttttaaatttttggttttaagtgatttgtttttttcggttttttaaagtgttgggattataagcgtgagttattgtgtttggttttttatgatttttgagagggtttgattaattttttatttggtttagtgattgtagtttagatgttagttaggggtattttgttttttaaaatttagataagatgttttttgttttttatttagggtaagttttgggtaggttgtttatttgtatgagttttagtaggttgggtgtttttgtggttgtttttggttttgattttttttttagttaaagttttgtttttgttttcgtgttttttgtttgtttttttatttgtattttgttttaggtttaaattgttggatataagatttgtttaaagttttttttaaattagttttaaatagaaggttgttaggtgtggtagattttgttttttttttttaatttttatgaattaataatttgttaaagcgtttagtaggattagtttttgtaagatttttttttaggaggaagttttgttatgggataaagatgttcgtaattattgtttttgatttaggttttttgagttttattatttgaagttttgagtttgtttggttttttttgttttttgttttttattgtttttttttcgatttttatttttttcgatgattattattagtattgttgtttttattattttaaagttttttttttagtaaggttttgagaggttatttggttaggatagtgagttaagtttattaatgaggttttgggttttcgtagttttgtaatttttatttttgtatttttttagtttgggtgatataggagattgattaattatgggtatttttagtttttgtttattttttagaagtttagtatagtttttagtgttttttagtacgtaaggtattggttaaatattggatggtttagtttagttttgtgttgtagcggttttgtttataattataaaatggaaacgttagagggtttaaggttttttagatttttttatttatttgataagcgttttttgtatatttattttgtgttaggaattagttaagtaatggggtataaagatgaaaaataaatagataaatatgtggtttttgttttgacggagttgatatattagtgtgagagttagatatcgattatataattttaaagataaatgtaaaattggttaggtgaggcggtttatatttggaattttagttacgttgggaggtcgaggcggaaggattgtttgagtttaggagtttaagattagtttgggtaatagagtgatatttcgtttttatatataataaaaataaattaattgggtgtggtggtacgtgtttgtggttttagttattcggaaggttgaggtgggaggattatttgagtttagggggtcgaggttgtagtgagttatgattatgttagtgtatttaagtttgggagatagagtaagattttattttataaaatttaaaaaataaaataaaattaaaattagttagtaatggttattattgttatgaaggagagagttggggtgtaatataggtgtttatatttttaatagggggatttaaggggtagggagtgttttatttaggaagtaaagtttaatagagatatgtgggatttggtagttttttatttatatgagaattattattttttttggtttttgtgatacgattttattttttttgttttgattatttgttttttaagtgttattttttatttttttatatatagattatatataatagggataatttgttttttgaaagtttggtagaatttgatttgtttgtgtgtagttgttttattgttattattattattttttttaggttgttttgttttgttgtttaggttggagtgtagtggtatgattttggtttattgtaattttttttttttgaggttaagtgatttttttgttttagtttttttagtagttgggattataggtgtgcgttattatatttggttaatttttgtattgttagtagagacgtggttttattatgttggttaggtttgtttcgaatttttgagtttaagtgatttatttattttggttttttaaagtgttgggattatagatgtgagttattgtattcggtatattttgttattttttttttaatgtattggatgtttaattaatttagaaattttttattttttaatatatgtatttaaggttataaattttttttgaagatttattttagttatat

SEQ ID NO: 1819 - DNA, 7669 bp, Artificial Sequence
  chemically treated genomic DNA (Homo sapiens)
gtagtaggggttggtaggtagggtagtgttttcggttggagttttagggaggggaagatatgagttagtagttagggagggagtgcgggggttttgtggttacggtatataaagtgttttttggtgatagcgttgtttggggagtagtagttttgggtttggagagtaggggcgttgttgttaaaggggattggggttttgagtatttttttttattgtatttttggttttttggggattgggaaggtgtttgtatggagggtgggatgtagttttttagttttgtattatattattacgaaatatttattgaggttgaaagttacgtttttatagtttttttttttaagatattttataattttaggggtatgggcgaaatagatttatagtttattttattttatttagtttttaaatgataaagttttttgttaaatgttttgtaatttattggttatttcggttgatatttgttaagattattattttattttatatttttttttttattttttttttttttttttatttattttttttttttttttttttttttttttttttttttgttttttaggttatagtgtagtggtataatttcggtttattgtaattttcgttttttagttttaagtaatttttttgttttagttttttaagtagttgagattataggtgtttattattacgtttagttaatttttgtatttttagtagaggtggggttttattatgttggttaggttggtttcgaatttttgattttaggtgatttatttatttcggttttttaaagtgttgggattacgggtatgagttattgtatttggtttttatttttttttttttttgtttgggatttatttgatttatttttttaatatatgggggtgtttggtgtttttgtttgtgtttgtttttattttgagttaaaatttattatttgaggttgtgaacggtgtagataggattttatgaaatttatattttaaaagggggagtaggataggatttatgaaaatagtatggggttaggcgtggtggtttacgtttgtaagtttagtattttgggaggtcgaggtgggtagattatttgaggttaggagtttgagattagtttggttaatatggagaaattttatttttattaaaaatataaaaaagtagttaggcgtggtggcgggtatttttaattttagttattcgggaggttgaggtaggagaatcgtatgaatttgggaggcggagggttgtagtgagttgagatcgggttattgtattatagtttggataataaagcgagattttattttttatatcggtttttttaaaaagaagatagtgtggaatggattttggatggtgaggatgtttaaaaagaaaagtttatttatgtagtgggtttagcggttaagaagattatttagattgagtggtatgagggttaatttatgtgataataaagttaggttatatgaagttatttggtaaaatattagtttaaatgttgttagaaaggtattttagtcgggtatagtggtttacgtttgtaattttagtattttgggaggttgaggtgggtggattatttgaggttaggagttcgagattagtttgattaatatggagaaattttatttttattaaaaatataaaattagttaggtttggtggcgtatgtttgtaattttagttattcgggagggtgaggtaggagaatcgtttgaatttgggaggttgaggttgtaatgagttaagatcgtattattgtattttagtttggttaataatagtaaaattttgttttaaaaaagaaagaaagaaagaaagaaaagtattttatatttttttatttttttgtttttttttttttttttttttttgttgagaacggggttttattatattgtttaggtaggttttaaatttatgggtttaagtaattttttcgtttttgtttttttaagtgttgggattataggtgtgagttattgtatttggttagaaaggtaatttttagattatgttaataattatagttgatttttaggataggagatgagtttaggtaatgtgagtgggtcgtatttgattagttgaaggtttgaggagtaaatatcgaagttttttgaagaaggaattttgttttaaggttgtaatttagtaattttgtttgagtttttaggttttaggttttaagacggtagtgttattttttatttgagtttttagtttaattggtttgttttgtggattttagatttgttaatttttatgattgtgtgagttaattttttaaaataaatgtgttatatattttttttgattttatatattttttttttttttttttttcgtttgtttttgtatttttgtgtttttgtttttttagttttttatgtttgttttttttttgattttgtatttttgtttgtttttatagatttttttttttttttttttttttgagatagttttatgttattgtttagtttggagtgtagtggtataattttagtttattgtaatttgtgtttttcgggtttaagtgatttttgagttttagttttttaagtagttgggattatagaagtgtgttattatatttagttaattttttattttttatttttgtatttttgatagagatagggtttttttatattggttaggttggtttcgaattcgcgattttaggtgatttatatgttttagttttttaaagtgttgggattataggcgtgagttatcgtatttagtttatagattttatttttatttttttgtgtattttttattggttttgtttttcgggagatatttgattaatttagggagggtttttgtgagaagttttttgagttaagacgtagatgagtagggggagtttgttttggagatttagggaagatggtttttagtagtaggaagaggaagtgtaaagatttaggatatttgtttggggtagagtgagtaaaagtacgagggtttaattatagaggttttagtgaagggtatttcgtgttttagtttaagtttaggggtaagttggtagtaaattgtatttataaagggttatataagtgtttttggtttttagggttaagaggtaaaattaaggatattataaagatatttatgaaataagatagaagttaagtgtagtggtttacgtttgtaattttagtattttgggaggttgaggtgggtagattatttgaggttaggagttcgagattagtttggttaatatatagataatatatatgttataatatatataatggttaatatataatataaaaattagttatgtatggtggtgggcgtttgtaattttagttatttaggaggttgaggtaggaaaattgtttgaattcgggaggtagaggttgtagtgagttaaaatggtattattgtattttagtttgggtgataaagtgagattttgttttaaaaaaaaaaagaaagaaaaaggttgggtgcggtggtttatgtttgtaattttagtattttgggaggttaaggtaggcggattacgaggttaggagattgagattattttggttaatacggtgaaatttcgtttttattaaaaatataaaaaattagttgggtgcggtggtgggcgtttgtagttttagttatttaggaggttgaggtaggagaatggcgtgaatttgggaggcggagtttgtagtgagtcgagatcgtattattgtattttagtttgggcgatagagcgagatttcgtttcgaaaaaaaaaaaaatttacgtttgaatgtatgtatatttatatatggatttttttatatatatgaatatattcgtgtaagtgcgtatatatatatatacgtattaatgtataggtatatatatatgtatatatttgtatatagtatatatatgtatatttatttgtatatgtgatgtatgtttatatatatatatacgtgtatatgtatgtatgtatatggattatatgtatatgtatatagatgattatatatatatgtatgtatttgtttatatatgtacgtatatttatatgttagtatatgtatgatatataggtatgcgtttgtatatgtgtatatgatatatatttgtatgtatataattgaatatatatatttatatgtatatattgtatatatatatgtatgtagataagtatatatatagagtatatatttatttttttattttatttttgtgttttttattgtatttgttatattaaaatataatagaaggtcgggtatggtgcggtttacgtttgtaattttagtattttgggaggttgaggtgggtggatcgtttgaggttaggagttcgagattagtttgatcgatatggtgaaaatttatttttattaaaaatataaaaagtagttaggcgtggtggtacgcgtttgtaattttcgttatttgggaggttgaggtaggagaattgtttgaatttaggaggtggaggttgtagtaagttgagatcgcgttattgtattttagtttgggtaatagagcgagattttattttaaaaataaaataaataaacgaataaaaaaatttataacgtattatttttttgtttacgaggttttttgtttttttggttttattagaagaggagtagggattttttttgttgttgtttattgttgtattttttatatcgagagtagagtttggtatgggtagaaagtttttagtcgatatttggtggttttaagcgaatgaagtatttaagaagggaaagttgggggttttttattgtatttgttatttgagttatatttttagaagtttttggaaagtgtgagagtttgtatgagtgagagtgagatagggttaagatcgggggcggcgggtatcggaagaagaggagggtgagtgggggaaggggtggggttgaattttagttttaaaggcggtttacgggtgtttgttcgtagcgtgtatagtttaggagtgttgagtaatttcggttttttttgaggttgaaggatttaggcgtgttagttttgttttagatattttgggtatggaggagagtgtcgtacggtttttagtgtttgtggtggatggatagatcgatattttatttacgaggttgggacgaagttatcggagatagtcgtgtagtgtggttcgggtgggtttgggttttttgttgttgttgatgggggtcgggttggtcgtttaaggttggttttttttgtagttgtattggcgtttaggagagatggttattcgtttgtttgtgagtgggatcggggggttgagagtaggtggaggtgaggggggtttttttgtgttattgtgggttattgtgtgtttgtgtgtgtgtgtgtgtgtgtgtgtgtgtgtgtgtgtaggatagggtataggttgagagtagttggtttgattggttgttgtttttagttttgggtaagtgaatttatttttttgaattttagtgtttttatttataaaataagggtagtttttttataggggacgaagtatgttatggtatgtgtagtattagacgatgttagttttattcgtcggaattgatattttaatattgttatgtatatttttgtgtatatacgtatgtattttttttgtatttttttatttttgagacggagttttattttcgttgtttaggttggagtgtaatggtatgatttttgtttatcgtaatttttgtttttcgggtttaagtgatttttttgttttagtttttcgagtagttgggattataggtatgcgttattacgtttggttaattttgtatttttagtagagatggggtttttttatgtttgttaggttggttttaaattttcgattttaggagatttattcgttttagttttttaaagtgttgggattataggtgtgagttattgcgtttggttttttttggtatttttattattgttattgcgattgttattaattttttgattatttttatttgtggaaatttttcggtttgtttttagttggttgtggatgtgttcgtttgtttgtgtgttttatttgggggtttatgtgtgtttaatattatatttttgtgggtttggttttttttgtgttttgggtttggattcggtggttatatattcgtgtttatatatttatgtggacgtatgtgcgtgtatttatatgtttatatattcgtttagttgtagtcggtgtatttacgttgtttgtttttgtttttgggtttttgtgtttgtagacgtatatggatttataaattataaattatatgtttacgtatttgagtttatatgtgtttttttagcgttatgatgatgttgaggtttgtgttttgtggtaggtgttatattttaagggtggtgtttatgtgtttagttatttcgttgtttgtatttttttttttttgagataaggttttttttttatagtttaggttgtagtgtagtggtgtagttttggtttattataattttattttttaggtttaagtgatttttttgttttagttttttgagtagtagttgggattataggtattcgttatcgtgtttggttaatttgtgtatttttagtatagacggggttttattatgttggttagatttgtttcgaatttttgattttaagtgatttatttgttttagttttttaaagtgttgggattataggtgtgagttattacgtttggttttgtttttgtatttttaaatattatttatttatttaattaattatatatttatttattttagagattgtgttttattttgttttttaggttagagtggagtggtacgattatagtttattgtagttttgaatttttgggtttaagtaagttttttgttttagttttatgagtagttgggattataggtatgtattattatgtttggttaattttaaaaattttttgtagagatgaggttttgttgtgttgtttaggttggttttaaatttttggttttaagttgtttttttattttggttttttaaagtgttgggattataggtgtaagttattgttttgggtaatgttatttatttattaaatttttttatttatttatttattttttgagatagaattttattttgttatttaggttagagtgtagtggtataatttgggtttattgtaattttttaggtttaagcgatttttttgttttagtttttagagtagttgggattataggtatttattattaggtttagttaatttttgtagttttagtagatatagggttttattgtgttggttaggttggtttcgaatttttgattttaggtaatttgtttatttcggtttttcgaagtgttgggattagaggtgtgagttaatgtattcgatttattaaatttttttttagtgtatattatgtgttaagtattgtaataatgttttatatatgtgaatttattaaacgttaagtagatacgattcgtaattttatttatatagagggaaattgaggtattaagtggttgtgaggtttttggatagggggtgtgtgtttgtaagtgagagtatgtggttttgtgtacgtgtttgagggtggtgtcggtggttatggtttttatgttttatagttatgtgtgagtaatgcgagggcgtggttttcgttgtaggtttttatcgtaggttttttttgtatttttagg

SEQ ID NO: 1820 - DNA, 7669 bp, Artificial Sequence
  chemically treated genomic DNA (Homo sapiens)
tttgaaaatgtagaaggggtttgcggtaagaatttgtagcgggggttacgttttcgtattgtttatatatggttatgagatatgaggattatagttatcgatattatttttagatacgtatatagggttatatatttttatttgtagatatatattttttgtttagaggttttataattatttggtgttttagtttttttttatgtaaatggagttacgaatcgtgtttgtttggcgtttaatgaatttatatatgtaaggtattattatagtgtttggtatatagtatgtattagagaaaggtttaataggtcgggtgtattggtttatatttttaattttagtatttcgggaggtcgaggtgggtagattatttgaggttaggagttcgagattagtttggttaatatagtaaaattttgtatttattaaaattataaaaattagttgggtttggtggtgggtgtttgtaattttagttgttttggaggttgaggtaggaggatcgtttgaatttgggaggttgtagtgggtttagattgtgttattgtattttagtttaggtgatagagtgagattttattttaaaaaataaataaataaataaaagggtttaataaataaataatattgtttagagtagtggtttatatttgtaattttagtattttgggaggttaaagtgggaggatagtttgaggttaggagtttaagattagtttgggtaatataataagattttatttttataaaaaatttttaagattagttaggtatggtggtgtatgtttgtagttttagttatttatgaagttgggataggaggtttgtttgagtttaggagtttaaggttgtagtgagttatgatcgtgttattttattttagtttgggaagtagagtgagatatagtttttaagataaataaatatgtaattaattaaataaataagtaatatttaaaaatatagggataaggttaggcgtggtggtttatatttgtaattttagtattttgggaggttgaggtaggtggattatttgaggttaggagttcgagataagtttggttaatatggtgaaatttcgtttgtattaaaaatatataaattagttaggtacggtggcggatgtttgtgattttagttattgtttaggaggttgagataagggaattatttgaatttgggaggtggggttgtagtgagttaagattgtattattatattatagtttgggttatgggagagaaattttgttttaaaaaaaaaaaaatgtagatagcgagatggttggatatatggatattatttttgggatatagtatttgttatagggtatagattttaatattattatgacgttgagaagatatatgtgggtttagatgcgtggatatgtggtttgtggtttatggatttatgtgcgtttatagatatagagatttagagataaagatagataacgtgaatatatcggttgtagttaggcgggtgtgtggatatgtgggtatacgtatatacgtttatatgggtatatggatacgaatgtgtggttatcggatttagatttaggatataaaaggggttaagtttataggggtatggtgttgggtatatatagatttttaggtgaggtatatagataggcggatatatttatagttagttggaagtagatcgagaaatttttatagatggaaatggttagagaattaatgataatcgtagtaatagtaataagagtattagagaaggttaggcgtagtggtttatatttgtaattttagtattttgggaggttgaggcgggtggattttttgaggtcgggagtttgagattagtttgataaatatagagaagttttatttttattaaaaatataaaattggttaggcgtggtggcgtatgtttgtaattttagttattcgggaggttgaggtaggagaattatttgaattcgggaggtagaggttgcggtgagtagagattatgttattgtattttagtttgggtaacgagagtgaaatttcgttttaaaaataaaaaagtatagagaaaatgtatgcgtgtgtgtataggggtgtgtatggtagtgttggggtgttagtttcgacgggtggagttggtatcgtttggtattatatatgttatagtatatttcgttttttatgaagagattgtttttattttgtagatgaagatattgaggtttagagaggtgaatttatttgtttaaggttgggagtagtaattagttaagttagttgtttttagtttgtgttttgttttatatatatatatatatatatatatatatatatatatagatatatagtgatttataatgatataggggagttttttttatttttatttgtttttagtttttcggttttatttataggtaggcgggtgattattttttttagacgttagtgtagttgtaggaggaattagttttggacggttagttcggtttttattagtaatagtaagagatttagatttattcgggttatattgtacgattgttttcggtggtttcgttttagtttcgtgaatgggatgtcggtttgtttatttattataaatattgagggtcgtacgatatttttttttatgtttaaggtgtttggagtagggttgatacgtttgggttttttaattttagaggaaatcgaaattgtttaatatttttgggttgtgtacgttgcggataggtattcgtgggtcgtttttagagttggggtttagttttatttttttttttatttattttttttttttttcggtattcgtcgttttcggttttggttttgttttatttttatttatatagatttttatattttttagaggtttttgaaaatgtgatttaggtggtaagtgtagtggggagtttttagttttttttttttggatgttttattcgtttggggttattaaatatcgattgaggattttttgtttatgttaggttttgttttcggtgtgggggatgtagtaatgaataatagtaagaagggtttttgttttttttttggtggagttagagagataagaaatttcgtaaataagaaaataatacgttgtgggtttttttgttcgtttatttgttttgtttttgagatggagtttcgttttgttgtttaggttggagtgtagtggcgcgattttagtttattataatttttattttttgggtttaagtaatttttttgttttagttttttaagtagcggggattataggcgcgtgttattacgtttggttgttttttgtatttttagtagagatgggtttttattatgtcggttaggttggtttcgaatttttgattttaagcgatttatttattttagttttttaaagtgttgggattataaacgtgagtcgtattatgttcggttttttgttgtgttttgatgtgataagtgtagtgaaaaatataagagtggaataaaggagtggatgtgtgttttgtgtgtgtgtttgtttgtatgtatatatgtgtgtagtgtgtgtatgtgaatgtgtgtatttagttgtgtgtatgtaagtgtgtattatgtatatatgtgtaggcgtatgtttgtgtattatatatgtgttggtatgtaaatgtgcgtgtatatgtgggtaggtgtatgtatatgtgtatggttatttgtgtgtatgtgtatgtggtttatgtatatgtatgtatgtgtacgtgtgtgtatgtgtgaatatgtattatatgtgtaagtgggtgtgtatatatgtgttgtgtgtaggtgtgtgtatgtgtgtgtgtttgtgtattggtgcgtgtatgtgtgtgtgcgtatttgtacgggtgtgtttatgtgtgtggggaggtttatgtatgagtgtgtatgtatttaagcgtggatttttttttttttcgagacggagtttcgttttgtcgtttaggttggagtgtagtggtgcgatttcggtttattgtaagtttcgttttttaggtttacgttatttttttgttttagttttttgagtagttgggattataggcgtttattatcgtatttagttaattttttgtatttttagtagagacggggttttatcgtgttagttaggatggttttaattttttgatttcgtgattcgtttgttttggttttttaaagtgttgggattataggtataagttatcgtatttagtttttttttttttttttttttttgaggtagagttttattttgttatttaggttggagtgtagtggtgttattttggtttattgtaatttttgtttttcggatttaagtaatttttttgttttagttttttgagtagttgggattataggcgtttattattatgtatagttaatttttgtattatatgttggttattatatatgttgtaatatatatgttgtttatatgttggttaggttggtttcgaatttttgattttaggtgatttgtttattttagttttttaaaatgttagaattataggcgtgagttattgtatttggtttttgttttgttttataagtatttttgtaatatttttgattttattttttggttttgaaagttaaaaatatttatgtggttttttatagatatagtttgttgttagtttgtttttgagtttaggttaagatacgaagtgttttttattggggtttttgtggttggattttcgtgtttttgtttattttgttttagatagatattttgggtttttgtattttttttttttgttgttgggaattattttttttagatttttaaagtaggttttttttgtttatttgcgttttgatttaagaaattttttataggagttttttttgaattggttaggtgtttttcgagagatagaattaatagaagatatatagagagatagagatgggatttataggttgggtgcggtggtttacgtttgtaattttagtattttgggaggttgaggtatgtggattatttgaggtcgcgagttcgaggttagtttggttaatatggggaaattttgtttttattaaaaatataaaaataaaaaataaaaaattagttaggtgtggtggtatatttttgtaattttagttatttgggaggttgaggtttaagaattatttgaattcgggaggtataagttgtaatgaattgagattgtgttattgtattttaggttgggtaatggtatgagattgttttaaaaaaaaaaaaaaaaaaagagatttgtagagatagataaagatatagagttagagaagagatagatatggaaaattagagagatagggatatagagatataaagatagacggagagagagagagagagagatgtatagagttagagagagtgtgtaatatatttattttaagaaattagtttatataattatgggagttggtaagtttgaagtttataggataagttagttaggttggaggtttaggtaagaggtgatattatcgttttaaagtttaaagtttggaaatttaggtagaattattaagttgtaattttgaggtagaattttttttttaggaaatttcggtgtttattttttagatttttaattgattaggtgcggtttatttatattatttaggtttattttttgttttgaaagttaattgtggttgttgatatgatttgaaaattatttttttagttaggtgtagtggtttatatttgtaattttagtatttaggggggtagaggcgggaggattgtttgagtttatgagtttgagatttgtttgggtaatatagtgagatttcgtttttaataaagaggaaaaaaagaaaaaagataaaaaagtaaagaaatataaaatattttttttttttttttttttttttttttgagatagagttttgttgttgttggttaagttagaatgtaatggtgcgattttggtttattgtaattttagttttttaggtttaagcgatttttttgttttattttttcgagtagttgggattataggtatgcgttattaggtttggttaattttgtatttttagtagagatggggtttttttatgttggttaggttggtttcgaatttttgattttaagtaatttatttattttagttttttaaagtgttgggattataggcgtgagttattgtgttcggttaaaatatttttttagtaatatttagattagtgttttattaaatgattttatatagtttagttttgttattatataagttagtttttatgttatttaatttaagtgatttttttaatcgttggatttattgtatgggtgaatttttttttttggatatttttattatttaaaatttattttatattgttttttttttgggggagtcggtgtgggggatggagtttcgttttgttgtttaggttgtagtgtagtggttcgattttagtttattgtaatttttcgttttttaggtttatgcgatttttttgttttagtttttcgaatagttgggattagaggtgttcgttattacgtttggttatttttttgtatttttagtagagatgaggtttttttatgttggttaggttggttttaaatttttgattttaaatgatttgtttatttcggttttttaaagtgttgggtttataggcgtgagttattacgtttggttttatgttgtttttatgagttttattttgtttttttttttagaatgtaagttttataagattttatttgtatcgtttatagttttaagtgataggttttagtttaaaataaaagtaaatataaataaaagtattaaatatttttatatgttgaagaaatgaattaaatgaattttaaataggagaaagggggagtgaaggttaggtgtagtggtttatgttcgtaattttagtattttgggaggtcgaggtaggtggattatttgaggttaggagttcgagattaatttggttaatatggtgaaattttatttttattaaaaatataaaaattaattgggcgtggtggtgggtatttgtaattttagttatttgggaggttgaggtaggagaattgtttgaagttgggaggcggaggttgtagtgagtcgagattgtgttattgtattgtagtttgggggatagaaaaaaaaaaaagagaaagaaaagaaaggaggaatgaataagaaaagaaaaaagaaatgagaagaaggatgtgaagtagagtggtggttttggtagatattagtcgggatagttagtgagttgtaaggtatttgataggaggttttgttatttaggagttggatggagtagggtagattgtgaatttatttcgtttatatttttggagttgtggggtgttttaggaaaagaggttgtggaggcgtgatttttagttttagtgggtgtttcgtgatgatgtggtgtagagttgggaggttgtattttattttttatatagatatttttttagtttttaaaggattagaggtgtagtgagaggaggtgtttagggttttagttttttttagtaatagcgtttttgttttttaaatttaaggttgttgttttttaagtagcgttgttattagaaagtattttgtgtgtcgtgattataaagttttcgtattttttttttaattgttgatttatgtttttttttttttggggttttagtcggaaatattgttttgtttgttagtttttattgt

SEQ ID NO: 1821 - DNA, 7057 bp, Artificial Sequence
  chemically treated genomic DNA (Homo sapiens)
ttgaagagcggtagcggaaatagttgggaaaagtggttttttttttttttttttttttttttagtggattatttgttagtagtagtatttggttttggtttttagtttaaagttatttagagagggttttaggaagggtgttgagatttttataatagataggaggataaaattaaaaggaaaattaatattagttaagagtgaaattttttataaggttttatttttagagaaaagttttttttattttattagttgtgggggtttttggtttttttgtttttttatttatataatttaaagggaagtttgattgttgatattttttatttatttaaatagaatttatagttagtttttttatttcggagagaggtttgtggggaaaatagatagattaatataattgtagaggaaatttatgttatttatttataataattaatacgggtttttatttataaataaataaatggttaagtatttgagaaaaattagtaatataatgaaaaggattaaaataaataaatggaattgatttagaggaaagagggagaattaagggaattgaagaaaatgtaaatatattttgatatgtattgttagaaaagttagttaagcgttatttttttaggttagaatattttataatttttttttttatttttttaaaataatatttagtaatttggtaaatatttattaattttttataatgtgttaggaattaaaatttttgggtttttttgtttgtttgtttgttttaattattttttttttttaatagttaatggtagaaaaattagataagtttattatgatatgatgtggtaaatgttatgatagattaagtatagaagaggtagggtatagtggtttacgtttgtgtaattttagtattttgggaggttaaggtatgtggattatttgaggttaggagtttaagattagtttggttaatttggtgaaatttcgtttttattaaatttataaatattagttaggtagagtggtgtacgtttgtaattttagttatttaagaggttgaggttggagaattatttgaattcgggaggtggaggttgtagtgagttaagattatgatattgtattttagtttgggtgataaagttagatttttttttaataataataataataaaaagattaagtatagaagagagtattttgttagttggaatagaatattttatttaaatattaatagatagtcgggcgttgtggtttatatttgtaattttagtattttgggatatcgaggttggtagattatgaggttaggagtttgagattagtttagttaatatggtgaaatttcgtttttattaaaaaaattttgtaaaaattatttaggcgcggttgcgtaagtttgtagttttagttatttgggaggttgaggtaggagaatcgtttgaatttgggagatggaggttttagtgagttgagatcgtgttattgtattttagtttgggcgatagagtgagattttgttttaaataaataaataaataaataaaaaatattaatagataagataggagagaattagttttggtatataaataatatgaataagtatagtatattttaggaaataaaattagtttaaaatgtttgagatttaatgagtcgtagacgatgaggagagaaatgtgggtaggggttaatttatttgttatgttaagaatcgagatttttttttttagtttagagttttttaggtatatttagggaaaagaatttttaggaggttttttatataataaataaaatattgttatatttaatttttttatatgtattggaaatgattttttaagtagaaattatgattgtgttttgggttattaatataaaattataattataggtatatttatattaaaaataaattgttgaagtatgatttattgttttttttattttttttttgatatttgttataaattaattattagttagtagaaaagtagtagtagaaaagggtgattaatatttaagaaaattttgtgtaaaaataattgaaaaatgagattttaatttattaatttaattttttttgtaaatttagaaaaagatggttaatatttgattttggttatagatatttgtatgtatttttatatatgtatatattttttggaaattaagtttgataattatttttggacgtgttaggtagttgaagatattaaaacggagttaattttttgttagggagagataggtatgagaggttttgagataaagaatttttgatgtagaattagaaattaaaaaaatagtttaaatgaggaagttggaaaggtagttaattgtggtattatggtagaggattaggtagaaggatgagagaaagagaaggttttaataattgaggtataagtagggtattttggagttagttgttgttagtgtgaaagatggatggggtgggatagaaagagaaatagggagataagttaggatggtataatttagtaatttataaaggagaggatatatgggtttggaataggatgatggtaggggttatggagagaagtggtggtaattaaggtttttggaggaagaagttattgggattggggtaatttggggtaagagagagtgaaaaattatgaatggattttagatttttgatttgggtaattaagtgggtggtgggattatttatagagatacggagaattttaagggagaataggtttggattggaattagagtggtgagataaattaattttagagtatattaaatgtaagatggttttgggatatttaagtagagatttttagaggtagttgtgtttataattttgaagtttaggattttagttatagatttgagatttattataatgaaggtgagattgaaatttatgaaagtttatgaaatttatgaattatttaatgaaattatggagaataagaagagaggggaggagaggagaagggagaaggaaaggaaatagagagaaggaatattaaagttttaagggatataaagaggaaagaagataatatgaagaaggattttgagaggtagaagtttttaagaatagggtgatatagaatttaagtggggagagtatttaggaagatgataataggataataggttaatagagtaatagagaggtcgttaaaaataaattttaagaagtatttagttaaaattattattgagttaataatggtgggattaattttaggggaatattgtgggtagaagttagattgtaggaggttggggattaagaagttgaggtaaggaggttggataataattgtttttttaagttggttacgtgaataaatttgtgatttttagttttttttttttcgggttttggttgagttgattgtagggtttttgtagttttggtatttttaagttgtataaaattgatagtgtagaagtttttgagtttattttggtttttatgataatttttttttagtggaattaaggttatttgtttaagaattaaagtttttgatttgattgattaaagtttattacgtgtatcgaagttatttatttggtagatgtagtgaaaagttatatagatttgggtttaggataggatgttggggcgtgggaggggaagaaagtaggtgttaattatatagatagtatgtttattagagtagtttttacgttttttatttgttttttaaaataattttataggaattattaaagtaattttattatggtttttagattaggtttggatgtgaggtagggatttttatagttgtttttagtttgaaggaaatttgataagatgatgtaaaagttttttagaaatgtgtaattttatatattttagtgatttaatttattgttaaaatttaaggtgtttttaatattgttattgtttatttggtttttattaatatgtaaggagttggtaattatttgttaaatttatgttttaggttaaataaattttaaaaaatttaggatgagaattgtttattgtttaacgtgttttaaattttttttatgtatatttttattagatttttatagtaatttataggataagtaagataggtgtaagtgttttttttgggtatgaggaaattgaggtttaaagagatgaagtgatttgtttaaggtttatagtaatttattggtagagtaaagattagaatttagattttttaattgtagtttattttttttattttgaattgttatattagtattaataattatttaatggattggaatagtgtatataggtagtttagttacgttaagttacgatttttattttaattttaattttagagttttggtttgattttttttaagattttatttatttttgtttttgtaaaatttattttttttgtattatttttttagttaaattttatttaataattattagtatgttttttttgttttatgttatgtagatttgatttgaaaatttgttaggtttttattgagtttagtgattaaagaagtaaagttttgagaagtaattagttgatgggatattagttataaaattaatttaaatttttgttgatatgtgtttttttttttatatattaggttttcgtttcgtattagtaagattgaaattgaaataagtttattgttggtggatgaatttgttattttttttgaaattggtgaatttaaaaagttagatagtgataggaaaatattgttattgtttgttaagaagtttatgatattttaaggtaagaatgaatatatggaagaagaaatttgttttttttttatttataaaaaggaaagtttggaagtgaatgatatgggtataattaaaaaaaaaaaaaaaaataaaaaatttttacgtaacgtttttgttgggagagaagattacgaagtatattttttaggaagtgtgggttgtaacgattgtgcgtttttaattaattttgagtaaggtggttattttgatagtttttttatgttgtttttgttattttttttgttagaagatattattttaattttaatatagtatgatcgaaatatataattaaattttttttcgatttgcggttattggattgtttattagtatgaaaatttttatgtatttatttattgttttttttattatttagatgattgggttagtattttttgttgtgtatttttatagaaggttggataaggtaagatgaattataagtttttattaattaaatttggggtttttattaatttataggttggttttatttaaatgatggatgatggtagaaattaaatagaagaatggttttgtggtataatgtttgttgtttagttaatgaagttttatatttttgtttttggttaggattttgggatttggagttagattgtttgggtttaaattttggttttgtttatattatttttgttattttggggtaagtgttttagtttttatatttgagaaatggggatggtattggtgtttattttatagattaagtgagtttagttttgtaaaaagtttaggagggggtttgatatatagtaagtattatgtacgtattagttataattatttgttaaagttttgttttaaaagtaagttatttttttatggagatagttttttttttttaaatttttagttaggtaagaagagcgttaatttgatttaaaattttataatgttttagattaatatagatatggataagttttagaatttgtagttttttagtaaaagtagtattttttgtgtaattttttataagtattgattgtagttgtaggatgtttagtttttttttgagatgttttatatttttaaatggttagatttgtaggaataaaagagtagagtaatttagtaggttgttttgtatttttaggaaaagaaaattattaggatttattttgtttttatgtatttttttatttttattgaggagtataattggttggtgttgataaaatattaattatagatgtaaaggagaaagttgattagttttttggttgtttttaaaattttggatgtaggaattgtggttagaaagtatttggatgattgtattttattagggatatttgagtgtttttttttaggatttggatttagaattaatgttatgagatttttttaataggataaggtgaggtagtgagggttgaagttatttattgggttatttaaatattaggttttattgttgataaaagagggggtttttggtttggttggttatttgtgtttggtttgatgtgttttgttaattaaatgtatggatataggtttagtttttaaaggggtaatagtgattttagtggattgatatttatcgtattatttatatgtgtttttaattatagtagaagttgttagttaattgaattttgttttgaatttaaaaaatttatttttaaagtaagaaaatggtataaaattagttgataatgtaagtgaattttgtatatttaattattttaagatattggaaaataaaatattttgttattttgaggataaaagatgatttttttaaaaatgtaaatgttttttataaatattaaagttaaaagggagagagatgtaattagaattcgttaattgatatattgtaaattaatttttttttataaagtattgtattataaatattaaaatgaagtgggtaaattagttttgtagaaaattattttttaggttgatgtttataatgattaattattattgaagtaatgagaaatgtgataattatagaatattgttgttatagtatgttgaaaaaatatgtattttgtagtgaatatttagtagaatagttttgatttttatttggagtttttgataatatgatattttaattgttgttttttatagatttttaaattgtaaatataaaatagtaattagttaatataataatttattattttttatttatgtttgaaagttttttttttgttgatgtcgtggaaatgaatgtagaggtagatattattagttgtatttttttttcgaatgatatttattatatttttgttattttaaaataga

SEQ ID NO: 1822 - DNA, 7057 bp, Artificial Sequence
  chemically treated genomic DNA (Homo sapiens)
tttattttggaataataaggatatgataaatgttattcggaaggagaatatagttaatgatatttgtttttatatttatttttacggtattaataagaggaggatttttaggtataaatggagaataataagttattatattggttgattgttattttgtatttgtagtttaaaaatttataaaagatagtaattaagatgttatgttattagaaattttaggtagaaattagagttattttattaaatgtttattataaaatgtatatttttttaatatattatagtagtaatattttgtaattgttatattttttattgttttagtaatgattggttattataaatattagtttagaaaatagttttttgtagagttaatttgtttattttattttagtgtttgtgatgtagtgttttataaaaagaagttaatttgtaatgtgttagttaacgagttttaattatattttttttttttttaattttagtatttgtagaaaatatttgtatttttaaagaaattattttttatttttaaagtaataagatattttattttttaatgttttagaataattaaatgtatagaatttatttgtattattaattaattttatattatttttttgttttaagagtagattttttagatttaaaataagatttagttagttggtagtttttgttgtaattaagagtatatgtaaatagtacggtaaatattagtttattgaggttattattgtttttttagaagttaggtttatgtttatatatttgattgatagagtatattaggttaaatataaataattaattagattagaagtttttttttttgttagtagtgaaatttaatatttggataatttagtggatgattttagtttttattattttattttattttgttagaaaaattttatgatattaattttaggtttagattttaagagaggatatttaagtatttttgataaagtgtaattatttagatgttttttagttatagtttttgtatttagaattttaggaatagttagaaaattaattaatttttttttttatatttatgattggtattttgttaatattagttaattatattttttagtggaagtgaaaaaatatatgaaaataaaataagttttgatggttttttttttttaagaatgtaaaatagtttattaagttattttgtttttttgtttttgtaagtttaattatttaaaaatgtaaaatattttagagggagattgagtattttgtaattataattagtgtttgtgaagaattatatagaaaatgttatttttattaaaagattgtaaattttgggatttatttatgtttatgttaatttgaagtattatgaaattttagattaaattgacgttttttttgtttagttggaaatttaaaagaaaaaagttgtttttataaaaaaatagtttatttttaaagtagaattttagtaaataattatagttagtgcgtatatagtgtttattatgtattagatttttttttaagttttttataaggttaaatttatttaatttatgaaatggatattaatattatttttattttttagatgtggaaattgaggtatttgttttaggataatagagatggtatgggtagagttaagatttgaatttaggtagtttgattttagattttaagattttaattagagataagaatatgagattttattgattaggtaataaatattatgttataagattatttttttatttggtttttattattatttattatttgggtagaattaatttatgaattagtaaggattttaaatttagttaataaaggtttgtggtttattttattttgtttaattttttatgaagatatatagtaaaaagtgttgatttaattatttgggtgataagaaaaatagtaagtaaatatataaaaatttttatgttgatgggtagtttagtggtcgtagatcggggagaagtttggttgtatgtttcgattatgttgtgttaaagttgaaatggtattttttggtagagaaggtggtagaggtagtatgagaagattgttaaagtggttattttatttaggattagttaagagcgtataatcgttgtagtttatattttttggaaaatgtgtttcgtagtttttttttttagtaaaaacgttacgtaaaggttttttgtttttttttttttttttaattatatttatattatttatttttaggtttttttttttgtaagtaaagaagaaataagtttttttttttatatatttatttttgttttgaaatgttatagattttttaatagataatggtagtatttttttattattgtttaattttttgggtttattagttttaaggaaagtgataaatttatttattagtaatagatttattttaattttaattttattaatacgaagcgggaatttggtatatggagaaagaaatatatgttaataaaagtttggattgattttatgattggtgttttattaattaattgttttttagaattttatttttttaattattaaatttaatgaaagtttggtaggtttttaggttaagtttatatggtataaagtaaaaaaagtatgttgatggttattaaataaaatttagttggaaagataatgtaagaaaaataaattttgtaaaggtaaagataagtagggttttgagggaaattaggttaagattttggaattgaagttaaagtaaaaatcgtgatttgacgtagttaagttgtttgtgtatattgttttaatttattagataattgttgatgttgatgtaatagtttagaatagggaaaataggttgtagttaagagatttgaattttagtttttgttttattaataaattgttatgagttttgggtaaattattttatttttttagattttagtttttttatatttaaaggaggtatttgtatttgttttgtttattttgtaggttgttgtgaagatttaataaagatgtgtatggaagaaatttgaaatacgttaagtaataaataatttttattttgaattttttggaatttatttagtttaagatatgagtttaataaataattgttaattttttatatgttggtaaaaattaaatgaataataataatattaaaaatattttaagttttgataatgaattgaattattgaagtgtgtaggattatatatttttgaagggtttttgtattattttattagattttttttaaattaaaagtagttgtggaaatttttattttatatttaaatttggtttagaaattatgataaaattgttttgatgatttttataaaattgttttgagagataaataggaaacgtaaaaattgttttgataggtatgttatttatatagttagtatttgtttttttttttttttacgttttagtattttgttttgggtttagatttatgtagttttttattatatttgttaagtaggtggtttcgatgtacgtgatgaattttgattagttaagttagaggttttggtttttagataagtaattttagttttattgaaggaaaattattatgagagttaaaatgggtttaaggatttttgtattgttagttttatataatttgagagtgttagagttgtaggggttttgtaattagtttagttaagattcgagggaggggaggttgaaggttatagatttgtttacgtgattaatttgaaaaaatagttgttgtttaatttttttgttttaattttttgatttttagttttttatagtttgatttttgtttataatatttttttgaaattgattttattattattagtttaataatagttttggttgaatattttttagagtttatttttagcgatttttttattattttgttgatttattattttgttgttatttttttgaatgttttttttatttgaattttatattattttatttttaagggtttttgttttttagaatttttttttatgttatttttttttttttttgtattttttaaaattttggtattttttttttttattttttttttttttttttttttttttttttttttttttttttgttttttatggttttattgggtgatttatgggttttatgaatttttatgggttttaattttatttttattgtgataaattttaaatttataattgaagttttgaattttagagttgtaagtatagttatttttgaaaatttttatttggatattttaaagttattttatatttggtatgttttaaaattaatttattttattattttaattttaatttagatttgtttttttttaagatttttcgtatttttgtgaatggttttattatttatttaattgtttaagttagagatttgggatttatttatgattttttatttttttttgttttagattgttttaattttagtggtttttttttttaaaaattttggttgttattatttttttttatggtttttgttattattttattttaggtttatatatttttttttttgtagattattgaattgtattattttaatttatttttttgtttttttttttgttttattttatttattttttatattgatagtaattgattttagaatgttttgtttgtattttaattgttgaagtttttttttttttttatttttttgtttggttttttattataatgttataattggttatttttttagtttttttatttgggttgtttttttgatttttgattttgtattagaagttttttgttttagaattttttatgtttgtttttttttaatagggagttggtttcgttttaatatttttagttgtttaatacgtttaaaaatgattattaaatttagtttttaagaaatgtatatatgtataggagtgtatgtaagtgtttatagttaaaattaaatattgattatttttttttaagtttatagaaagaattaagttaatggattgaagttttattttttagttatttttatatagaatttttttaaatattggttatttttttttattattatttttttgttagttagtgattgatttgtagtaaatattaagggaaaaataagaaaaataatggattatattttaatagtttgtttttgatgtgaatatgtttgtggttgtgattttatattgataatttagaatatagttataatttttgtttggaaaattatttttagtatatatgaaagagttaaatataatagtattttgtttgttgtatgaagggttttttaagggtttttttttttgaatatatttgaaaagttttagattagaggaaagggtttcgatttttaatatggtagatgagttgatttttgtttatatttttttttttatcgtttacgatttattaggttttaaatattttaagttagttttattttttgaaatgtgttgtgtttatttatgttatttgtgtgttaaggttaatttttttttgttttatttattaatgttttttgtttgtttgtttgtttgtttgagataaagttttattttgtcgtttagattggagtgtaatggtacgattttagtttattgaaatttttattttttaggtttaaacgatttttttgttttagttttttaagtagttgggattataggtttgcgtaatcgcgtttggataatttttataaaatttttttagtagagacggggttttattatattggttaggttggttttaaatttttgattttatgatttgttagtttcggtgttttaaagtgttgggattatagatgtgaattatagcgttcggttatttattaatgtttaagtgaaatattttgttttagttgataaggtgtttttttttgtatttaatttttttgttgttgttgttgttgagaaggagtttggttttgttatttaggttggagtgtagtgttataattttggtttattataatttttatttttcgggtttaagtgattttttagttttagttttttgagtagttgggattataggcgtgtattattttgtttggttaatatttgtaaatttagtagagacggggttttattaagttggttaggttggttttgaatttttgattttaggtgatttatatgttttggttttttaaagtgttgggattatataggcgtgagttattgtgttttattttttttgtgtttaatttattatagtatttgttatattatattataatggatttgtttgatttttttattattagttattagaggaaaaagataattaaaataaataaataaataaaaaaatttagaaattttggtttttgatatattgtaaggagttagtaaatgtttgttaaattattaaatattattttaaagagatagaaggggaagttgtaaaatattttaatttgggagaatagcgtttggttagtttttttagtaatatatgttagaatatatttatattttttttaatttttttaatttttttttttttttttgggttagttttatttgtttattttggttttttttattatgttgttagttttttttaaatgtttggttatttatttatttatgaatgaaaattcgtgttggttattatgggtagatggtatgagttttttttgtaattgtgttgatttatttgttttttttataaattttttttcggaatgggagggttgattgtgggttttgtttaagtgggtaggaaatgttaatagttaggtttttttttaggttatgtgggtggagaggtaggaagattagggatttttataattgatgaagtaaggagggtttttttttgggggtggagttttgtagaaggttttatttttgattaatattggttttttttttggttttgtttttttatttgttgtggaggttttagtattttttttagagttttttttaggtaattttagattgagggttaaggttaaatgttgttgttaataaatggtttattgggggaaaggagagagagggagagggttattttttttagttgttttcgttgtcgttttttaa

SEQ ID NO: 1823 - DNA, 6051 bp, Artificial Sequence
  chemically treated genomic DNA (Homo sapiens)
tgtgataaatatgttaatttagtggaagaaaagatgggatgtgtggaaaaattagattatatatggagaaaaatagatttttgttttattttataaaggtggattttagatggattaaagtttaaatataaaatttgtgtaattatggattatatttataatattaagtataaggagattttgtaaattagtataaaaaaaggtaagaaatttagtttaaaaatgggtatggtatgtgaataggaaatatatataaaaaggaaaatttgaatgttaataagtatatgattagatgtttaattttataagagattagaaaaaggaagattaatagataatgatatataattttatagttataatgtttggtaaaaattaaaagatggataatattaagtagagttgaggatatgggataaaatagttttttataattggtggtggtgttaaggtatttagttatttagatgagtatttagaaattatttagtgaaattaaatatataggtgtatgtttgtgaataaataagttttagttaggagtgtattggggtttttgtttatttttggggaaaattagatttggtttttttattaatttggtagatgtttttggaagttttttttaggtttgtgaaggtttatagtagttattttttttatgtattattttttgcgattgttgagttatttttggagttttgagttataatttattgagtttatttttttggtagaatattggatggaagaaagaaataggaattttgttttttttatgtttttgtttttttaatttttatgtgattaatattttaggtgtagtagtatatttaaattttttttttagatggttaagataatttttgaaggaaattataatgtcggagggattataattgaagataatttgaatttttatttaatgagaagatattttaaaaaattataataattagtataaggtggttttttttattttgttttttatataaatttgtttttaagtgttatttaggtttttttgaatttttatggttcgtaagttttttttttttttttaaagagattgttagttttgaatattttttttttgtttatttttaaggaatttttggttttagaattagagattttgtaggtgtaattggggagggtagagtaagatttagtaaagtttttttatttaaatttttagtttgtgggagttattagtttttgatttatttattaagtttattttttaaaggtaaatattattttttttagtatttatagaattaagatttatttgtaataattatttttttttattaataaggtttggaaatattttaaaatataatgggtttttgttattgtatatagggttgttttatttttttatgattttgttaatttgtgatgtttggtggtattattgaagattaatatgagtgtttaaagatgttttttttgattttattttagtttagattttttttatgtttggaggatagtaggagagttgggggtaggtatggttttttaattttttttgttgtagaatgaattaatagaagtagtagggaagaaggagatgtaaaaatatagtataatttttattggatagtgttggaagtttttgtgggagtttgagatagaaaaatcgagaggtattagtttgaaatggagaggtttattagtttagggtaggattttagagagatattggatgttaaacgtggattttgtatttttttttgtaatttttttttttttttttattttgtttgtttttaatggaagaaggtcgattatattaagtttatagatgaattatttggggaaagatttattaaatttataatattttttgagtgtttattttggtgttagggattattttaagtgtattaaatgttttgatttatttaatttttttaattttcgtaaagtaagtattattatgattatgtttatttttataaatgagaaaattgtggtatcgaggagggaaggtgatttgtttagtttatatagttaatgagtagaagagttgggattggaagttatatagtttaattttagaattatttatttttaattattatgtaatattatttttttatttaggatatggtgtattttttttatttatttgaatttttgatatttttagtagaatttttataatttaaaagatatgggttatgtacggtggtttacgtttgtaattttagtattttgggaggttgaggcgggtagattacgaggttaagagatcgagattattttggttaatatggtgaaattttatttttattaaaaatataaaaattagttgtgtgtggtggtatgtgtttgtagttttagttattcgggaggttaaggtaggagaattatttgaatttaggaggtagatgttgtagtgagttgagattacgttattgcgtgttagtttggcgatagagtaagatttaattttaaaaaaataaaaaatatatatatatggttttggataattttttttatagttattttgggatttttaaatagtttttttgttgtttatatggtagaatttttaaaattataatttttgattatgaaatttaaagttagttgaatttataacgatgaataaagttatatgtgagtttaaaagttcgttaattcgtgtattgttttgttagttttattttttgtattgtttaagagtggagagtgggatgtgagtaggagtgtttggtaaggaggtagtaggagttgacgttaaagagttttgggtaacggtaagaagtttgttttgtttttgaattaaattttttaatagaaggtagggaagtgagattattaggtttgttttttaaaaagtattttttttatagtattttattgggtgatttgggtttgggaaaggtcggtggtagggtatttgttagggtattattgtagtattttaagtgagagataaagtttgattttaggtaatagtagtaagaaaaatgggagtagcgaggatggggtaggggggtagtatattgaggggagggtaaggaataggttttaggtaaaagcgatagttttgggtgattagttaaacgttgggggagaggaaaagaaaggagatgaagttgttattagaaagagtggttttaggagaaaggggttgtatagggttggggatggggtgggatgggtagaatgtattagagaaatagtatttttggggttggtgtggtataggtgagtgggtttgaatgatagtaatggaaattttaaagtatgatataaaaattaacgaaatttgaaaagtaataaatatgaaaaaaatgaaaaattttgatttatgggggatttatttggtttttattggagaatgattaggattgaagttaattatttggaagttattggtatataaatggtatgtgaggttagaggaaatggtgagatgagtttaagtagagaggttagttttaaataataataataattattaaaaaaaaaaaaaaaaaaaaaaaagtaaaataaagaaataggatatagagttagatttgaatgttagatatatgatgaataattgtttagtatattttatgtttggatatgtttaagatttatttgttttaaaaataatgtattatttatttgaaatttaaatttaattgggtattatgtattttatttggtaattataataggggtagtatatagaaatgttggtagggattaggtaggttttttagatagtgaggtggtgtgtgagatataggttagtggtggaggttgggtgatttagaatttttgttttttatttttaggggtagttgttatatattttttattgattgggtttgtagagatggtttcgagggtgtttgatattttgatattttaaaatagaatagaaatatgtattttaatgtgtatttaatatatatattttaaaatatttttaatgttgatattaaaagtggttagttgggtttagtgtagtggtttatgtttgtaattttagtattttgggaaattgaggtaggaggatgttttgaagttaggagtttgagataagtttgggtaatatagtaagtttttatttgtataaaaaaaaaaaagaataaattagttaggtgtagtgatttatgtttataattttagttatttaggaggttaaggtaagaggattgtttgagtttaggagtttgaggttgtagttaattacgatagtattattgtattttagtttgggtgatagagtgagattttgtttttatttaaataaataagtaaataaataaattgggtaaataatgaaaatgaaaatattgcgaaatataaagtagttttgtgggttttattggtttgtagtttttgatttaatttttaaagtgggtgtagtaggtttttaatttgtaaattatggtgatcggtaggttagggtaaatggtagttgtgtgtggggaagagatgatggtaatagatgttttttttttgtaaaaattaaaatgtgggagtgatttttttggttatgattttatggtttttttttttagagttatttttagtaaaatttttatagtttaaaaaatacggttttgaataatttttgttagagttattttgggatttttaaatagttttttggttgtgtatatggtagaatttttaaaattatataattataatgtataaaaaagtatgtaattataatttataaaattatagttttattgattatttttttgtagttgggagtagtttatattaatagggttatatttttatgttgatttgttttgtaggattttaggaaggtgagtatagtttattaatttgtttgggtagtatagcgatagtaattgaggttttgaaggttgttattagaaaattgtgggcggaaatttttaggggtttgttttgagttttttgaggttttttagttttagttgtaaagtgagtgggtgtttttttgagaagtagaattagagagagagagatagagaaagagaaagatagaggtgttttttttagttatggaaattttataagagagatttagtttgtttttttttgagtagttagtaatagggtttcgtttttgatattttagtttttataggattgagaagaagtaaaatcgtttgttggggttggtttgatttattagttgttatgtagtagttttttaattatttatatttttagatttattgggtggatagtagtgttagttttttttgggtttttttaggtatagtttttttttgtttaatttttgtgtttagaaggtttggttaaaggaggttattattattatcgttatcgttattattattattttcgtcgtcgtcgttattattgtttttattatcgttgttatttttgaagaagagagggaattatagtataggtttgtgtttttttgtgatgttttttatggttttggttgttttggtaggattgggtttggggatgttttagtttttttatttatagaaggagttggtagaatttcgagaggtaagtttgtcggtagattgttgtgttttggaggtattaggtataaggggatggagggtttattgtttggtttgtaaagtgttttttaatttttttttttttttttttagaaatgggttgttttagttattttattttatagatagagaaatggaggtttataggggtgaagggaatattttttattttgtaaagaattagagtttaatagtttgtttttttttagttgttaatttagtttgttgaattatttattgttttatatttattgatttaaggagtaaaaaataaataaataaaatttttaagttttgtttggaagtaaatttgtttagatgattaaattaaattttgaaaattggtacgattttaaattataaaattgagggatagtgaggtaaaattgtttggttaaagtttaagttagtagaatttttgaggtatttggattttttttttagggtttggtttatttgacgattttgttttttttgtttaaagaattttatttttattatatattttttttttttttgttttattagt

SEQ ID NO: 1824 - DNA, 6051 bp, Artificial Sequence
  chemically treated genomic DNA (Homo sapiens)
attagtaaaatagaaagagaaaagatgtataataaaaataaaattttttaagtaaaagaggtagaatcgttaaataaattaagttttggaaagagaatttaaatattttagaagttttgttaatttgggttttggttaagtaattttgttttattgttttttagttttgtgatttggaatcgtattaatttttaagatttagtttggttatttgaataaatttatttttaagtaaaatttaaaagttttgtttgtttgttttttattttttaaattaataggtatgaggtagtaagtggtttaatagattgagttgataattgaggaaagataaattgttgggttttgattttttataaagtaaaaaatattttttttatttttatgagtttttatttttttgtttatagaatagaataattagaataatttatttttaagaaaaaaaaaaaaaggattgaaaagtattttgtaagttaggtagtgggttttttatttttttatgtttggtgtttttagggtatagtagtttgtcggtaggtttatttttcggagttttgttagttttttttgtaggtggaagagttgaaatatttttaggtttaattttattaaggtaattagaattatgaaaaatattataaggagatataggtttgtgttgtggtttttttttttttttaggggtggtagcggtagtggaggtagtggtggcggcggcggcggaggtggtagtggtggcggtggcggtggtggtggtggttttttttgattaggttttttgggtatagaggttggatagggaagaattgtgtttggaggggtttagggagagttggtattgttgtttatttagtagatttggggatatgggtaattgaagggttgttgtatggtagttggtgagttaggttagttttagtaaacggttttatttttttttagttttgtagaggttgaggtgttaaggacgggattttgttgttgattgtttaagaggaggtaagttggattttttttatagagtttttatagttaagggaaatatttttgtttttttttttttttatttttttttttttgattttgttttttaaagaaatatttatttattttgtagttgaagttgagaagttttaagaagtttagagtaaatttttggaagttttcgtttataattttttgataatagtttttaaggttttagttgttgtcgttgtgttatttaaataggttagtaggttatgtttatttttttgggattttgtagagtaggttagtatgggggtatagttttgttagtgtgaattgtttttagttataggagaatggttagtggggttataattttatgaattataattgtatgtttttttatatattataattgtataattttaagaattttattatatatataattaaaaaattatttaaaaattttaaaataattttaataaaaattgtttagaatcgtattttttaaattataaaaattttattgaaaatggttttgaggggagagattatggagttatggttagagaagttatttttatattttagtttttgtaggaggaaaatatttgttgttattattttttttttatatataattattatttattttgatttgtcgattattataatttataggttaaaaatttgttatatttattttagaaattagattagaggttgtaaattagtggaatttatagagttgttttgtatttcgtaatgtttttatttttattgtttgtttagtttatttatttatttatttatttaaatagagatagagttttattttgttatttaggttggagtgtagtggtgttatcgtagttaattgtagttttaaatttttgggtttaagtaatttttttgttttggttttttgagtagttgggattataggtataagttattatatttgattaatttatttttttttttttttgtatagatggggatttgttatgttgtttaggtttgttttaaatttttagttttaagatatttttttgttttagttttttaaagtgttggaattataggtatgagttattgtattgagtttaattgattatttttaatattaatattaaaaatattttaaaatatatatattaaatatatattaaaatatatatttttattttgttttgaaatattagaatattagatattttcgaggttatttttgtaaatttaattagtgggaagtatgtagtagttgtttttgagaatgagagataggagttttgggttatttagtttttattattggtttgtgttttatatattattttattatttgaaaggtttgtttggtttttgttaatatttttgtgtgttgtttttgttatggttgttagatgaaatatatggtgtttagttaaatttgaattttagataaataatatattatttttaggataagtaggttttaaatatgtttaaatatggaatatattaaataattatttattatatatttgatatttaaatttaattttgtgttttatttttttgttttgtttttttttttttttttttttttttggtagttgttgttgttgtttaaagttggtttttttatttgggtttattttattattttttttggttttatatattatttatatgttaataatttttaagtagttagttttagttttaattattttttaatagaagttaaataaattttttataaattaaaattttttattttttttatgtttattattttttaaatttcgttagtttttatattatgttttgggatttttattattattatttaggtttatttatttgtattatattaattttaagggtattatttttttgatatattttgtttattttattttatttttaattttgtataattttttttttttgaggttattttttttggtggtaattttatttttttttttttttttttttttaacgtttaattggttatttaggattgtcgtttttatttgagatttgttttttattttttttttagtgtattgtttttttgttttattttcgttatttttattttttttattgttgttgtttggggttagattttattttttatttgaaatattgtaataatgttttaataggtgttttgttatcgattttttttaagtttaaattatttagtaaaatgttataagaaaaatgttttttaaaaaataaatttaatgattttatttttttgttttttgttggaaggtttgatttaggagtaaggtaagttttttatcgttatttaaggttttttagcgttagtttttattgtttttttattaggtatttttgtttatattttattttttatttttaaatagtgtaagggatgagattagtaagatagtgtacgagttaacgagtttttgaatttatatgtgattttatttatcgttatgaatttaattaattttaaattttataattagaaattgtaattttaagaattttattatatagataataaaaaaattatttgaaaattttaaaataattgtaagaaaaattgtttagaattatatatatgtattttttatttttttgagattgagttttattttgtcgttaggttggtacgtaatggcgtgattttagtttattgtaatatttgttttttgggtttaagtgatttttttgttttagtttttcgagtagttgggattataggtatatgttattatatatagttaatttttgtatttttagtagagatggggttttattatgttggttaggatggtttcgattttttgatttcgtgatttgttcgttttagttttttaaagtgttgggattataggcgtgagttatcgtgtatggtttatattttttaaattataaaaattttattgaaaatgttaaagatttaaataagtgggaaaaatatattatattttggatggggaggtggtgttgtatgatggttgggagtgggtggttttggagttaaattatgtgatttttaattttagtttttttgtttattaattgtgtgaattggataggttatttttttttttcggtgttatagtttttttatttataaaaataagtatgattataatagtatttgttttacgggggttgggaggattaaatgagttaaagtatttgatatatttagaatagtttttagtattaaggtaggtatttaaaagatgttgtaaatttagtgaatttttttttaaataatttatttgtagatttaatataatcgatttttttttattaaggataaataaagtggagagagggagagaggttgtaggggaaagtgtaaagtttacgtttgatatttagtatttttttgagattttattttgaattgatgagtttttttattttagattagtatttttcgatttttttattttaaatttttataggaatttttagtattgtttaataagaattatgttgtatttttatattttttttttttttgttgtttttgttgatttattttgtaatagaagaaattagaagattatatttgtttttaatttttttgttattttttaggtatagagagaatttgaattgaaatagagttaaagagagtatttttaaatatttatattgatttttagtaatgttattaaatattataggttggtaaagttatggaaaaataaaataattttatgtataataatagggatttattatgttttggggtatttttaaattttattaataaggagaaataattgttataagtagattttagttttgtgaatgttaaagaaaataatatttgtttttgagagatgaatttaataaataaattaaaggttggtggtttttataggttgggaatttaaatggaagagttttgttaagttttgttttattttttttaattatatttgtagaatttttgattttggaattagaggttttttgaggatagataaaggagaaatatttagagttgataatttttttgaggaggaggggggggtttacgagttatagagatttaaagggatttgggtgatatttgggagtaaatttatatggaggataaaataggagaaattattttatattagttgttatgattttttaaagtatttttttattagatgaaaatttaagttatttttaattgtggttttttcggtattgtaattttttttagaaattgttttaattatttagaaaaaggatttaagtatgttgttatatttaggatgttagttatatggaggttaaaaggataggggtataaagagaataaagtttttattttttttttttatttagtgttttattagggaagtggatttagtggattgtaatttagagttttagaggtgatttagtagtcgtagagagtgatgtataaggaaagtagttgttatgaatttttataaatttagaggagatttttaagggtatttgttaagttagtaagaaaattaaatttgattttttttagaggtgagtaaagattttagtatatttttggttgaaatttgtttatttatagatatgtatttatatatttaattttattaagtgatttttggatgtttatttgagtggttgaatgttttgatattattattaattatgaagaattattttattttatgtttttagttttatttggtattatttattttttaatttttgttaagtattatgattataaagttatatattattgtttattgatttttttttttttgattttttgtgaggttaaatatttgattatatgtttgttggtatttaagtttttttttttgtatatattttttgtttatatgttatgtttatttttaaattgggttttttatttttttttgtgttgatttgtaggatttttttgtatttaatattatagatataatttatagttgtataggttttgtatttagattttaatttatttggagtttatttttgtgagatgagataggagtttatttttttttatgtatgatttaatttttttatatattttatttttttttttattgaattggtatatttattata

SEQ ID NO: 1825 - DNA, 9267 bp, Artificial Sequence
  chemically treated genomic DNA (Homo sapiens)
  unsure 8428: n is a or g or c or t
tgttttttgttttttttttgtgattatatgtttattgtaatatttgatgttgtttaatgttttttttttttgttaatgttaattggagtttcgtaaagattttgagtagttaggatgtgtatattttatttttatgagatagagaaaggattgaggtttggagatgttaaaaagattcgtttaaatattttcggtaagttaatggaagaggatttgaatttagattatttgtttttagtgtagtgagaagatgattttagaatgagttttttgggggaatattttttaatcggaatttttattgatataattaaagattagtatatagttgtttttaataacgagcgtttatatacggtgtttagtttttttcgagggtaatatttgtaaaattagtattatattaaaattaagattggatattaatataattaatttatgattttatttagatttgtttataattgtattatgtgtatgtgaaattttaaataatttaatcgtgaggtttacgtatttattattataaggagattgaggtatgagaatatttagaattaagaggtggaggttgtagtgagttaagattatgttattgtattttagtttgagtgatagagtgagattttgtttatttcgtatataaagaaattgaggtttaaaagagttaataatttttttacgatcgtatagttaataaaaataagaaattaagatttaaatttaggttagttttttaaaagtatttacgtttaattattatattaagtgttagaaaaggtatggttaggagggttggttttaatttagagggagtttaatagttgaatttttaagggagggaatagaggtttaagagggtatttgaaggtgtggtattttttattttaggataggttggggtttaggtaaagtttgggagtttgggagggtagaggtttggggaaatttcgtggtttatgtaatattgatttttaagttttagagttaggtttagggtgaaatttataggttcgaatagttgcggaggtttagttgtttttattagttgaggttatagttttaggtagttgtttattattttttttttttagataatttttttttttattttttggtttttatttggggatatatgtttttttcggtgtttttatgtaatgttgttatttttttttttattttagattttaattttattttttggggatggggatttttttttttttttaaataattttaaaggatattttgtcgttatttattagagagtttgttttgatttttattttgggaattttttttttgaagtttaatttttatttattttgtagtaattgatggtagggatttaagtgaagtggttgttaaaagttatatttagtagtataagttatttttttaaattgaattatagatagaagtttattatataatagattaaggtttagttgttttgtttaaagttgggagagggtgagaaggttgttttagatgtattttgtggaattttggggtttaaggagtataatttgtaaattttggggattggggttagggaagggaggatagaggagggttgggggattatgtttatgattttggttagttttttgtatttgagtagggtaggttttaagttttttttttgtatggttattgtggggggtaatttaggttttttttagttttaaaggtttagggagaggtgtttggagaatttagggtagcgattggaagtaggagggcggtttaaggtttaggtagggaaatgattaattattggttgtttagttttaggtatttttagatttattttttattttttgtagataggtttggtttagttttattggttattaggttagttcggggagaaaaggataaggtttttgattagggtatttagttagttagtttattattgtttttttaattttagggttggaagatttgaatttttgttttatgttaaggatgggttgtaggttggtttttagttatttatttatttttttatttatttttttatttgggatcgtgttgttatattttagtacggttttttttagtttaggaggttttgttgatagtgatttatagtttttttttgtttgttcgttgaggtttgtttatttagggagcggagcgggagcggttttttgttttaggtgttttattagggtgattgttggtagtagttgcgtttgtttatagggttttatgagggttgggattcggtagggagggtaggttaggggtttttgtggtaggattgttttttagagttttttggtatttattttggatattttgtgggaatttggttgtagttatatgagtttatgtttatttgagtagtggataagtttaggttagattttgtttttatttttaaagttttagtgttttagttgtttttttatatatatatatttttttatgtatatttaggtatgtttttagatataaaattatatatattttattagattatgaatttttgaagaaggagtgtttggtttgtatttttaatttaatgtatagtattgaggtttttaataaatagtttaattgaatatatgtagattgataaatttaagatttagtaatataagaattagttttttatatagatgtgttatttttttataggttataaatatatttgtttataagtatgttatatatatatatatatataagtatatatttataggtataggtaggtttatatttagaagtaaagatatttttatattaatttttaggtatattgatttatatgtaaagtttaagattttgattttttagtcgtatttttagtatagatttttttttatagtagtttgggttttttttttagagtattgagttttttttattcgtggggtttatttttttttttttttagagtttatgggttgtttatagtgttttagagtattgtgaggttttgagggtttggggaggtggttttttagttttaggcgatgagttgttatggagaggttaagtttgagataatgaggtagttttggagtttttattaagggagggtaggagcggggtagaggatatattagagtattggaaaaatttgtgaaagatgttttgttggggaaagtttataggatttaaatggttggagggtttgtatttggtagagatagttttggtttaggaaaggttaagatttaaatgtttatttgggaggagttaagaggttaatatttatttggttagaaagggattaaaagagtaggttttagttttgggttatcgtaggagttttagtttttttagggataagatgggggacgggggcgtttagtggaggaatgaggtgaaaatgtttatagggggtttttttggtacgaggtgtacgggtcgttttaagagaagtcgttagaggttattaatttttatgaggggtgttgttttttgaatattcgttttttttaggtttttcggattttgatgggatgtttagtaggtaggggtaggatgttttattttcgattttttaggagattagtgtataagtaaagattgtagtagtatagatggggatggtaattattttaaggtttttagtttagatgttattttaaaatgttatgttgagattttgagcgtttttagtgggagacgggtttgtttttttttagttttttttattgatttttttaagacggttttttttgtttttttttttaagaggggttgtgggatattttttaggggtttttttcgttagagatatacgggggtagtgagagaggttttttttaggaatgaggtttggaggttatttttgaatatttttataattttttaaaacgtttttttttgtttttattttttatagggggggttatattttagcgggcgtttagattgaggattagtttttttttaagtattttgtgtggggttttaggtttcgaggggagaagatttattttgtaattttaggggtttcgagtttggttttaattttgtttttcgcgagtcgtagtaagattagatttagttttagtgttaggttttagcgggagagtcgtgtttcgagtatatattgaaaagattttaaattataaggattttcgttgtgtgttttgatttatttatttagagataagtttttatttatttgtttaggttagttttttggggtgtttaaagattttttgtttaggttttatttttgtttagtatatatggaatgggtgtggtggtttacgtttgtaattttagtatttcgagaggttgaggtaggaggattttttgagtttgggagttcgaaatagtttgggtaatgtggtaaaattttagttttattaaaaatataaaaattagtcgggtatggtggtgtataattatagttttagtaatttaggaggttgaggtgggagaatcgtttgagtttagaaggttgaggttgtagtgaggttttgtgtagtgaagatttgtatagtgttgaatagattttgtggagtgggggtgggtagagtggatggaaaggttgagaaattgtagatattgttttgagtgttataaatggaaatgtagtattttaggtagtattgtttgtttaggggtaaggaacgaagtggatattagtaggtggttttgttgttatgtgggtgttattattttttttagtaggggagaaaataggttttttgttgtaggttatatagtttatgaggggtggaattagatttattttaggtttcgttgatttttgtataacgggggttagagtttttttgaggaaggtaggtttttttttgtatttgtattgatttttttttttttttggagggagagtagagattatgtttgatatagaagaggtggtggaagagtacgaggaggagtgagtatttggagtattttgtttgagtggggttttttttcgtcgttgttttgatatttggtttaggagttttttagttgtttttcggattttgggtagaagtagttgtgtgtgttttgggtatttcgaggagagatatagttattttttttttatttttgtatttttgggttgtagattttaggtagagtataggtcgagagatttcgggaagtatagaggtttagttttagggttattagtgtttttggttagttttggttaggggttatgaatagagaagttgagatgttgggttttttgaaattgattgaggaaggtttagtgattttttagaggtatagagttgattatgttttttaaattttagtttagaatttagtgttattattttgttttggatttttatttttttatgatagtgttttgtttatagttttattttagagggaaattagggggtgggatatagttaatttaataattatagaggatagtggttattagggaggagatagaggtataggtacggttattgtttttatagaatttatttttgttgagatgttaagatataaattgggagaagaaattagtaattgggggtttggtgtggagggcgggttgttggtagtgtaggagttttgaggagagggagattaggggttggaatagttagggggttgtgtggagaaggtaggttttatttgtgtagaatttggaaagataagagatttgggagagggtaggattttttagaaaggggtatagtttgggtaaagatggaaagagtaagtgagtagaacgttggtgagattaagttggttggggcggaggtttgcggaggatggtaggaggtagttttgtatgagaacggtaggttaggttagtgggtgttattgtaaggtgggtagggtagcgtggattttattaggtaataagggaaaagaaagggggattatttttggggaaaggttagtgtgtgtatgtgtgtgtaggcgtgtgtgtttgtatgtgtttgtgtgcgagttattgatagtgttttttgttgtttttagggagtaggaaggtaagcgtaaacgtgtgtatttatttggattaaagatagtttggttcgaaattgatttattttttttttttttttttgttgtttggattttttttttgagtagaagtagttgttgaaggtatgtgttttaggtaggtggagagttagaaaggggtaggtttagtaatgtggaaattttgggagttttgggaaagtagtttatttgtttttgttttttatttttagttgagtaagattttttaataatagtgttttttaaaatgggaattagttttatttgggttgttcgggttttgaggtaaacgatttaaatttgttttttttgtttgttatttgttttaaatatattgattattttttttaattttttttgtttttttttttttttattatgggaaattttaaatgtatataaaggtagtaataataataataatggttttttttgtttaaggtatttattattagttttaataattattattttagggttagtttttttttttttatattttattttttattagttattttggagtagatatttaaaattgtttttaggtattatgttagtttacgttttaagatttcgttatatcgtatttttaagagataagtattatttaaaaattataattataatgttatgatatgttttaaaagattttatttagtaattttttaaatgcgattgtgagtatgaaattgtttagtgatttgagacgttttatttcggtatgaagatttgttatgattttgagtttgtagaggttttttttgttgtttttatgttgatcggttaatttatcgttttttttagttgtgggttttatatttttttgaaagaacgtttttatttttttttttttttgagagtttggtatatggaaatgatttagaggttttattttagttttttttttgtattttaggtaggtggattttgttttttagtggtttaggtattattttagtatgtggtatgtagatattaggagaagggtttttatgaaggtttaaggggggagtttaggtggtttcgtttttgttttttatggtttttagggaaaatggggatttttttgtatatttagggttgttttagggttgtttggttaaagaggagatagaagagaaatttataggagaaattgaaagaggttataggcgttttttttggtttttaaggaatattagatattttagaagttattagaaatatatttttgaataaaaaatttaattggttttaaattttgttgtgttttttgaatagatttttgatatgatatttttttttttgttttggaggattttttatttttttataataggtttagggtggtggagtttgagatatagatttttggatttgggattaatttgtttgttatatatagtagaatttggttgtgagttagtagagttattttttattgtgttggggtttgagtcgtgtagtatttgttttgtttgttatgaatagacgagatttgttttttatatagttgaggatttggttgtaaatgattaagagagagtaacgtttagatgggtgtttattaagtttgtaggatagataatgttaggtgttttttttttaggagaggaattgttttatttgttggaattgtttttttgggtagatatttgtacgtagaataattgttgtagatgtagtttttttttttagatttataatgttggattttttttagatggggtagtatttttttaataggtcgggtaaattttttttggggttaggttttttaatgaggttttttaaagtgtgatttttggaaattggatatagtttgtaggatatttaagagttttatttagagtaggaatatgggtaggttcgttgagggtaggaaatttgatggaagagaattgttttttattttttgttttttaggggtttttgttttagtaagaaggaggttaaggttttgtcgtttagaggtattgtagttattatagatcgtatgttttttttgtgttaggtatttgttgggcgttttatgtacgttaggttatttagtttttattacggttgagaagtgagtagaatgatttttattttattgatgaggtatttgaggtttagggaagtaattgagagttgtttttgttgttggaaagtagtggtttgggaattggaatgtcggtttaattttaaagtttatatttttaaaattattgcgttgggtggttgtttttgtcgcgggttttttgtttttagattaatttgtttcgtttttttttttcgttgcggttattttttgaattttagaagaggaggattggagagaggacgaagacggtagtatagtttttttttttgtggtgttttttgttgtttgttgttttaagtgtagtttttttgtttaggggttttgttttggggggttggggggtgtgagtaggcggtagggacggagtgggttagtcgtttttttttttgtttntttaggtaataagatattcgcgtgtgtgaggttattatcgttattttttagaaggatattttgaggtaatttttgtaggattaataaaaggattttaggttttagagaggatttagatttgcgaagggaggatagagggaatgaaggtaatttttttttacgatggtgttttttttttgtttgaggttttttttttttttttgttaagaggtatttattttttagtgtattagtgaataggtattatagaatattttttataggtatagtttaggttaggcggtattttgttttttttatttgtttgtttgtttgtttatattaagtgtttgagtgagatgggggttatattttgttaaataaatagatgaaaatagaaaaattttgtttattttttggatagtacgaagatttagatattgagtgtgttatttagttatatagtcgtatttttttggtttttttgagatgtggattgagggtgtttagagttattaggtttaggataggagtttttggatatttcggtttaagtagagtatgttttgtggtgttagatacggggtggaatttttgggttggaaagttggggaatgaggtggagttttattattagggaggttgtcgggatgagtggggttaagttgggtggcgggaggtagtcgatagttaaaattaagaatggtagttttttagtacgttggttgtttttaaatttatttggatttagacgttttgatttttatttttatttttcgttgtttattttttgttttgggttttgtttgatagtatgagtggggtttgtttttttattttgtttgttttatttttttaga

SEQ ID NO: 1826 - DNA, 9267 bp, Artificial Sequence
  chemically treated genomic DNA (Homo sapiens)
  unsure 840: n is a or g or c or t
tttggagaagtgaagtagatagagtgaagaagtaggttttatttatgttattaggtagaatttagagtagagaatgggtagcggggagtggggatgggggttaagacgtttaggtttagatgaatttgggggtaattaacgtgttggggggttgttatttttggttttgattgtcggttatttttcgttatttagtttagttttatttatttcggtaatttttttgatgatgggattttattttattttttaattttttagtttagaagttttatttcgtgtttggtattatagaatatgttttgtttaagtcgaggtgtttagaagtttttgttttgaatttagtgattttagatatttttaatttatattttaaagaaattaaaagagtacgattgtgtggttggatggtatatttaatatttggattttcgtattatttagaaagtgggtaggatttttttatttttatttatttgtttggtaggatgtggtttttattttatttaggtatttggtgtagatagatagataaatagataagggagataggatgtcgtttggtttgggttgtgtttgtaggaagtgttttgtgatgtttgtttattgatgtattgggaagtgggtgttttttggtagagggagaagaaaaattttagataggaggaagatattatcgtgggagaaggttgtttttattttttttgtttttttttcgtaggtttgagttttttttgaagtttgagatttttttattgattttgtaggagttattttaggatatttttttagaaggtaacggtggtgattttatatacgcggatgttttgttgtttgggnaggtaggggaggaaacgattgatttatttcgtttttgtcgtttatttatattttttagttttttagaatagggtttttggataaggaggttgtatttgggatagtaggtagtagaaagtattatagaaggaaaggttgtattatcgttttcgttttttttttagttttttttttttgaggtttagggagtggtcgtagcggaggggaaaagcgagataggttagtttgggagtagagagttcgcggtaggagtagttatttagcgtagtggttttaagagtgtgggttttggagttaggtcggtattttaatttttaagttattattttttagtaataggggtaatttttagttatttttttgagttttaggtgttttattagtaaaatgggaattattttatttattttttagtcgtggtgaggattgaatgatttagcgtgtatagagcgtttagtaggtgtttggtataagaggagtatgcgatttgtggtaattgtaatgtttttagacgatagagttttggttttttttttattaagatagaggtttttaaagagtagagagtgggggataatttttttttattaaattttttgtttttaacgagtttgtttatgtttttgttttgaatgaggtttttgggtattttgtaaattatgtttagtttttaggagttatattttagaaagttttattggagagtttggttttaggggagatttgttcggtttgttgggaggatgttgttttatttaagaagggtttagtattataaatttaaggaaagaggttgtatttataatagttgttttacgtataaatatttgtttaaaaaaatagttttagtaagtggaataattttttttttggaagaaggatatttggtattatttattttgtaggtttagtggatatttatttagacgttgtttttttttgattatttgtagttagatttttaattgtgtgggaggtaagtttcgtttatttatggtaagtaaggtagatgttatacggtttaggttttagtatagtggagaatgattttgttaatttatagttaaattttattgtgtgtggtaggtagattggttttaaatttagagatttatgttttaaattttattattttaaatttgttataaggaagtggaaaattttttaaaataaaggaagggatattatattaagagtttgtttagggaatatagtagaatttggagttagttagattttttatttaaaaatatatttttgatagtttttgaagtatttggtgttttttaaaaattaaaaaagacgtttgtggttttttttagttttttttgtgaattttttttttgttttttttttggttagatagttttggaatagttttaaatgtgtaggagggtttttattttttttaggagttatggggagtaagggcggggttatttgggttttttttttggatttttatagagattttttttttaatatttatatgttatatgttgaagtgatatttgagttattaaaaggtagggtttatttgtttggggtgtagggggaggattggagtgaagtttttgagttatttttatgtgttaagtttttaggaagaagggaaggtgagggcgtttttttagggagatgtgggatttatagttgaggagggcgatgggttaatcgattagtataggagtagtaagaggggtttttgtaagtttagaattatgataaatttttatgtcgagataagacgttttagattattgagtaattttatatttataatcgtatttgagaaattattaaatggaattttttggggtatattatggtattgtggttatggtttttaagtagtgtttattttttagagatacggtgtagcgaaattttgaagcgtgaattgatatggtgtttgggaataattttggatgtttgttttaaaataattggtggaaggtggagtatagaggaaagaagattggttttaagatgatgattgttgaagttggtaatgggtattttgggtagggggggttattattattattattgttatttttatgtgtatttaaaattttttatgataaaagggagaagaagtaaaaaaaattgggaaaagtgattagtgtgtttgaagtaaatggtagatagaagagataggtttaaatcgtttgttttaagattcgagtaatttaggtaggattgatttttattttagaaggtattgttgttggaggattttgtttagttgagagtgaggagtagggatagatgagttgtttttttagggtttttaggatttttatattgttgagtttgtttttttttggttttttatttgtttgaggtatatatttttaatagttgtttttgtttagaagagaagtttaggtagtaagagaagagagaagaggtgggttagtttcgaattaggttgtttttgatttaaatgagtatatacgtttacgtttatttttttgttttttgagagtaataggaaatattgttagtagttcgtatataagtatatgtaaatatatacgtttgtatatatatgtatatattggtttttttttaaagataatttttttttttttttttttgttgtttagtggagtttacgttgttttgtttattttgtaatgatatttattagtttggtttgtcgtttttatgtagggttgttttttattatttttcgtaagttttcgttttagttagtttggttttattagcgttttgtttatttattttttttatttttgtttaagttgtatttttttttagaaagttttgtttttttttaaattttttatttttttaaattttatataggtaagatttgttttttttatatagttttttgattattttagtttttgatttttttttttttagaatttttatattattaatagttcgttttttatattaggtttttagttgttaatttttttttttagtttatgttttaatattttaataagagtaagttttgtgagggtagtagtcgtgtttatatttttgttttttttttggtgattattattttttgtagttattggattggttgtgttttattttttggtttttttttgggataggattgtgggtagggtattgttatgagagagtagggatttaagatagggtgataatattgggttttgagttggggtttggggggtataattagttttgtgtttttggagagttattgaattttttttagttagttttaggagatttaatattttagtttttttgtttatggtttttagttaagattggttaaggatattgatgattttggagttgaatttttgtgtttttcgaagtttttcggtttgtgttttgtttgggatttataatttaggggtataggagtggaaaggaaatggttatattttttttcggggtgtttaaaatatatatagttatttttatttagaattcgagggatagttgggaggtttttggattaggtgttagggtagcggcgggagaggattttatttaggtaagatgttttagatatttattttttttcgtatttttttattattttttttatgttagatatggtttttgttttttttttaaaaggagaaaaaagttagtgtaggtataaagggaagtttgttttttttagaagagttttggttttcgttgtatagagattagcgaggtttagggtgaatttagttttattttttatgagttgtgtgatttgtaataaaaagtttgtttttttttttgttgggggagatagtgatatttatatggtagtaaggttatttgttgatgtttatttcgttttttgtttttgaataggtaatattgtttgggatgttgtatttttatttgtgatatttaagataatgtttgtagttttttaatttttttatttattttgtttatttttattttataggatttgtttagtattgtataaatttttattgtataaagttttattgtagttttaattttttgggtttaagcgatttttttattttagttttttgagttgttgggattatagttgtgtattattatgttcgattaatttttgtatttttagtaaagttgggattttgttatattgtttaggttgtttcgaatttttaggtttaagggatttttttgttttagtttttcgaagtgttgagattataggcgtgagttattatatttattttatgtgtgttggataaaagtgagatttggataaaaggtttttgggtattttaagagattggtttggataaatgagtgagaatttgtttttaaataaataaattaaagtatatagcggggatttttgtggtttgggatttttttagtatgtattcggggtacggttttttcgttgggatttgatattgaggttggatttggttttgttgcgattcgcgggagataggattggggttaaattcgggatttttgaggttatagggtgggtttttttttttcggggtttgaggttttatatagggtgtttaggggaaggttggtttttagtttggacgttcgttgggatatggttttttttgtggaaggtggaagtaggaaggaacgttttgggggattgtggaggtgtttaggagtaatttttaagttttatttttgagagaagttttttttattgttttcgtgtgtttttggcggagaggatttttgggaggtgttttatagttttttttgggagggggagtagggagagtcgttttggaggggttagtgaagaggattggagggaagtagattcgttttttattaaggacgtttagaattttagtatggtattttggggtggtatttgggttgggaattttaagatagttgttatttttatttgtgttgttgtaatttttatttgtatattggttttttaaagggtcggggatgaggtattttatttttgtttgttggatattttattagggttcgagaggtttggggaaggcgggtgtttagaaggtagtattttttatggagattggtgatttttagcgattttttttggagcgattcgtgtatttcgtgttaagaaggttttttgtgagtatttttattttatttttttattgggcgttttcgttttttattttgtttttaaggaaattgaggtttttgcggtagtttagagttggagtttgtttttttgatttttttttagttaggtagatattagttttttagttttttttaggtgggtatttgggttttggttttttttgagttagggttatttttgttaggtgtagattttttagttatttgggttttgtaggttttttttagtaaggtattttttataggtttttttagtgttttagtatgttttttatttcgtttttgtttttttttaataagggttttagaattattttattgttttaggtttagtttttttatagtagtttatcgtttgggattggggggttatttttttagatttttaagattttatagtgttttgaagtattgtgggtagtttatgggttttagagaggggaaaaggtaagttttacgaatggagggaatttagtgttttggaaaagaaatttaggttgttatagaggaaggtttatgttgagggtgcggttgaggagttaaggttttggattttgtatgtgggttagtgtgtttgggggttgatgtgggagtgtttttgtttttagatgtgggtttatttgtgtttatgaatgtatgtttatgtgtgtgtgtgtgtgtggtatatttgtggataagtgtgtttatggtttatgaagagatgatatatttgtgtggggagttggtttttatgttgttgagttttgagtttgttagtttgtatatgtttagttgaattgtttattgaagattttagtattgtgtattgggttaaaaatataaattagatattttttttttagaagtttatagtttggtgggatatatgtgattttgtgtttgaaagtatgtttggatatgtatgggggggtgtgtgtgtgtggggaggtagttggggtattggaattttgaaaatgggagtaaggtttggtttaagtttgtttattgtttagatggatatggatttatgtggttatagttaagtttttataagatgtttagggtaagtgttaggaagttttggggaatagttttgttataggggtttttggtttgttttttttgtcgggttttagtttttatagagttttgtgggtagacgtagttgttgttaatagttattttgatgaggtatttggaatagaggatcgttttcgtttcgttttttgggtgaataagttttagcgggtaggtaggaaagggttgtgagttattgttaatagagttttttgggttggggaggatcgtgttagggtgtgatagtacggttttaggtggggaggtggatggagaggtgggtgggtagttgggggttagtttgtagtttatttttggtatggagtagagatttaagttttttaattttgggattgggggggtagtggtgagttggttggttgggtgttttggttagaggttttgttttttttttttcggattggtttggtgattagtgaggttgggttaggtttgtttgtagggggtgaggggtggatttgagagtgtttgggattgaatagttagtggttaattatttttttgtttgggttttgagtcgtttttttatttttaatcgttgttttgggttttttagatatttttttttagatttttggggttggaagagatttgagttattttttatagtgattatgtagaaggggaatttaaggtttgttttgtttaggtgtaggagattggttaaggttatgggtatgattttttaatttttttttgtttttttttttttaattttagtttttaagatttgtaaattatgttttttgagttttagggttttataaaatgtatttggggtagtttttttatttttttttagttttaagtagggtagttgagttttaatttgttgtataatgggtttttgtttatgatttaatttgggaaaatggtttgtattgttaaatatgatttttaataattattttatttaaatttttgttattagttgttgtagaatagatggaagttagattttaggaagaaagtttttagggtagaggttaaaataagttttttagtgagtaacggtagaatgttttttagaattatttaagagaaaaagaggatttttatttttaaaggatggagttgaagtttggagtggggaggaggatagtagtattatatggagatatcgagagggatatgtgtttttagatgaaggttaggaggtgggggaaagggttgtttagagggaaggagtggtaggtagttgtttggggttgtggttttagttagtaggagtagttgagttttcgtagttgttcgggtttgtaggttttattttgggtttggttttggggtttgaaggttaatgttgtatgggttacggggtttttttaaatttttgtttttttaggtttttaggttttgtttgggttttagtttgttttggggtagggaatattatatttttagatgtttttttgggtttttgtttttttttttgaaggtttagttgttgagttttttttgggttagggttagtttttttggttatattttttttggtatttggtatgatggttaagcgtaggtgtttttgagaggttgatttaggtttaaattttggttttttgtttttattagttgtgcgatcgtgggaaggttgttaatttttttgagttttagtttttttatatacgagatggatagagttttattttgttatttaggttggagtgtagtggtatgattttggtttattgtaatttttattttttggttttaagtatttttatgttttagtttttttgtggtgatggatacgtgaattttacggttaagttgtttagagttttatatatatatggtgtaattgtgggtaaatttgaataagattatagattgattgtattgatgtttaattttggttttgatatagtattaattttgtaaatgttgttttcgggagaaattaggtatcgtgtgtaaacgttcgttattaaagataattgtgtattagtttttaattatgttaatgaaaatttcgattaaaaaatgtttttttagggaatttattttgagattatttttttattgtattgggaatagataatttagatttagatttttttttattagtttgtcgagggtgtttaggcgagtttttttaatatttttaaattttagttttttttttgttttatggagataaagtgtatatattttggttatttagggtttttacgaggttttagttgatattaataaaaggggaaggtattaggtaatattaggtgttataatgagtatgtaattatagggagggggtagagagta

SEQ ID NO: 1827 - DNA, 6077 bp, Artificial Sequence
  chemically treated genomic DNA (Homo sapiens)
aaaatatgagaaagtaagtatttgatattttttattttaaaagaggggggttttcggaatgttattgttttggtttttagtgattgtggtttttttttttgttagaggttttatgtttagattattagtgatatttttagtttttaaagattagtttagtttatataagggtaatgttgaaatatataagttaggttttaatattgttatattttattgtaaagtataaaagtatgttttaattcgttatttaaagttttaagatatttttaagtttttttttatttgtatgttaaaaattaaatttaaatgggaagtagtattgggagaaagtttttttgtgaattaataattaaaattttttgttagttttataaatatttttggataatttttttaaatttataaagggtaagaattgaggttttatagatgataacgaaaatggtaaggaatgtattaatttttttatgtagtgtcgaatttagagttaaaataatagaagattaaaagataggtttttatttttgtatatataaagatgtttcgtaaatgtttatttatttttattaatttatttttaatacgaaacgggaaatgtttaagtgttagtattatttttttaaagatagtttttttttgtttatatttgtttattatgtttttatttaagtaaataattttaagtaaaaataacgtttgagtatttatttgttgaatgtatattttattatagttttaagattaagaattgatgtttaaatattaattgtttcgttagttttatttattaaggttaaagtagtttgtgttttatgaatcgatattaaaaaagaaagttacgttagtttttcgtgggagaaaagagagataggcgggtgacggtagattggaataaggagttattatagtatttatttttttatattgtagttttgaaaattgtgattagttatagtgaattttttatgaaatggaatatttttattaatattttgaggaattatataaattttattgtaagatatgaaaattagaaatatggatttgttttttttagtttttagggtttttaagaagatgattttagtaatagattattattaagtgttttagggtattttgattagagtgtataagttggaaaaaaatatttaagttaagtaagtagatgtaatttttttttttataatttattgaaatttttataaatggtaaaaataaaaaataaattttttatttaattgaggaggggggtatattgaaaatatattaaggttgagatgttatttaaattaatgaggttttttgttttgtagttgatgttattttatgtgatttggaataaaatttttttgaagaggtaaaaaacgtaatttgagagttaaatttttaaaagttagatagagtataggaatgttaggagtggtaaaatttgaaaaagtattatgatatattagttagttagtataggtggtggataaggaaaacgaagtttattttttacgaggtatgtttttttttagtggttttttaatgttaattgttttttttttttgaggatatatatattaggtattcgggttattttttttttttgaggatatatattattaggtatttaggtatatatattatatgttttgaagtttaaagttatagttttgtgatttaagtatttttttgttatttatggaacgaagattttaaattttagttatgaggataattatttttttatttggggatagaatattagtatttaaattatttattcggtatgtggtagaggagaagagaattagaggagaagtagagatgataaagtagttatattatttattagtttataggtaatagaattattaatttgttttttgtgataaagtaataataaagagtcgatattttttatatttttatttgtgtgtagtcggtattgtcgatatttatttttttaagggtatttttttagattttttatttgtttacggtatttttttgggtttcgtatttgttcgggtatttgtcggggttttgtatttgttcggtttttatatttgtttggggtatttgtttgggtttcgtatttgtttggggtatttgtttgggtttcgtatttgtttggggtattttttcgggttttttatttgtttagggtatttttttgggtttcgtatttgtttggggtatttgtttagatattgtatttgtttcgggtatttgttcgggtttcgtatttgttcgggtatcgtatttgtaggatttttaagttgtttttatttacgcggtcgttttcggttttgttcgtcggggacgttggtatcgaggatgttttgttcgtggtttaggttttcgtcgtttattaggtatttgtcgttcggggagaatttgtagagtaagttggagagtttgaatatttcggagaagtttatggtcgtcgtttgtcgcgggcgttattttgcgttcgaaaattcgcgggatttttgggcgcgtagtaggttgtaatagtcgacgtcggttttcgaggtcggaagttagaaggcggaagtgaattgtagtttattagcgtcgtcggttttcgcgcggtattgtggggtttgtagtttttgtgtcgtagggttttaaaggaaacgtttacgtttttttcgattagggattttcgattcgagaattttattttaaaggtcgggaggtttttgagtatttttagttagggttgttgataaaaatgtagaaagtatagtaaaatttgaattttagatttataataaatttagttataagtatgtttttaaatattgtacgggatatgttaatacggaaaaattattcgttagtttgaaatttaaatttaattgagcgatttgtgtgtttgcgtgtgtgtatatatgtatatatatatatttatatttatatgtaaatgtatgtttatatgtaaatatatgtttatttataaatatatttttaataagtaatacggtgtttgtcgtatatatattatatcgtgtatgtaatgtataagtatttatttcgtttgtttggggttttgtttgtttttgttgagttcgatttttttatttgtcgtttggtttttgttttacgttttagtgttattgagattaaggagagaacgaatttgtcgttgattgggtagagcgagcgcgtggatcgcggttatcgttcgtttattattcgcgcgtatttgggttggtatcgggcgaagaatcgtgcgggtttgggatttgggggtttagagggagcgagtttttgcgcgggcgttcggttcgtaggtttcgtaggtttaggggcgtgtttcgtttttatttttatttcggatttcggtttttttttttagatagcggttttttttatttttggttttcgtaggtcgttagtagttcgcgttaggtttcgtcggcgtttttagggttttttagatcgcgtagattttgatattttcgtttggttttgggttttgggagttgagagtcggttagggttttgttcgtattttcgggcgtttagtttcgggtttgtttttcgcggacgttttaattttttcggtcgaatggatggtggtgcgcgcgcgttttatttcggcggtgtcggttttttttgttgttaaaattagatttaaatttttgtatgggattcgtttttgggtttttatttcgtgcgtttagtaaatagtgggtgagttatgaagatgtgcgagttagtcggatttttttcgttaggcgcggattcgttgcggttagagaatttagtttgcgttagttcggttcgttcgcgaagttacgggttttattgacgcgattttttaagacgtgggggttattatgggtagaggatatcggttcggagttagattacgggttttataagtattagattataagtagcgtcgttattgagagtcgttcggaattcgtttagtatgtcgggttttttagttagggtttggtgtacgtggtcgagggttttggaagtttcgatggtttaggaggagtaggcgggcggggcggcgggtgtcgttggtcggtagagagtttcggtttgatttagcgtaggtttggtgcgcgtagagaataattttaagcgtatcgacgttcgcgagttttttttaaatatcgaacgggatttagagttcgagtttataggcggcggtcgggggagggagtagggtgttggtcgtcgttcgggagtgttcgcgttttgggtgatttttggaaggacgtggggtttaaatttcggttggggttgggagagtagtttttagaggtttttcgcgggattttttgtcgggcgggatcgtggttttataggagaagtgggtggtaagttttgtttggcggaaagtagtcgtttttttttttttgggtttggggcggcgttttttatttttgtttttcgttttttatttttgtttttcgtcggttatattttttgttttttggattttaagcgtttcgcgcgtcgaggagtttagcgttagtggcggcggttaggagagattcgggtgttaggaaagatgggtcgtttgggggatagtagggagttcgggggaaacgtaggcgtcgggtatagagtcggtatcggcgtttttagttttgtcgaagatcgcggtcgggtttggttcgcgggaggggttttggcgtcggatttgtttcggttttgcgtgggcggtttcgtcgggttttgtaggagcgacgcgcgttaaaaggcggcgggaaggaggcggggtagagcgcgttcgggatttcgatttggacgcggttagttggagaggcggagcgtcgggaggagattttggtttcgtcgcgattcggtggttcgcgttgttttttcgcgcgtcgggttaaaaaggcgttaacgttcgcggtcgtttatttttcgcggcgtttttttttttcgcgtttatataattcgtttaggggtcgggtagttcgttttgttttttcgttcgcgtattcgttcggaggttcgcgcgttcgcgaaggggacgtagcgaaatcggggttcgcgttaggttagtcgggacggacgtcgatgttcggggttgcgacggttgtaggtaggaggtttagggtcggggggcggttcggtttcgcgggcgggggttggagcgtagcgttgggtaggtatttgggttcgtagtttcgaagttgggaggtgaggggagagcgatcggggacgagttgggataaggcgatataggggttttttcggagttggatcggtttttgggatttggcgttcgcgagaggttggagcggttagagtttagtttgcgaggagacgcgggttttgtttttagcgtcggtcgtttttggcgttaaagatagtttcgtaggggtttcgggagggttttttttttgttgttttttttttatttcgggtttcgagggtcgttgggagggtaatttcgggaagaggtcggggtgcggggcgcgggtgtaggtggaaatcgttagtaagttttttttcgttcgcgcgtttttttcgatttgtagggttgtgttaatttcgaggttttagtttttttgaggagttagggttaggtttttttttggatagggagaaggatttgggcgggggttttgatttatggagttggttattaagcggtttcgatggtttttcgagggatagttttttgtggttttgagtttgtttgtcgagggtttttggtttgttttcggagcggttttaggtagagaaagttcgtgaagaaatggttcgggtcggtttggagggagatattttacgtttttttagtttttgggtcgtttttttttgtagtttttgtttttttcggggtttggatttggggagcgatgattatttttgtttagtttgtattttggtttggacgttaggagataagtttatgtagtatgtatacgtttgttatataaataggggatagatagacgatttttaattagtaagggtgtagggaaaagtaatgtattttaaatttttgattagaggttatttgtttttaaagatgttgttatttgtttatttattgtttggatatttggaaatggtttaggtttattaatataatg

SEQ ID NO: 1828 - DNA, 6077 bp, Artificial Sequence
  chemically treated genomic DNA (Homo sapiens)
tattgtgttaatgagtttgagttatttttaaatgtttagatagtgaataaatagatggtagtatttttggaagtaaatgatttttggttagaagtttggggtgtattgtttttttttgtatttttgttggttgaagatcgtttatttgttttttgtttatgtagtagacgtgtgtatattatatgggtttattttttagcgtttaggttaaaatataagttgagtaaaggtaattatcgttttttaagtttaagtttcgggaaaggtaggggttgtaggaggaggcggtttaggagttaagggggcgtgaggtgtttttttttaggtcggttcgggttatttttttacgggttttttttatttgggatcgtttcggagataggttaggagttttcgatagataaatttagagttatagggagttgtttttcgggaaattatcgaaatcgtttagtaattaattttatgggttaaggttttcgtttagatttttttttttgtttagaggggggtttggttttggttttttagggaagttgaggtttcgggattggtatagttttgtaggtcggagggagcgcgcgggcggggaggagtttgttggcgatttttatttgtattcgcgtttcgtatttcggttttttttcggggttatttttttaacggttttcggagttcggggtggagaggggatagtaggaggagggttttttcggaatttttgcggggttgtttttggcgttaaaggcggtcggcgttgagggtaggattcgcgttttttcgtaggttagattttggtcgttttagtttttcgcgagcgttaagttttaggggtcgatttaatttcgagggagtttttgtgtcgttttgttttagttcgttttcgatcgttttttttttattttttagtttcggagttgcgagtttaggtgtttgtttagcgttgcgttttagttttcgttcgcggagtcgaatcgtttttcggttttgggttttttatttgtagtcgtcgtagtttcgggtatcggcgttcgtttcggttggtttggcgcgggtttcggtttcgttgcgtttttttcgcgggcgcgcgagttttcgggcgggtgcgcgggcggggaggtagggcgggttgttcggtttttaggcgggttatatgggcgcggggaggggaggcgtcgcggggagtaggcggtcgcgggcgttagcgtttttttagttcggcgcgcgggaaggtagcgcgggttatcgagtcgcggcggggttaaggttttttttcggcgtttcgtttttttagttggtcgcgtttaagtcggggtttcgggcgcgttttgtttcgtttttttttcgtcgttttttggcgcgcgtcgtttttgtagagttcggcgaggtcgtttacgtagggtcgaagtaggttcggcgttagggtttttttcgcgggttagattcgatcgcgattttcggtagagttggggacgtcggtgtcgattttgtgttcgacgtttgcgtttttttcggattttttgttgttttttagacggtttattttttttgatattcgggttttttttggtcgtcgttattagcgttgggtttttcggcgcgcggggcgtttggaatttaaggggtaggggatgtggtcggcggggaataggggtgaggggcggggaataggggtgaggggcgtcgttttaggtttaggaggaggggaacggttgtttttcgttaagtagggtttgttatttattttttttgtggagttacggtttcgttcggtagaggatttcgcggagagtttttgggggttgtttttttaattttagtcggagtttgggttttacgtttttttaggggttatttaggacgcgaatattttcgggcggcggttagtattttgttttttttttcggtcgtcgtttgtgggttcgggttttggatttcgttcggtgtttggaaggagttcgcgggcgtcggtgcgtttggagttgttttttgcgcgtattagatttgcgttaggttaggtcgaagttttttatcggttagcgatattcgtcgtttcgttcgtttgttttttttaggttatcggggtttttagggttttcgattacgtatattaggttttggttaggggattcgatatgttgggcgagtttcgagcggtttttagtggcggcgttgtttatggtttgatgtttatggggttcgtgatttggtttcgaatcgatgttttttgtttatggtgatttttacgttttggaaagtcgcgttagtgaagttcgtggtttcgcgagcgagtcgggttggcgtagattgggttttttggtcgtagcgggttcgcgtttgacggggagggttcggttgattcgtatatttttatggtttatttattgtttgttgggcgtacggggtggggatttaaagacgaattttatgtagaggtttgggtttagttttggtaatagaaaaggtcggtatcgtcggagtaggacgcgcgcgtattattatttattcggtcggggaggttggggcgttcgcggggagtagattcgaggttgggcgttcggaggtacgagtaggattttggtcggtttttagtttttagaatttagggttaggcggggatgttagggtttgcgcgatttggggggttttagaggcgtcggcggggtttggcgcggattattagcggtttgcgggagttaggggtggagggggtcgttgtttagggaagaggatcggggttcggagtgggggtgagaacgaggtacgtttttgagtttgcgaaatttgcggatcgagcgttcgcgtaggagttcgttttttttgggtttttaggttttagattcgtacgatttttcgttcggtgttagtttagatgcgcgcgggtgatgaacgggcggtggtcgcgatttacgcgttcgttttgtttagttagcggtaaattcgttttttttttgattttagtggtattggagcgtgaggtaagggttaggcggtaggtagaggggtcggatttagtaaaagtaaataaaattttaagtaaacgaaataaatatttatatattatatatacgatataatatatgtgcgatagatatcgtattatttattaaagatatatttgtaggtaaatatatatttatatgtaaatatatatttatatataaatataaatatatatatatgtatgtgtatatatacgtagatatataggtcgtttaattaaatttgaattttagattagcgagtaattttttcgtattagtatgtttcgtgtaatatttgggaatatatttataattagatttgttgtgaatttgaaatttaaattttattgtgttttttatatttttattagtagttttagttggaggtgtttaaaggtttttcggtttttgaggtaaggttttcgggtcggaaatttttggtcggaagaaacgtgggcgttttttttaaagttttgcggtataagaattataagttttataatgtcgcgcggaagtcggcggcgttgataggttgtagtttattttcgttttttgattttcggtttcggaggtcggcgtcggttgttgtagtttgttgcgcgtttaggggtttcgcgggttttcgggcgtagggtggcgttcgcggtaggcggcggttatgaattttttcgaggtatttaagttttttagtttattttgtaagtttttttcggacggtaagtatttggtgagcggcggggatttgggttacgggtaggatattttcggtgttagcgttttcggcgggtagggtcgggggcggtcgcgtgggtggaggtagtttggggattttgtaggtgcggtgttcggataggtgcggggttcgggtaggtattcggggtaggtgtagtgtttgagtaagtgttttagataggtgcgggatttaggaagatattttagataggtggagggttcggggaggtgttttaagtaggtgcggggtttaggtaggtattttaagtaggtgcggggtttaggtaggtattttaagtagatatgggggtcggataggtgtaggatttcggtaggtgttcgggtaggtgcgggatttaggaagatatcgtagataggtggggggtttggggaggtgtttttggaaaggtgggtatcggtagtgtcgattgtatataggtgagggtataggagatgtcggttttttgttgttattttgttataaaaggtaaattgatgattttgttgtttgtaaattggtaagtggtgtggttattttgttatttttattttttttttaattttttttttttttattatatgtcgaataaatgatttaaatattagtattttatttttaggtaaggaagtagttgtttttatggttgggatttgaggttttcgttttatgggtggtagaagggtgtttaaattatagagttataattttaagttttaaaatatatagtgtatgtatttggatgtttagtagtgtatatttttagaagagagggataattcggatgtttagtatgtatgtttttagaagagggggataattggtattggaaagttattaagaagaaatatgtttcgtaaaaagtgggtttcgttttttttatttattatttgtattaattgattgatgtattatgatgtttttttaggttttgttatttttgatatttttgtgttttgtttagtttttgagagtttaatttttaaattacgttttttatttttttagggaggttttattttaaattatataaaatagtattagttataaaatagaaaattttattagtttaaatggtattttagttttggtatatttttaatgtgtttttttttttaattaaatgagaggtttgttttttgtttttattatttatgaaaattttagtgaattataaggagaaagattatatttgtttgtttaatttgggtgtttttttttagtttgtatattttggttaaaatattttgaaatatttggtaatgatttgttattggaattatttttttgaaagttttgaggattggggagagtaggtttatgtttttagtttttatattttgtagtagagtttatgtggttttttaaggtgttggtaaaaatattttattttataaggaatttattgtaattgattatagtttttaaagttatagtgtgagaaagtaagtgttgtggtagttttttgttttaatttgtcgttattcgtttgtttttttttttttttacggaaaattaacgtggtttttttttttgatatcggtttataaaatataaattattttgattttgataagtaaaattaacgaagtagttaatatttaaatattagtttttgattttgaaattgtagtaaaatatatatttagtaggtgagtatttaggcgttatttttatttgaaattgtttgtttggatagggatataatgaataaatatggataagaagaaattatttttaagaaaatagtattaatatttaaatatttttcgtttcgtgttaggaataggttaatggagataaatgagtatttgcgaagtatttttatgtgtgtagaagtgaaagtttgttttttgattttttgttgttttggttttgagttcggtattgtataagaagattgatgtattttttgttattttcgttgttatttgtgaagttttaatttttattttttataaatttgaggaaattgtttaaaagtgtttataaaattagtagaggattttggttattagtttatagaagagtttttttttaatgttattttttatttaagtttagtttttaatatatagataagaagggatttaaaaatgttttaaagttttaagtagcgagttaaaatatatttttatattttataatagagtatagtaatattaaaatttggtttgtatattttaatattatttttgtatgaattgaattgatttttaggggttggggatgttattggtgatttagatatgaaatttttggtaggagagaaggttatagttattgaaggttagggtagtagtatttcgaaggttttttttttttggagtggagaatgttaggtgtttgtttttttatatttt

SEQ ID NO: 1829 - DNA, 7746 bp, Artificial Sequence
  chemically treated genomic DNA (Homo sapiens)
ggtgtaggaaaagtatttgataaaagaagagaatttttttaatttgataaagggtaattttataaggtgatattgttatatatttattatatgttaaaataaagggaatttgtaatattaagtgtttgtgaagatgtggaatttttgaaatttttaattattgtttatgagaatgtaaaatgatatattttatttgataaagagtttggtagtttaaaaaaaaataaagttagttatatatttattatataatttaataattagttatttatttaatagaaataggaatattggtttatagaaaaatatgtatgtgaatgtttgtaatggttttgtttataattaatatttaaatttaaaagtaagtttttaagtaatgaatggataaataaattgtgaaatatttatataatgggatattatttagtagtaaagaggaatatattattaatataggaattaatatgaataaagtttaaatgtattttgttaagtgagggaggatagatttaaaaggttgtatattttataattttatttatatgatattttggagaaaattaggttgtaaaaatagattggaggttgttagggtttggaggtgggaaagtagttgacgttaaaggaaaattttggagatgtgatagttatgttttttatttttgttgtggttatttaattttaggtatttgtaaaattttagaattatatattaagaagaatgtattttattttatgtaaagtaagaataagtaaaattaaaattaatatatgtaaatagaatagtatttaatattatgaaaatatagaaatttttttaaaaatcggattgtttggaaaattagtgtttaaatataaatggttatttagaagaattatattatattttatattgtttatagttatttattgtttagtttatgattagttaattatattatttgaaagaaaagatggtttttgagaaaaggagtattgtttagttgagatttgatgagggtagaagagaggtgaggtagtttggaataaggtgttttttaagtagggtagattttgaagattttttaagtttttgaggattttgtattttatttgttatttttttttagattttgggttttatttttgttttttttatgggtttgttaaaaatttaaaattgtatatttgttattgatttaaataatatttttataatatagtatttatatttttattttattgatggagaaattgaagttagaaagattaagggatatatttaaggttttaaagttaataagaattaatttttagtaagattttagtttgttaatgttaatgtttatgaagttgtaatagttgggagtaattttaatattttggaagcgttttttgtttgtttgtttatgggtgatcgtgaaagttttatgaatagagttgagtttcgaagttttagatgggataagttagttagttaaatagtgtattaattttttttttggttattaataagttgggtattttttgaaaggaattttaatttttatttattttatagagatgttagaaagattaattagttgatgtttatttgagatagaataaaaataaaaatggaaaataaaaagatttataaatgattttttttttagttattattattgttattattattattattattattattattatttttgttgagttattgttttattagattatttttatatttttaattaggggagaaatagtttgaatgaaatttggaaattaaggaattaggagagatatgtatttaaggatggggtgggagttttttatgtttaagtattatatcgttttttaaattttttatttttgttttgggtttatttaatattgagggaggtttaatatgaaagtgggataaaggttttttttttttttagtttagtttttaatgttttttttttttttaaatttttagatatttgtattgatgttgttttttttttttttgtttttaaatttttattttttttattaagtatgggtattttttattaatgtattatttttagaggttgtagttaaaatggttaaagattaggtgagagtatttttagttttttgttttgttggtataagtgttagggggatattaaaggtttggtttagggtagtaggggatattgaaggggagaagtgatttaaggcgtattgatgataatgaggttagaggagtgttgggggagttgtttaaagtgttaggattatggtttagtaggtaaagggtgttgggtggtgaagtaggggaaggatataggacggtggtttttaggggaaagtattttatatataaagtttgttttattttattttttgtttgggatagtggcgttttatgatatttatagttatagtgtgtaatggagttgtaagagagggttttggagagtattaaattcgattttggtgttagaggtttaaatggagttaatgagttgttgtttagggatatatagagttaggattttaaagtgtttttaagtttttttttttttaataaggtttttttgattcgattttttttttttttttaaatttgtaattatttatttaggggattttttttttttaagtttgtaagtttcgtaagtgtagatattgtgtttatttggtttagtatatatttttagtgtttggagtaatgtgtaattttgtggtatatgtgtgtgtgagtgtatatattgtatgtttggatgtgtgtgtgtgtgtatggtgtaaatatggtatttgtagtatttatttttggttttttttttttgttttttttttttaaaagtatcgagtttttttttatttttttttttttttttattatttttagtattttgtttagagtgagtatttgttttatgtttgatgataatttgttgattttaaaagaatttataataaagtagtgataattatatttatattggtttagttttatttaattttaagtgtttttgtataagtgaaaattaattgtttatttttagtattgtatattttaaagtttttttaaatgtatattagttagtaaataaatttagttggtaggtattttttatttgttgtaggaaaatgggaagatgatttatttagtagagagaagattttttgttagattttatttgaagaagtttattatttttttttttaatggggtaggggagaaaggtagagttgaaatggaatttatgttttgttatttattggttggtttttttaataatttttgtaaattttttgttttaatttttttatttagaaaagtagtataataaaattttatttttagggttgtttgtgagaagtagggagagtatttgggttgtgtttagtatataaaaggtattttgtaaatgttagttttttttttttttttttttttatttgggtaagattttttggaagggttaagatttataatttttttgaataataagagagtatttagatattgattttgtatttatttttatggtttttagagtttttttttttaattgttatttttgtgaaagttaaaatatatatatagatatatatatatatatagttatttttttttaggttttttttagtatattgttttatttattttttgttttatttattttttttatttgaaatttttgagaaggaattattttatttgtttttatttatgtttgtttttttaaaatagtttttgtgaaatgtaaagttttaataatagagaaatgattatttggtggattgtagagtagtaaaagttaggttggaagttgtatatatattaaaatattgggtttgtttgatatttgtagtagggaaaggtgatttttattaaataaaatatgtaggaaatgtgaattaggttttttttttttttatttttttagtagaaattaaataatttttatattttacgtagtttttagtagaggatgttaatgatgtttttgatgttttttatatttgattaaattttattgtttgtgttaggttgttaattaaggtatggtttttttattgtataaatttttcgagttattttaaaggttaattgaattatgtatacgcgacgttttagtggatatggggttgtagatttttttttagatagtggattttttgggagaataaattaaaaaatagtgtgattgttatatagttagagtgaaggtttttagggggtagagaagaagtaattagagtttatttttttgttttagtttttttttttgtttatgtgtttagtttttttatggtattttttttaagtttttatgagtattttttatttttgtttttttttatgtaatgttatttgttgaaaaagatagaagttgtttaaggtacgtttatttggggtattaaatttgattgaggtggttagttatggtttgatttttaaggtaaatttttgattaaagattggttttttttaatgtatttttttaaaatgtatattattttttttaggggattgtttttaagataatatgtttatgtgattatagatttttttaaagttagaaattatgatttagaataaattatagtttttaggatttgttgaatgaataaaaagaattataagattatggattgtttaaattggaaaggtttttagagatttttttttttagtttttttatattgtagatgagaaataggttagaagggatgtatggtatttttaagtgtataaggatatggtaaaaaagaaattgttgtagaattttggttttttgaatgagggaaattttatagataggattggagttgtttaagtttgtttgtgaatttgttttgtgtttatttttattagggatatttatatataaattagtattggttattgtgaggaagtgttataaagaattttataaatttattaaattagatttttgaggatttttatttgatattatttttagttttattaatgtttttaaaaataatttgtttgggatgatattagtggcggaggtaatggttagtaattttttgtaagcgaggtatggaagatatatgtttgtgagaaaaaggtgtttatgaaattatggatggtataagaattttatttgatattgaagagtattttaatattgaggtatagaaaaattaagtattaattttggaagaatggtaagataagtgggtgaacggtaatattgttttttattaggaataaggattttagttattaaagaaatatttagatattttttttaaaggagagagtggattgagggtatttttttttttttgtagaaaagaggttgagatgaaatggtttgtagatcggggatatagcgtagttggtgtggaaattagtgaatttgggatacgagaattttttatagagtagaatttattttatttagaagaattaattatcgaaatttttggaattaaagtatttaagagtttttcggggaatattttattatattgttgtagtatttttgatttttttaggataaatattggtatatttgatatgatttgggatagaggagtattagttgttattaatttaggtgatcgtaaatgttatgcggatataatgttattttttttgggaaagaagttttaatattttttgtgtgttttttttacgatttaattaaatatttaggtttattattttatgttttatatgttgaaattgaaagattgtttggtaaaatatgtaatatatattgttttgagaaggttgatgtttttgaagaatgatataaaaattgggggattgattatttttttgaaaagttatatttatttatagaaaagtaaatgagatatagataaaattatattgatatgtttttgaggaattgaaaattatgttaaagtttgaaaatgtaatggatgaattttttaaattgtttataaattatatgatagatttatattaaaaatggttttttagtaaagttgtttattttttttaaaaaagttttaggagaaaaagatgtaattaaattttttaagtagtttttttggagaggagattatgatgtgaaagattatgtttgtgtgttttatagattgtaagatattttattaattagtgtgtgttatttgtataattaaaaaaatattttaaaatgtaatgtatattaaatataatatatatagaaaaattggtatttattttatttttttgagatggagtttcgttttcgttgtttaatttggagtgtaatggtataattttagtttattgtaatttttgttttttaggtttaagtgatttttttgttttagttttttaagtagttgagattataggtgtgcgttattatgtttagttaattttttgtatttttagtagagatagggttttattatgttggttaggttggtttcgaattttagattttaggtgatttatttattttagttttttaaagtgttgggattataggcgtgagttattgtgtttggtttgatattttttatgaaatttagaattgttgaaaaaaatataatattttagtagggtttaaggtggttttaaaagttatataaaagattagtttttattataaatttttgttttttatttagattttagtatttttttttatatggtttttttatatatgtaatagaattaagaaataaattttaattaaataatttgtaatagaattaagaaataaataaattttaattaaataatttatatggaataaatatttttaaattttaagaataaatttttttttaagtttaaaataaataaataaaaaaataaaaaaaaaataatttgtttttttgattttgtttagattattgttttttaagttattgtaagtggatgaagtatattggttaatagaatttattttttttaagttagatgagttttaaattgtgattttttttaagaagatagtttataatagatttttagattatgtattttgaagattgtgatagggaattttcgtgttgagggttatattataggtcgagagttagagatttataggattttagggatggatttttttaattaatattttgtatagtttttgggttttaataaataattggtgaatgtatgtaaatagaaataggtagatggatggattgatagatcgatgaagagatggatgaatagatggttgagtttttttaatttttattttttaagtattaaaatgggattttttatttttgaaggtaatgagattagtattttgtgtgttagtttggattagtttagttagttgtaattgttagaaagtttttttttatattaagtttaagtttgttagtggtttataatgtttgaggttttagttttgttttgagatataatgtagaataaatatttattttatttttatatgatagttttttagttatttaaaaatagttgttagatagatttatattttttattttgttttaattatttatttaattgtttatttattttatgagattattttaagtattaagttagatgtttatttaatgtttggtatatagtaagtagttagtaaatagtagatattattattgttataaagtttttgattttaaatttttttaatattatattttaaaatgttttgtttttaagagattttgtatgagattttttaaaaatgaaataagttagtttgagttaaataggagtatatagattataattggggataaaaaatatgtgttaagtgttgggagtttatttatttggattagaataggattatttaaagg

SEQ ID NO: 1830 - DNA, 7746 bp, Artificial Sequence
  chemically treated genomic DNA (Homo sapiens)
tttttgggtaattttgttttgatttaaatgagtaagtttttagtatttgatatatgttttttgtttttagttgtggtttgtatgtttttatttagtttaggttggtttattttatttttaaaaagttttatgtaaaattttttggagataggatattttaaaatataatattgggggagtttggaattaaaggttttataataatgataatatttattatttattgattgtttattatatgttaggtattgaatagatatttaatttaatatttgaaataattttataaggtagataagtaattagatgaatggttgaaataaaatagaaaatataagtttatttggtaattgtttttaaataattaaaggattattatgtgggagtgagataaatatttattttgtattgtgttttaaaataaaattgggattttagatattataagttattggtagatttaggtttaatgtaaggaagaattttttaatagttatagttgattgaattggtttaggttaatatataagatattaattttattgtttttaagagtaaaagattttattttgatatttggagggtggaagttgaggaaatttagttatttgtttatttatttttttatcgatttgttaatttatttatttatttgtttttgtttgtatgtatttattagttatttattaaggtttaggaattgtgtagggtgttagttggggaagtttatttttgagattttatgagtttttgattttcggtttgtaatatggtttttaatacggggattttttgttataatttttaaagtatataatttagaagtttattgtgagttatttttttaaagaaagttataatttaaggtttatttgatttagaaaaagtaagttttgttaattagtatattttatttatttgtaataatttggaaaatagtaatttaaataaaattagaaaagtaaattgttttttttttgtttttttgtttgtttgttttaaatttaaagaaaaatttatttttagaatttgggaatgtttgttttatatagattgtttaattaaaatttatttgttttttgattttgttatagattgtttaattaaaatttgttttttgattttgttatatatatggagaaattatgtgaaaagggatgttaggatttgagtaaaagataagggtttatagtaaaaattaattttttatataatttttgggattattttgaattttattgaagtgttatattttttttaataattttaaattttataaagaatgttaggttaggtatagtggtttacgtttgtaattttagtattttgggaggttgaggtgggtagattatttgaggtttggagttcgagattagtttgattaatatggtgaaattttgtttttattaaaaatataaaaaattagttgggtatggtggcgtatatttgtaattttagttatttgggaggttgaggtaggagaattatttgaatttgggaggtagaggttgtagtgagttgagattgtgttattgtattttaggttgggtaacgagaacgaaattttattttaaaaaaataaaataaatgttagtttttttgtgtgtattatgtttaatatgtattgtattttaaaatatttttttaattgtataggtaatatatattgattgataaaatattttgtaatttgtaagatatataggtataattttttatattataattttttttttaaaggagttatttgaaaagtttagttatattttttttttttaaaatttttttagaaaaagtaaatagttttattaaaaagttatttttagtatagatttattatgtgatttataaataatttaaaaaatttatttattatatttttaggttttagtataatttttaattttttaaaaatatgttaatgtgattttatttatgttttatttatttttttgtaagtagatataattttttagaaagatagttaattttttaatttttatgttattttttaaaagtattaatttttttaagataatgtatattgtatattttattaaataattttttaattttagtatgtggaatataaaatggtggatttggatgtttagttggatcgtaagaaagatatataggagatattgaaattttttttttaggagggataatattatattcgtatagtatttgcgattatttggattaatggtaattaatgtttttttattttaaattatgttaaatgtgttaatatttgttttgggaagattaaaaatattgtaatagtatgatgaaatgtttttcgaagaatttttaaatgttttggttttaggaatttcggtgattggtttttttgagtaagatagattttgttttgtaaaaaattttcgtattttaagtttattgatttttatattaattacgttgtgttttcggtttgtaaattattttattttaattttttttttgtaaagaggaaaaaatatttttagtttatttttttttttaagaaaagtatttaaatgtttttttaatagttgaggtttttgtttttgatgaaaagtagtgttgtcgtttatttatttgttttgttatttttttagagttagtatttggtttttttgtattttagtattggagtattttttaatgttaagtgaagtttttgtattatttatagttttatagatattttttttttataagtatatgttttttatgtttcgtttatagagggttgttggttattgttttcgttattagtgttattttaagtaaattgtttttaagggtattaatgggattaaagatgatattaagtggaggtttttagggatttgatttaataaatttataaagttttttgtagtatttttttataatggttaatgttgatttatatatggatgtttttgataggggtgagtatagagtagatttataaataggtttagatagttttagttttatttgtaggattttttttatttaggaaattaagattttataatagttttttttttgttatgtttttgtatatttgggagtgttatgtattttttttgatttgttttttatttgtagtgtaaggggattgagggaaaggatttttagagatttttttagtttgagtagtttatgattttatgattttttttatttatttagtaaattttgaaaattatggtttattttgggttatagtttttagttttggggaggtttataattatataagtatattattttagagatagttttttgagaaggatgatgtgtattttgaggaaatgtattggaagaagttagtttttggttaaaggtttgttttgggggttaggttatggttggttattttagttagatttaatgttttaaatggacgtgttttagataatttttgttttttttagtaaatggtattgtatggagaagagtagaaatggaagatgtttatgagaatttgaaagagatgttatgaaaaagttgaatatatggataagaagaaaggttgagatagaaagatgggttttggttattttttttttattttttaggagtttttattttggttgtataataattatattattttttaatttgtttttttaaaagatttattgtttgagaggaaatttatagttttatgtttattggagcgtcgcgtgtatatgatttaattaatttttaaggtggttcgggaagtttgtgtaataggagagttatgttttaattggtagtttgatatagataataaagtttgattagatgtagagggtattagagatattattagtattttttattgaagattacgtggggtgtaaaagttgtttaatttttgttggagaagtaagggaagaggaaatttggtttatattttttgtatgttttgtttagtaaagattatttttttttattataaatattaagtaggtttagtattttggtgtgtgtatagtttttaatttagtttttattgttttataatttattaaatgattatttttttgttattaaaattttgtattttataagagttgttttggaaaaataaatataaatagaggtagatggggtgatttttttttaagagttttaaatggaagaaatggatggggtagagggtaagtgagatagtgtgttagagaaagtttggaggagggtggttgtgtgtgtgtgtgtgtttgtgtgtgtgttttaatttttataagagtagtagttggggagagggattttggaaattatggaaatgagtataaggttaatgtttggatatttttttattatttagaagagttataaattttagtttttttaggaagttttgtttaaatgagaagggaagagaagggaaaattaatatttatagaatgttttttgtgtgttaggtatagtttagatgttttttttgttttttataggtagttttaggaatgaagttttattatgttgtttttttagatgaggaaattgagatagaaagtttgtaaaagttgttgagagggttagttagtaggtaatagggtatgaattttattttaattttgttttttttttttattttattagaaggaaaagtaatagatttttttaaatagaatttgataaaaaattttttttttattaagtggattatttttttatttttttgtaatagataaaaaatgtttattaattgaatttatttattaattgatgtgtatttaaaagagttttgaaatgtgtaatattaaaaatgagtaattaatttttatttatataaagatatttaaaattaaatagagttagattaatgtaggtatgattattattgttttgttgtaaatttttttgaaattaataaattgttattaaatatagagtaaatgtttattttgaataaaatattgaggatagtggggaaaaaaaaagaagtagaaaaagattcggtgtttttgaggaaaggaggtaaggaaagagaattaaaggtggatattataagtattatgtttatattatgtatatatatatatatttaaatatgtaatgtatatatttatatatatatatattatagaattatatattattttaggtattagggatatatgttaaattagatagatataatatttgtatttacggagtttatagatttgaagggaagagattttttgaataagtaattataagtttgaagaggagggagaagtcggattaggagggttttattgaaagaggaaggatttgggaatattttagaattttggttttgtgtgtttttgggtaataatttattggttttatttaagtttttaatattaggatcgaatttgatgttttttaaggtttttttttgtagttttattatatattgtgattgtgaatgttatgggacgttattgttttagatagaaggtgggatgagataaattttatatgtagaatgtttttttttgggggttatcgttttatattttttttttgttttattatttagtattttttgtttgttggattatggttttggtattttggatagtttttttagtatttttttgattttattgttattagtgcgttttgggttattttttttttttagtattttttgttattttgggttaggtttttggtgtttttttgatatttgtgttaatagggtagaaggttgaaggtatttttatttaatttttgattattttagttgtagtttttggagatagtgtattagtggaaaatatttatgtttgatggaaaagatgagaatttgaaggtagaaggagaaagaatagtattaatgtaggtgtttgggaatttgggggaagggagggtattgaaggttggattggaagggagggggatttttattttatttttatgttaggttttttttagtgttgaatagatttagggtagaaatggaaagtttgaggggcgatgtgatatttaagtatggaaagtttttattttatttttagatgtatgttttttttaattttttaatttttaggttttatttaggttgttttttttttgattgaagatataggagtagtttgatgaagtagtaatttagtagaaataatgatgatggtgatgatggtgataataataatgataataattgaggaaagaattatttatagatttttttattttttatttttgtttttgttttgttttagatgagtattagttaattgatttttttggtatttttgtggagtaggtaagaattagaattttttttaagaaatatttagtttattaataattaaggagggggttgatatattgtttaattgattggtttgttttatttgaagtttcgaagtttagttttgtttatggagtttttacgattatttatgagtaagtaaataaaaaacgtttttagaatgttgagattgtttttagttgttataattttatagatattgatattggtagattaggattttattaaaggttagtttttattagttttgaggttttgaatatgttttttagtttttttggttttagtttttttattagtgaaatgggaatatgaatattatgttgtaggaatattgtttgaattaataataaatgtgtagttttgagtttttgataagtttataaaaagaataaaaatagaatttaaggtttagaggagaataataggtaaagtataagatttttagaagtttggaaaatttttagggtttgttttatttaggaggtattttattttagattgttttattttttttttatttttattaaattttagttggataatgtttttttttttaagaattatttttttttttaaataatatgattaattagttatggattaagtaatgaatggttataagtaatgtaaaatatgatatagtttttttaagtaattatttatgtttaaatattgattttttaagtagttcgatttttaaaaaaatttttatatttttataatgttagatattgttttatttgtatgtgttaattttaattttatttatttttattttatataaagtaaaatgtattttttttggtgtatagttttgaggttttataaatgtttagagttaggtaattataataaagatagaaaatatggttattatatttttaaaatttttttttggcgttaattgtttttttatttttaggttttggtaatttttagtttgtttttatagtttggttttttttagaatgttatatgagtggaattgtagaatatgtagttttttgagtttatttttttttatttgatagagtgtatttgagttttatttatgttgatttttgtattaataatgtatttttttttattgttgagtagtattttattgtatggatgttttataatttgtttatttatttattatttaaaggtttgtttttaggtttgggtattaattatgagtaaagttattataaatatttatatatatgtttttttgtgaattaatgtttttatttttgttggataaataattgattgttgagttgtatgataagtgtatggttaattttatttttttttaagttattaaattttttattagatgggatatattattttgtatttttataagtaatggttaagaattttaggagttttatatttttataagtatttagtattgtaagttttttttattttagtatataatgggtatatagtagtattattttgtagagttgttttttattaagttaagaaagttttttttttttgttagatgttttttttatatt

SEQ ID NO: 1831 - DNA, 13326 bp, Artificial Sequence
  chemically treated genomic DNA (Homo sapiens)
ataggggaatttaattaagtttgaatgatagtattttattttttaaatttgttttaaaatgaattgagttgtaataagagttggaagataatatagagtttttaaattttttttatttatttgtttagtgttaattttatgtacggttatagtatagtaattaggattagggagtggacgtggatttaatgttggtgattatattttagagtttattttggtatttttagtttttttatttgtattttttttttttttaggatttagttttggtattgtgtagtttacggtcgtcgggggttattaggtttttgagtttttttttatttatgtttattttttaaaaaataaatttataaatttaaaaatataaaaaatagtgcgcgtatatatatatatatatgtacgtgtatatatatatataagttaggtattaaaagataaatattttatgattttttttttatatggaatttaaaagtgtcgagtttatggaagtagagagtggatggtggatatttagggttacggggtaggtgcggtggggggtaggtgtggtgggggttggtgttatgggggggataggtgtcgtgaggggtagaaagatgttggttaaaagtgagggttttagttgtaggataaaaatgttttgggatttaatgtatagtttgatgattattgtttatttgaaaatcgttaggagaatagatattaaatgtttttattatatatataaaaggatgaatacgtgaggtgttgtatatgttaattagtttgatttaattattttatagtgtttatatgtatgaaaatattatgtgaatataaatatgtataatttgtatttgttaatgatagtttgatgaagttgggggcgaggaaaataaaaattaaaaagtgaatggtaagtaaaaaaggtaatattaggttgtagtttgaagaatataaggtagttaggttttggttatatgttaggtgagttaagtgtgagtttattttggattttttttttgttatagttataggtaagggtttattataggtggttttgggtttcggttagggagagttttttgtttgtggatagaatatacgatgtttgtagggagaaaggtggtttttttatggagatattaagtaaaatgtgtgatttgttgttttttatgtattgattaaggtatttagtaattagatttttttaggatattaaatagtttattggtatttgttaaaaaatggaagcgtgtttgttttttcggtgggttcgggattggatcgtagggttggtgttatttttttattgagatttgtttgtagtagggttttgtatttttttattttgttatgtgtgagttggttttttattgtattatgcgttttttgtagatttttgttttttttggagttttttgattttttttataatgggagaagacgtgtattttttttttttttttttatggttaaaattgtttttttttttattgagttttttttgtaatttttttgttttttattgttgggtggttacgtttttttaatgtttttttttgatagagattgggggttttagttagatttttagttgttttttttttatttttttattatgtgatagtttcgggttttttacgtttttttgtagaaatttttttttttaagtttttcgtttttttttttaaaaatgtgtgtgttatttagtgggttttttgtaaattcgttatttttagattttttttcgttttttttttaatatttttagtgtaatagtttttattgtatttgatgtattatttatattgtttaattagtattaaaataagtatattatgtaatttagttaaaatatgtatttttaaatgatagatatattttttatatttgtgcggggttaaatggtaatagtaatttagaggagaggttataaaacgatttggagagttgatgtgtcggttcggttttttttagttgtgtatgtaaattttttttttttaggtttttatcggtattcggtatttttaagcgtttttttgtgatgaaaagagtatttagttagtatttattttatattttaatgtttttttttttaaatttttttttgagtatttgttttacgttgttttattttattatttatttttttggttgtgtgaattttttgcgaatgttttaataaagggttacgtgtttagtggttttattttattagtttcggaggttatagatttaaatgagatttttggtagtaaggtttagggataggtttggttgtgtttggagattttagaggttttgtttttggttttttttagtttttggaggtttatggttacggttttttagttttagtttttattattatttttttttttttttttttagatttttttatttttgttttgtaaggagttgtgtgttaatattaaggttagtggataatttaggttaattttttttttttaaaattttaattgaattttatttgtaaagttttttttgttatgtaggttgtagttataggttgggggattgtgttttttagacgttggtgttttgagttatttttgaggttttttttatttatatttttttaagaagaattttatttatttatagtttattattgtatttttttttaggatttttaaatgtgtttttttaagttggattttatttaatagttgaaagtatatttttaaatgtttaagagtttattgttcgtttgtgttacgggtatttttaatataattttaagtttgagtttgttgtttttttgtttgttatagttagtttttttttttttttggtttttttagggttagtatatgagatttttatttgtttaggtattaaatcgaggatggttgaatttttagaggttttgtgttttttttttgtttttaatagtaatttattattgagttatggaattttttttaatgagttatcgagtttggttttttttttttatttaaattttatttttttagtgattatttttagggtgcgtggggggattatattattgttggttgattttttttttgttttttagagtttgtttaatttatttgttatttttatttatttgaggggtgagtgatgaggattgaggggagaatgttaaaggtaaattattatatttttgggttttagaatattttttaataaagattaatgttttgaagtttttgtatcgtgttttagtatttggttttaaattatttagaggaagtattagttatatttggagaagggaaagaaaaggagaaagatgaagatgatttttataaattagaaatttataggattttcgggggtatgaagaggttttaagttttaggagtaggttattgaagatgtgttattttattatttttatgatgagatatagtttgaaagtagattatttatgaaaatatgttattttttagtgttcggaatgtagttatggtgatttttttatagaatatttttgtttttgtggggatttttttgatgggtgtatgatgaggattgaggggagaatgtatgttggtgaatatatattgaattgtgtttattttttattttaataaattggaaaaaagtgtattttatttattttttagtgataagaaaattaggggtttggggataggaagtaaaaggtttagagttgtagagcgagttatcggtgggtttgggagttgtatttaatttaattttcggaagattaatagttttttttttatagggtatttaattgtgaaagtaagagggaggaaaatgtaagtgttataagtttggatttagttggtttattttttttttttgtataatttttttttttttttttttaatttattcggttagaggttggattgtatgtggatttcgatgatatggtattttgtttttgattagttaggatatataagaggttcggcgtaaatataataaagttcgtagatattttgtttttacgaagaacggacgttattcgattttttagtattttgacgggttatttaagcgcggagttagtttataaggtgggtaattaagtttttggaaggtaattaaggcgtttattttagaagagttatagtcgtgaaaattatttagtagtgtagttggttgagaagaggaaaaaaggttaggttgtaaagttttttatttttttattttttaagagaaatttattattggaatttgtaaagtggtttaagagtggttgtaatttgggttattatagtaggtatgggtggcgttttttagtaaagttgattgattgattgatgagtgttgtttgtaatgattttcgttggaatatgtgagttttgtagggtcgatttttagattatcgtttattgagatatatttttgttagtatggatttattggtgttattttgtttaataaaattagtggtttaaaaatagttatagaaagtttaagagaagaaaataaggatttgaaagtagaaatgatgaattttgaattttttgttttgttttaataattagaattttaaaattattttatggatataagaatgttttaagaaatttaataggtatttaggggttttatttattatttttataaagattaaatttttaatagtatttattttttgttatatagatgtattaggggaaatagattttttttatttttaataattatttttagtattgttatattatttgatattattaaaaatttaaataggttattattgagatatattggtaattggagttgttaatataaaaattttgtttttgaataatgggggtttgggaggtttgtttagcgttgtagtttttgtaattttttgatatggacggcgattttggtttcgtagattttaggtttgtgagggtcgtttattgcggtagaggttgcgtggagttagtggagggagttttttagtagggagataaggatatagcggtttttatggttttgttagtgtttgattatatattttgttttttttcgttaattttagaatgagagcgttcgttgtgttgtttgttacgttggttatggtttgtatagaagttttttttttttttatttcgagagggaaagaatttttttggggtaagtagtaaatatattgcggttttttggttttataaagttattttttatatttattaaaatagagggtataatggtagtttttgagagttattttaggtttttgtagtgtatgttttgttatgtttaagaaaaaaaaattgtaatttttgattttagaaggattgaaatatgtatatttttttttttaaaaaagagttgattttttttggatgatataatagataatttttatttttatttatttatataattgaaaaaaaaattttttgggagtgtttttttttttttgttatagaattattttttattaaataatttttgtgatgtattttttggaattagtgtgttattatgtgaaaataagttaagaaagttattgagatgtagtggttaaaataattatagattaagttttttgttttttttttaataaaataaataaagttttaaattttgagaataagttttattggagtgaatattgtaggggtatttgtttggatattttattttatggatatcgttggtttcgggagtaggtgatatttcgttgggtaggtttttgggtttttgtatatagtttcggggtttttggagtaggtgatatttcgtcgggtaggtttttgggtttttggatatagttttagggtttttggagtaggtgatatttcgtcgggtaggtttttgggtttttgtatatagtttcggggtttttggagtaggtgatattttatcgggtaggtttttgggtttttggatatagtttcggggtttttggagtaggtgatattttattgggtaggtttttgggtttttgtatatagtttcggggtttttggagtaggtgatatttcgtcgggtaggtttttgggtttttggatatagtttcggggtttttggagtaggtgatagtttatcgggtaggtttttgggtttttgtatatagtttcggggtttttggagtaggtgatatttcgttgggtaggtttttgggtttttgtatatagtttcggggtttttggagtaggtgatattttgtcgggtaggtttttgggtttttggatatagttttggggtttttggagtaggtgatattttattgggtaggtttttgggtttttgtatatagtttcggagtttttggagtaggtgatattttgtcgggtaggtttttgggtttttggatatagttttggggttatggtatagtattggtatttttgtttttattagttttttttaggattggaggttttgtttgtcgtttagggttatagaatttggagttttcgttgtttttagttatatttagtttagttttttgttgggggttatattttattttaatttttttgtattttaggattttataattatattaggagtggtagtgaagtttataatagattcgtaggttttttaaaaaaattttttttttatagtttttaggattttttggttattgttcgttttgagattagggaagtcgtggggtttttttttgttagtttttatttatgttttaaggatgggttatttatttttaatttttgttttttttttgtaaatggagaatattggaaaattatttatcgtagttattatttgtgagtaagaatgagatattttatttaaagcggtgaatgtagtatttcggtaattattaaaaaataaaaaataaaaatggagttataatataaagaattttaggaaaaagtgattttgtatttttttagaataaattagttattttattatttggaatatgttagatgtttagttaatggtttgtaaattaattattttgttattttattttatatttagtaggatttggttgtataaaattagagtaaaatatgttagaagttaagagttagttttgagtaagttgtgatatatgagagttatttaataaaatatttaaaattttgtaatatgttttttaattttaaaaattatatttaaaaagttattaggaatgtagtagttatagtttttgttaaaatagtttttaaaaattatttttttatatttgggagatttgattttttcgttttgtttaaatttttggttgatatattacgagtgtataggatagtagttgataattgtttcgcgtgttgggtatatgtttttgtttgttttaatattttaaagttgatttattgtttgtttgaaatgtgaatgagttattgaaaaaatattatgtgttttatagtatttttattttatagtttttaatagttgttttgtagttttaaatttgtttggaaaatgatgtttaatgattgtgtgtgggtttatgttatttgtgtttatagatatgtgaagtaaaaattttggtttgttttttagtttttgtgtaggataagttaaagagtaggtagcggtagggttaagaggatttaggttttttttggattatatacggttatcgtaagtatatggtgtttcggggggttttgtttggtgggtggtttatttttatgtgttaggtatttattttatagattaaaacgtagaggtttggaagttttagaagtagtaaggttgtggtcgtttagttttatagttttacgttttaggtttttatagagaattaatatatatttttatatttgaagttcgatgataagtatttagcgaaaagtattaggttagtgtcgtgatttatatttgtaattttaatatagtattattaggttagtgtcgtgatttatatttgtaattttaatatagtattaggttagtgtcgtgatttatatttgtaattttaatatagtattattaggttagtgtcgtgatttatatttgtaattttaatatagtattaggttagtgtcgtgatttatatttgtaattttaatatagtattaggttagtgtcgtgatttatatttgtaattttaatatagtattattaggttagtgtcgtgatttatatttgtagttttaatatagtattaggttagtgtcgtgatttatatttgtaattttaatatagtattaggttagtgtcgtgatttatatttgtaattttaatatagtattattaggttagtgtcgtgatttatatttgtaattttaatatagtattaggttagtgtcgtgatttatatttgtaattttaatatagtattaggttagtgtcgtgatttatatttgtaattttaatatagtattattaggttagtgtcgtgatttatatttgtaattttaatatagtattaggttagtgtcgtgatttatatttgtaattttaatatagtattattaggttagtgtcgtgatttatatttgtaattttaatatagtattaggttagtgtcgtgatttatatttgtaattttaatatagtattaggttagtgtcgtgatttatatttgtaattttaatatagtattattaggttagtgtcgtgatttatatttgtaattttaatatagtattaggttagtgtcgtgatttatatttgtaattttaatatagtattaggttagtgttatgatttatatttgtaattttaatattttgggaggtcgaggcgggaagattatttgaggttaggagtttaagattagtttgattaatatggtaaaattttatttttattaaaaatataaaaaaaaattagttgggcgtggtggtgtttatttgttattttagttattcgggaggttgaggtacgagaattagttgaatttaggaggtggaggttgtagagtcgagattatattattgtattttagtttaggtgatagagtgagaatttattttaaaaaaaaaaaaaaaagagagagagagaaaaaaagaaaagtattagttttggatagagtttaggttgtattaatttgtttgtaaattgtaggaaggtgagaataagaagggaaagattttggttggtgtttagattgggtgggtgtaggagagatttttgttttagagtaggattttttagggttaaagtataaagagaaataaattttagtatttgaaaattttgtaataagagtttttgaaaatggaaaaaaaatttatgtttgattattgttgtttaagagaagtttgttattaattttttttttaacgttttgaatagaatgttttttattagaattttgtgtatttattattatataggttgagaggtattttagtatttgtgtaatattaagatttatgtgtaattatttttatggtaaatgttttataagttatagttgttaaaagaaaataagatgtaaatgaataagaagaagtagaggcgttgtttgtagtttgggaaaatttgggaagttagtttaatgagtgaatttgttttaaaaggaaagttggtaaattttattttagtttattaaattttaataaatagtaaggattaaagtaagaattaatatataattttaaataggaattaagcgtttagaattaggagtaaagttttggttttgggggtttatggttttggagaagaaagattttggtttttatatatatatttaatataaatagtttttggaataaggtaattttttttttttttttgaaatgtggtatgtttttgtttaatgtgtttttgaattttattttttttatgaataatatgaatatgtataaaggagaatttgggggaatcgtgttatgcgttttttagagtaggagtaattttgagaaggcgtaggtagagagtagcgggcggtttttttagagtaagtaattaagtttcgtgattttttagaatttagtgtttagttttgaaaaaaaatttcgggtttaaattttttaagtttatggtttttgtattagacgttttttttttgggattgttgggaattgaggaaggaagggcgttgtagagttaacgatagtaaggggtttagagttggttattttagttttttggtggtaggagagttaatgtgagttgatggaaattgagaagtagtagataaaggaaaagttatttgttttgtttttattgtttaaaagtagaatataaattcgtaaaagtgattatttttttttttaatagaaaggatagaaatttattattagggattttaggtttttaatagtttggaattagttttagaggtatttgtgtggtaaatttttgtagtttcggtttttttttttgtagttgttttagagaggtttttttaaaacgtgttttttgggaatttaaagttttttgttttggttttgtagttttttggaaaatgattgtttttttgttgaggggttgtgtagtagagttttaacgatttattcgagtttttattttggggcgtttagggggttttttcgtggaagtaggagtttaggttaataatttttgtgagttttttttttgtgattttgttttttgttagtttaattttaatgttttagaaaattaatttaagatgtagggagagaaaaggttttttttttttttatagatggatgttagttatttttatttagttaagaagtagttaatttaaataatgaaaatattatcggttttagtagagatttgagattatttgatgagagttatgtgtttttgggaggaagtttttaatatagaaatggatttattttatgaaatttaaaagattaataatttgtaagtttataagaatgttttaattttgtaaaatattttataataagaaaagaaattagagattaagtaatatatgattagttaaatttgaataataatatattaatattggttaataataaggaatgatttttttagtaattgtcgtttttaagtatagtagagaaggataagtatgtttttttggattttgaggaagatttgtacgtaatttagtgggtattaggagtttttagatgtttttattaaaggtataggtataagtaggttttggtttagaaaggttatttgggtgatagtaggagggatagaaggatggtggggagattagtgtaggagttagttaagagttttttttattaaggtagtagaaagtgagattgataacggttaggtaggagtagaacgtttttttagagatattatggggaaatttatattatatggtgagtgaaaggtaaggaaagttacggttgggttttttgtttggggatttgagttggtagggtggttattttaggttgttaatattttttaatagggaatagaggaggatggcgtgatttaggagagaagtttaagtggaaaacgggcgtttgggagaggattaaaggagggtgagaggagagggtaaagattagaggagttagaaatgtattcgaggtgatatttataggagggagattatggagagaagagagttatagtgatcgaggttgagagagagagtggttagagattgaaagtaaaaggtacgacggtcgggagtattgaacgtttgttaggttttggattaaaagtcgtgtaaatttttttgtaaaattattttaagacgtaattttgtgtatttgttaggtttttagtttagagtcgtgtaaatttttttttttagagtatatttgcgaggttttcggttaagagttgtgtaaatttttttttaaaattattttaagatgtaattttgtagttaggagagaaaatcgcgttaggtgaagtgagttgtcgcgttattcggagattgatttgttttattttagagtttatggtcgttatttttttgttatttaagaatgtcggtaatattttaaaagtattagagttttggggaggtggggggcggggttggttattgtatttggtaaataagcggtcgtgattgattatagaatataaaatgtgagttgagttgtttgggtagttgtagtgggtttagaaggaaataagaggaaaataaaggaaaattttaggtgttttatattttaagtttttgtgggaataggaggttttttgatttttgagagttgaaagaaatttttataaagttcggaatgttggtttttgaggtttatatttgttatcgattttgcgacgtttaggtcgttttttttttttcggtttttatttatttttggtggtatcgttttatattgtattgtttttagtacgtatatattggcgtaaagttaggttttttttttagattttatatttagagtttgtagttttgacggttgtgttgggggttttcggcgagttgtgagttcgtgttaggtgttttttttttttttttgtttttgttttagggagttttatatcggggggttttgtttattgttttttgtttaattttgaggggttattttttgttttaagtgtttaattattggttatttattttagaatttaagagagatttagtacggaggtttttttaattttgttgtattatattgtaagaaattgggtggttaatggaatagacggagtagggtagagtgagtaggaagaaatgatgttggggaatttgtgtgttttttgggtggggacgagtatggaaggcgcgtgggattgaagttttgaagatttcgtaggcgttttttttggatagatttcgtgtaggcgttttttttggatcgatttcgtgtaggcgtcgcgttggatcgatttcgtgtaggcgtcgcgttgggttatggggagagcgagagtttggtgtgttttttagggatttttatttgtttttaggagttaatttatttttttggtgaagtattgatgttacgtaggtgaatttagtaataggattgacgtgtgaatatggtcggaaatatttgtcgtttttttgttatcgcgttcggaattttacggtgatatttagaaatgggattttaattttttatatattttaggtgttaaaataaataatataggagtgtttttattggaaattattggtatagtggaattattttattttttattaaatatataagataggtaaattttattaattttattattggtttaggtaattagtgatgaatgtttagaataaaagttattcggaattatttgaagtggtttgggtaagtgcgaaattaaggtgagtagttttgattttattttttaggtagtttcgtgtagtgggggtggacgtttttttgtagcggggaagtgaaggtttgtggagggaagcgatttcgggatttggttgtttgtttgtttcggaagttacgtgggtattatcgtagtaagatgggtttgaggaataaagtaatattgttagtgaatcgttgaattgttattgcgttttgattgtgtgatattttgtttcgtagg

SEQ ID NO: 1832 - DNA, 13326 bp, Artificial Sequence
  chemically treated genomic DNA (Homo sapiens)
tttacggaatagaatgttatatagttaaagcgtaatgatagtttagcgatttattgatagtgttgttttgttttttaagtttattttgttgcggtgatgtttacgtggttttcgggataggtaggtagttaggtttcggggtcgtttttttttataggtttttattttttcgttatagaggggcgtttatttttattgtacggagttgtttggaggatgggattagagttatttattttaatttcgtatttgtttaaattattttaaatgatttcgaataatttttgttttgaatatttattattggttatttgagttagtggtaaagttgataagatttgtttattttgtgtatttaataaaagataaaataattttattatattagtagtttttaatgaaagtatttttgtgttatttgttttagtatttggaatgtgtaagaggttaagattttatttttgggtattatcgtgaagtttcggacgcggtaataggaagacggtaagtgttttcggttatgtttatacgttagttttgttattaaatttatttgcgtagtattaatattttattaaaggaatgaattggtttttaaaagtaaatagaagtttttgaggggtatattaggttttcgttttttttatggtttagcgcggcgtttgtacgaggtcggtttagcgcggcgtttgtacgaggtcggtttaggagaggcgtttgtacgaggtttgtttaggagaggcgtttgcggggtttttaaggttttagttttacgcgttttttatgttcgtttttatttaaggagtatataaattttttagtattatttttttttgtttattttgttttgtttcgtttgttttattggttatttagttttttatagtgtgatatagtaaagttaagaaaattttcgtgttggattttttttgggttttgggatgagtaattagtggttaagtatttggggtagagggtgattttttagggttgggtagagagtaatgaatagagtttttcggtgtggggttttttggggtaagggtaggagggagggaggaatatttagtacgggtttatagttcgtcggggatttttagtatagtcgttagagttgtaggttttgggtgtggaatttgaagaggggatttggttttacgttaatgtgtgcgtgttggggatagtgtaatgtgggacgatgttattaagagtgagtaggagtcgagaggggaggggcggtttgggcgtcgtaggatcggtggtaggtgtggattttaaggattagtatttcgggttttatggagattttttttagtttttaagaattagggaattttttgtttttataaaagtttgagatataagatatttggaatttttttttattttttttttatttttttttaaatttattgtaattgtttaggtaatttaatttatattttgtattttgtggttagttacgatcgtttatttgttaaatgtagtaattagtttcgttttttatttttttaggattttggtgtttttgggatgttgtcggtatttttaagtggtagaggggtgacggttatgggttttggagtgagataaattaattttcgagtgacgcggtagtttattttatttggcgcggtttttttttttagttgtagagttatattttaggatggttttagagagaagtttgtatagtttttggtcgagggtttcgtaagtgtgttttgaagagagaagtttgtacggttttgggttgagggtttggtaagtgtatagagttacgttttaggatggttttatagagaggtttgtacggtttttggtttagggtttggtaagcgtttagtgttttcggtcgtcgtgttttttgtttttagtttttggttatttttttttttagtttcggttattgtggtttttttttttttatggttttttttttgtgagtgttatttcgggtgtatttttggtttttttgatttttgttttttttttttatttttttttggtttttttttaaacgttcgttttttatttgaattttttttttgagttacgttatttttttttgttttttgttgaggggtgttaatagtttgaaataattattttattagtttaagtttttaagtaagaagtttagtcgtggttttttttgttttttatttattatgtggtgtgaatttttttataatgtttttgggagaacgttttgtttttgtttggtcgttgttagttttattttttattgttttagtagaaggagtttttgattggtttttgtattgatttttttattatttttttgttttttttgttgttatttaagtgatttttttaaattaaggtttgtttgtgtttgtgtttttgatgaaagtatttgaaggtttttgatgtttattgaattgcgtgtaggttttttttagaatttaaagaaatatgtttatttttttttattatgtttggaaacggtagttattagagagattattttttgttattgattaatattaatatattgttatttaagtttaattgattatatgttgtttagtttttagtttttttttttattgtaaaatattttatagaattaaaatatttttataggtttgtagattattagttttttaagttttataaaataaatttatttttgtattgaaaatttttttttagagatatataatttttattagatagttttaagtttttattggaatcggtggtgtttttattgtttaggttaattattttttggttgaatagagatgattgatatttatttgtaggggaagaagaaattttttttttttttgtattttagattaattttttggggtattgaaattagattgataaaaggtagagttataggaggaaaatttataggggttattagtttggatttttgtttttacgagggagttttttgagcgttttaagatggaaattcgaatggatcgttagaattttgttgtatagttttttagtaaaagaataattattttttaagaagttgtaagattaaagtaaaggattttgagtttttaggaaatacgttttgaggaggtttttttggggtaattataggaagggaggtcggggttgtagaggtttgttatataaatgtttttggggttggttttaggttgttgagggtttggggtttttggtgatgaatttttgttttttttgttggagagggaaatggttatttttgcggatttatgttttatttttaggtaatagaggtagggtagatggttttttttttatttgttgttttttagtttttattagtttatattagtttttttgttattagggagttggggtggttagttttgagttttttgttatcgttagttttgtagcgtttttttttttttagtttttagtaattttagggaagaggcgtttgatgtaaggattatagatttagggagtttgaattcgaagtttttttttagaattgaatattgagttttagggagttacgggatttaattatttgttttggagaagtcgttcgttgttttttgtttgcgtttttttaagattgtttttgttttgaggggcgtatggtacggtttttttaaatttttttttatgtatatttatattgtttataaaagaggtggaatttagggatatattaggtaagaatatattatattttagaaagaagaaggaagttgttttgttttaaaggttgtttatgttaaatatatatatgaaagttaaaattttttttttttaaaattataagtttttagggttagagttttgtttttaattttaagcgtttgatttttgtttagagttgtgtgttgatttttattttaatttttgttgtttgttgaaatttaatgaattggaataaggtttgttaattttttttttaaaataaatttatttattaggttagttttttaaatttttttaggttgtaggtagcgtttttgtttttttttgtttatttgtattttatttttttttaatagttataatttgtggaatatttgttataaagataattgtatataaattttgatgttgtataaatgttggaatgttttttagtttgtgtggtgatgaatatatagggttttggtgaagaatattttgtttagggcgttagaggagggattgatagtaaattttttttagataataatggttaagtatagattttttttttatttttaaagatttttattatagaatttttaggtgttgaagtttatttttttttgtgttttgattttaggggattttgttttggaataagagttttttttgtatttatttagtttgagtattagttaagatttttttttttttatttttatttttttatagtttgtaggtaagttgatataatttaaattttatttaggattgatgttttttttttttttttttttttttttttttttttttttttgagatggatttttattttgttatttagattggagtgtagtggtgtgatttcgattttgtaatttttattttttgggtttaattgattttcgtgttttagtttttcgagtagttgggatgataggtgggtattattacgtttagttaatttttttttgtatttttagtagagatggggttttgttatgttggttaggttggttttgaatttttagttttaagtgattttttcgtttcggttttttaaagtgttgggattgtagatgtgagttatggtattggtttgatattgtgttgggattgtagatgtgagttacggtattggtttaatattgtgttgggattgtagatgtgagttacggtattggtttgatgatattgtgttgggattgtagatgtgagttacggtattggtttgatattgtgttgggattgtagatgtgagttacggtattggtttgatattgtgttgggattgtagatgtgagttacggtattggtttgatgatattgtgttgggattgtagatgtgagttacggtattggtttgatattgtgttgggattgtagatgtgagttacggtattggtttgatgatattgtgttgggattgtagatgtgagttacggtattggtttgatattgtgttgggattgtagatgtgagttacggtattggtttgatattgtgttgggattgtagatgtgagttacggtattggtttgatgatattgtgttgggattgtagatgtgagttacggtattggtttgatattgtgttgggattgtagatgtgagttacggtattggtttgatattgtgttgggattgtagatgtgagttacggtattggtttgatgatattgtgttgggattgtagatgtgagttacggtattggtttgatattgtgttgggattgtagatgtgagttacggtattggtttgatattgtgttgggattgtagatgtgagttacggtattggtttgatgatattgtgttgggattgtagatgtgagttacggtattggtttgatattgtgttgggattgtagatgtgagttacggtattggtttgatgatattgtgttgggattgtagatgtgagttacggtattggtttgatatttttcgttgagtatttattatcgagttttaagtatgaggatgtgtgttggttttttgtaaagatttgggacgtgagattgtgagattgagcggttatagttttgttgtttttgagatttttagatttttacgttttgatttataaaatgggtgtttgatatataagggtgagttatttattaagtaggatttttcggagtattatgtgtttacggtgatcgtgtgtggtttagggggagtttggatttttttggttttgtcgttgtttgttttttggtttgttttgtatagaggttggggagtaggttaaggtttttgttttatatgtttgtgagtataggtgatataaatttatatatagttattgggtattattttttaaatagatttaaagttgtaaaataattattaaaggttgtaaaatagaaatattgtgagatatataatatttttttagtaatttatttatattttaagtaaataataagttagttttgaaatattggagtaggtagaagtatgtgtttagtacgcggggtagttgttagttgttgttttgtgtattcgtgatgtgttaattaaaagtttaagtaaaacgaaaaggttaaattttttagatatggaaaaataatttttaaaaattgttttagtaaaagttgtggttattgtatttttgatggttttttaaatgtgatttttaaaattaaaaaatatgttataaagttttaaatattttgttgaatagtttttatgtattataatttgtttagaattagtttttgatttttaatatgttttattttggttttatataattaggttttattaaatatgaaataaaataataaagtaattaatttataaattattggttgaatatttagtatgttttaggtgatagagtgattgatttattttgggaagatgtaaaattatttttttttgaggttttttatattgtgattttatttttattttttgttttttggtgattgtcgaggtattgtatttatcgttttaaatgaagtattttatttttgtttataaataatgattgcgatgagtaattttttagtgttttttatttgtaggggagggataggaattaggggtgagtagtttatttttggggtatggatggaagttggtagggagaggttttacggtttttttgattttagagcgggtagtgattaggaagttttgggggttgtggagggagagtttttttaaggagtttacgagtttgttatggattttattgttatttttaatatggttgtgaagttttgagatgtagaaaaattggggtaaaatgtggtttttagtaggaggttgggttgggtgtggttgggaatagcgaggattttagattttgtgattttgaacgatagataaggtttttagttttgggaaaggttggtgagggtagaggtgttagtgttgtgttatggttttaagattgtgtttagagatttagggatttgttcggtaaggtgttatttgttttaggggtttcgggattatgtgtagaggtttagggatttgtttagtgaggtgttatttgttttaggggttttaagattgtgtttagagatttagggatttgttcggtaaggtgttatttgttttaggggtttcgggattatgtgtagaggtttagggatttgtttagcgaggtgttatttgttttaggggtttcgggattgtgtgtagaggtttagggatttgttcggtgagttgttatttgttttaggggtttcgagattgtgtttagaggtttagggatttgttcggcgaagtgttatttgttttaggggtttcgggattgtgtgtagaggtttagggatttgtttagtgaggtgttatttgttttaggggtttcgggattgtgtttagaggtttagggatttgttcggtgaggtgttatttgttttaggggtttcgggattgtgtgtagaggtttagggatttgttcggcgaggtgttatttgttttaggggttttgggattgtgtttagaggtttagggatttgttcggcgaggtgttatttgttttaggggtttcgggattgtgtgtagaggtttagggatttgtttagcgaggtgttatttgttttcggggttagcggtgtttatggggtaaaatgtttaggtaaatgtttttgtagtatttattttagtgaaatttgtttttagggtttggaattttatttattttattaaaagaaaagtaaagagtttgatttgtgattattttaattattgtattttagtagtttttttaatttgtttttatatagtagtatattgattttagaaaatatattatagaagttatttaataaaaaataattttgtagtaaaggaagaaaaatatttttaaagaattttttttttagttatatgaataggtaaaagtgaaaattgtttattgtgttatttaaggaaaattagtttttttttaaagaaagaaatgtatatattttaatttttttaaaattaagaattataattttttttttttaagtataataaagtatatattataggggtttaaagtgatttttaggagttattattatgttttttattttagtaagtgtgaaaaataattttataaggttagaagatcgtaatgtgtttgttatttattttaaaggagttttttttttttcgagatgaaggggaagaaggtttttgtgtaggttataattagcgtgatagatagtatagcgagcgtttttattttaaaattaacggaaggagatagagtatgtaattaagtattgataaggttatgggaatcgttgtgtttttgtttttttgttgaggggttttttttattgattttacgtagtttttatcgtagtgagcgatttttataggtttggggtttgcgagattagagtcgtcgtttatgttaggaggttatagaaattgtagcgttgagtaggttttttaggtttttattatttaaaaatagagtttttatgttggtagttttagttgttaatatattttagtaataatttatttaaatttttggtaatgttaaatagtgtaatagtattgggaataattattgggaatgaaaaaaatttgttttttttaatgtatttatgtggtaaaaagtgagtattattagaaatttagtttttataaaagtgataaataaaatttttaaatgtttattgaattttttaaagtatttttatgtttataaaatgattttagaattttagttgttaagataaaatagaagatttaaaatttattatttttatttttaaatttttgttttttttttttaggttttttgtggttatttttgagttattaattttgttaagtaggatagtattagtgagtttatgttgataggaatgtgttttagtagacggtgatttaggaatcgattttataggatttatatgttttagcggaggttattgtaaatagtatttattagttagttagttagttttgttgagagacgttatttatatttgttataatggtttaaattatagttatttttgggttattttataagttttaatgatgaattttttttagaaaatggaaaaataaaaagttttataatttgatttttttttttttttttagttaattgtattgttgagtaatttttacggttgtaatttttttgaaatgggcgttttaattgttttttagggatttggttatttattttataaattgatttcgcgtttggatagttcgttaagatgttaggaagtcgagtggcgttcgtttttcgtggggatagaatgtttgcgggttttgttgtgtttgcgtcgggttttttgtgtgttttgattggttagaaataaagtgttatgttatcggggtttatatgtagtttagtttttggtcgaatgagttaggaagaagaggggaaaaattatatagggagaaagaataaattaattaaatttagatttgtgatatttgtattttttttttttttatttttatagttaaatattttgtgaaaaaggggttgttaatttttcgaggattgggttgggtgtagtttttaggtttatcgatgattcgttttataattttgagttttttgttttttgtttttaagtttttagtttttttattattaagaggtgaataaagtatatttttttttaatttgttgaggtgaaaaatgagtatagtttagtgtgtgtttattagtatgtattttttttttaatttttattatgtatttattaaaagagtttttataaagatagagatgttttgtaggaaggttattatgattgtatttcgaatattgggagatgatatgtttttatgggtgatttgtttttaggttgtattttattatgaaaatgataaaataatatatttttaatgatttgtttttgagatttggagtttttttatgttttcggaagttttatgggtttttagtttgtgaaaattatttttattttttttttttttttttttttttttaaatgtgattgatgttttttttaggtaatttgaaattaaatgttaaaatacgatgtaaaggttttagaatattaatttttgttagaagatgttttgaagtttaagaatgtgatgatttgtttttaatattttttttttaatttttattatttattttttaaatgggtgaagataataaatgagttagataagttttgaagagtagggaggagattagttaatagtgatataatttttttacgtattttgagaatggttattaggagggtggggtttggatagagaggaaggattagattcggtggtttattaaagaggattttatggtttaatgatgagttattgttgggaatagaagaaaagtatagagtttttgaggatttagttattttcggtttgatgtttaagtaagtgaaaattttatgtattggttttaggaaggttagagaagaaaggagattggttgtgataagtaaaggagtagtagatttaggtttggaattgtgttggaggtgttcgtggtataggcgggtagtgagtttttgggtatttggaaatgtatttttagttgttgggtgaagtttagtttaaaaagatatatttgggagttttgaggggggatatagtagtggattgtgagtgaatgggattttttttgggagaatgtggatggaaaagattttaagagtagtttagagtattagcgtttaggggatatagttttttagtttgtgattgtaatttgtatggtaaaaggggttttgtagatgggatttagttaagattttgaggaggggagattagtttggattatttattggttttagtgttagtatatagttttttataagataaaggtgggaaagtttgaggggagaaagggggaagtgatgatggaaattgagattggagggtcgtggttatgagtttttagaaattggaggaggttaggagtagggtttttggggtttttaggtataattaggtttgtttttggattttgttgttaaaagttttatttggatttatgattttcggagttgatggagtaaagttattaagtacgtggttttttgttaaggtattcgtaggaaatttatatagttagaaaggtgggtggtaaaatgagatagcgtggggtaaatatttaaggaagagtttgaagaagaaagtattaaaatgtaaagtaaatattgattggatgttttttttattatagaaggacgtttgaaaatgtcgagtgtcgatggagatttgggaagagggggtttgtatgtatagttgggggaggtcgagtcggtatattaattttttaggtcgttttgtagttttttttttaagttgttgttattatttgatttcgtataaatatgagaaatgtatttattatttgaaaatatatattttagttggattatatgatgtgtttattttaatattaattaaataatataaataatgtattaagtataatggaagttgttatattggaaatgttgagaggggagcggagaaaagtttgagaatggcgggtttgtaggaggtttattggatagtatatatatttttgagaaagaagacgggggatttgggaaggaagatttttgtagggggacgtggaaaattcgaggttattatataatgggagaatgaaagagaggtaattaaagatttggttgaagtttttagtttttgttagaaaggagtattgggaagacgtggttatttagtaatggagagtagagagattgtaggggagatttagtgagaaagaggatagttttagttatgagaaggaaagaaaaaaatatacgtttttttttattatgagaaaaattaaggagttttaaagaagatagaaatttgtaaggaacgtatgatatagtaagaagttaatttatatatggtaggatgggggaatgtagggttttgttataagtaggttttagtgaaggagtggtattagttttgcggtttagtttcgggtttatcgagaagataagtacgtttttattttttggtaagtgttaatgaattatttgatattttggggaaatttgattattgaatattttgattaatgtatgagaaatagtaaattatatattttgtttgatgtttttatagaaaggttatttttttttttgtagatatcgtgtgttttgtttatagataagaggttttttttaatcgaggtttaggattatttgtaataggtttttgtttgtgattgtaatagaaaagggatttagggtgggtttatatttgatttatttgatatgtggttagggtttgattgttttgtgttttttaaattatagtttgatgttgttttttttatttgttatttattttttagtttttgtttttttcgtttttagttttattaagttattattaataaatataaattatatatatttatgtttatatgatgtttttatatatgtaaatattgtggggtgattaaattaagttaattaatatatatagtattttacgtatttatttttttgtgtgtgtgataggaatatttaatatttatttttttagcgatttttaaataaataatagttattaagttatatattagattttagaatatttttattttgtaattgaaatttttatttttgattagtatttttttgttttttacggtatttgttttttttatggtattagtttttattatatttgttttttatcgtatttgtttcgtaattttaggtgtttattatttattttttgtttttatgagttcgatatttttagattttatataggagggagattatgaggtgtttgttttttggtgtttggtttgtgtgtgtatgtgtacgtgtatgtgtgtgtgtgtgtgcgcgtattgttttttgtatttttaaatttgtaagtttattttttaagagatgaatatggatgagaggagatttagggatttgatgattttcgacggtcgtgggttgtatagtgttaggattggattttggaagaggaaaggatgtagatggaaaagttggggatattagggtgagttttgagatgtaattattagtattggatttacgtttattttttggttttggttgttgtgttgtggtcgtgtatagagttaatattgagtaggtgggtgaaggaggtttgggagttttgtgttattttttaatttttattatagtttaatttattttaaaataaatttggaaaataaaatgttgttatttaaatttaattaaatttttttgt

SEQ ID NO: 1833 - DNA, 5380 bp, Artificial Sequence
  chemically treated genomic DNA (Homo sapiens)
aaaattagttaggtatggtggtacgtgtttgtagttttagttattcgggaggttgaggagggaggtggaggttgtagtgagttgtgattgtgtcgttttatagtttgggtaatagaatgagatttcgttttaaaaggaaaaaaaataaaaatatagggatttttaagaggtagggattgtaattttaaatatgatggttaaggatagtttgtggagagggtgataatttgagcgaagtttatgttttttgttttttttttttgagacgggagttttgttttgtcgtttaggttggagtgtagtggcgcgattttagtttattgtaagttttgtttttcgggtttacgttatttttttgttttagttttttaaatagttgggattataggcgttcgttattacgttcggttaattttttgtattttttagtagaggcggggttttattatgttggttaggatggttttgattttttgatttcgtgatttatttatttcggttttttaaagtgttgggattataggcgtgagttattacgtcgggtcgttttttgtttttatagatagtagttttttttttagagggagagaaaattgaggtgtttttaataatttttttttttagagatggggtttcgttatgttgtttagagtggttttaaattttgttttaagtgagttttttattttggtttgtttaggttggagtataatggtattatttaggtttattgtaatttttatttttcgggtttaagtgatttttttgttttagtttttcgagtcgttgggattataggcgtttgttattacgtttaggtaatatttgtatttttaatagagatagggttttattatgttggttaggttggttttgaatttttgattttaggtgatttatttgtttcggttttttaaagtgttaggattataggtatgagttattacgtttagtcggttttttttttttttttaattagttaaggatagtagtgaaaaagggaggggagaaaaattttttgtaattttttttttttttttttgagatagagtttcgttttgttatttaagttggagtgtagtggtgtaatttcgattcgttgtaatttttattttttaggtttaagtaatttttaggttttaattattcgaatagtcggaattatagtcgtttattattatgtttggttaattttattatttttagtagagacgaggttttattatgttgggtaggttggttttaaattttttattttaagtgattcgtttaattttattttttaaagtgttgggattataggtacgagttagtttatttagtttgtttttagtaatttttttttcgttatgtagtttttttgtagttgttttaagttatttttaagatgtgattgttgagtagttttttgttaatagagggttagaatgattatattttttttagtttttatatagtaagttagatttttatttggttgttttttttttttggtaaaaattgtttaaatgagttagagttaaatataagtatttataaaatattggggttatttaaaaaaattatttgttgaaattgaagagtttatggtgttaagtaatatatttgaaaagaaaatttgtttaagttaatggattttaaaatatttgatttataattataggaagaaatatatgtgggatttagtatatttatatatatataaatttaaaatatatttgggagtggtggcgcgtgtttgtaattttagttatttagggggttgaggtaggagaatcgtttgaatttgggagttagaggttgtagtgagtcgagatggtgttattgtattttagtttggataatatagcgagatttatttttaaaaaataataaaataaaataaaataaaataaaataaaataaaataaaataaaaataaaataaaagttttataaaataatatttatttttattgtgattcgtttttatatatgattttttttttttatttttattttattttaaataaagttgtttattatttattaaattgttttttaatcgtttgtttatttttattggttgggtgtttaagattttttttttttagagttcgtaattttattaataaaatttttgttgttgtttgtagtttgagatagagtttcgttttgttgtttaggttggagtgtagtggcgtaatttcggtttattgtaattttcgttttttaggtttaagcgatttttttgttttagttttttgagtagttgggattataggtaatcgttaataggttcggttaatttttgtatttttagtagagacgaggttttattatgttggttaggttggttttaaattattgattttaagtgatttatttgtttcggttttttaaagtgttgggattataggcgtgagttatcgcgttcggttaaaggtaagattttaatttagggtgttatgattttttagtatttttttttattacgattatatttttataaaatttaaagaattgtttcgatttgaatatgagattgggtagttgagagtaatgtttgagagtattgtatgggttaatgataatatttttgaatagtttggaagtattaaaattgaagaaaataattatatttgtcgggtgtagtggtttacgttcgtaattttagtattttgggaggtcgaggcgggtagatcgtttgagtttaggagtttgagattagtttggttaatatggtgaaattttgtttttattaaaaatataaaaaaattgtttgggcgtggtggtaggtatttgtaattttagttatttaggaggttgaggtaggagaatcgtttgaattcgggagttagaggttgtagtgagtcgagattatgttattgtattttagtttgggtaatagagtaagattttatttgggcggggcggggtagaaaataattatattgtaataatttggaaaaaaaatgtttatatagtattaatgtgtgataattattttatatattttagaaatgaggtttgagagtttttattgattatgtgttatatttatttattttgggattttttttattttatttttaatttttttttagttgtttaatgttttttggagttttttatttaagatttttattttttttttttttttttttttttttttagtttttttttagttgtttaatgttttttggagttttttatttaagaattttagtttttttttttgggggtgggggaggacggggttttatttttgttgtttaggttggagtgtaatggcgcgatttcggtttattgtaattttcgtttttcgggtttaagcgatttttttgttttagtttttcgagtagtcgggattataggcgcgtgtcgggattatacgtgtgagttattacgtttagtttttttatttttttaaaggggttaattttttggtttttgtattttgatttttttattattttaattgttattttgtgttttgtttttttttaagggttgtatttttattttgttgaatgttatattattggatttatgaataattgttaatgtattataattgtttgatattttgatttattagaatgaatatttttataagtaggattggatcgaatttgtttataattggaattttggtgtaaattttagttttaagggatataaagtataaaatatttgcgaaatagaataagtttttagattttatattggtatgtatttttgttttatgttaaagatgtgacgatgtgattaaatacggaagttttgttttgttattgagttaaggttttgttttgttatttaggttggagcgtagtggtgtaattatagtttagtgtaatttttaattttcgggtttaagcgatttttttagtttagtttttttaatagttgggattataggtaggtattatcgtatttaattaatttttaatttgtgtgtgtgtgtgtgtgtgtagagatagggttttagtagttgttttttaaagttttgggattataggtatgagttattatgtaggatttgttttgttttaatatttagtaattgggtgtaaagttttttaaaaaataggtggggtaggtgggaaattttttttgtgtgattttttagtattagggataaaattttaattttattttaaagcgataatatatttttttaagattaagtgcgaaatagtaaagggaagagttagtttcgtagtcgttcgttatagaatgttataagtttttaattatgggataaaattggaatatatggaaattttgtgtagattttcgtgatatttttttttttttttaagtttttttttatagattttgcgttttatacgattattttttaggggtcgagtaggacgatttgggttttattattcggatttagcggtgtttttataaaagcgttttaaaaattttagttggggtagttttggggtagatgttgaaaagttgttagaggttttcgggtagtttcgagatttattttaggttagagggtttgattttttttaaatgcgacgtttttttattttggttgatatttacgtttttagaaaagggtggaatttaggttggacgaggcgtagggttaaagtttaatttttttaagttttatttagtttttagtatttttttaggcggtttcgtggggtagggcggagtcgggtttaacgtatttcgtttttttcgttttatttatttagggttagggagcgtttcgagagttggtttttttttacgttgcgcgcgtattttttcgtttttatttttattcgttggcgtgtttagtggaacggagttttgtgttttcgttttaagttttcggatgtttattttttcgattcgttttcgttgtggtttcgttttcgcgcggtttttcgtgttacgttatcgtttgcgtcgttttcggaggcgtagcgggcgatgacgtagagggacgtgttttttatatgaggttggggagcggttgagtcggtttttttcgttcgttttttttttttttcgagcgtcgtttcggttgtatcgcgttcgtttcgagttttaggttcgtgttaagttagcgtcgtcgtcgtttttttttagtcgttattatgattatttatcgggattttattagtcgtgagtttttattgtattatttttattgtcgtatacgggggtttggggtgcgggtgggggcggggaaggcgtagtcgtcgcgggtttaggggacgtcggcggttttagtcgagcgcggaggggtcggtgttcggggttcgcgtttagttttggtgtgttacggaggggtagatttcgcgtgcggtcgtcggcgcgggaaatgcgggaaatggcggcgttaggcgtacggtgatgggcggttttgtgtattcggtaga

SEQ ID NO: 1834 - DNA, 5380 bp, Artificial Sequence
  chemically treated genomic DNA (Homo sapiens)
tttgtcggatatatagagtcgtttattatcgtgcgtttggcgtcgttatttttcgtatttttcgcgtcggcggtcgtacgcgggatttgttttttcgtagtatattagagttgggcgcgagtttcgggtatcgattttttcgcgttcggttaagatcgtcggcgttttttaggttcgcgacggttgcgtttttttcgtttttattcgtattttagattttcgtgtgcggtagtaaggatagtgtagtgaggatttacggttgatgaggtttcggtagataattatgatggcgattgaagggagacgacgacggcgttagtttagtacgagtttgaaattcggagcgagcgcggtgtagtcggagcggcgttcggggggaggggggagcgggcggaaaaggtcgatttagtcgttttttaattttatatagagggtacgtttttttacgttatcgttcgttgcgttttcggaagcgacgtaggcggtgacgtggtacgaagagtcgcgcgggggcggggttatagcgggggcgagtcggggaggtgagtattcggggatttgaggcggagatataaggtttcgttttattgggtacgttagcgggtaggggtgggggcggggaggtgcgcgcgtagcgtgggaggaggttaattttcggggcgttttttagttttgggtgggtggagcgggggaagcggagtacgttggattcggtttcgttttattttacggggtcgtttggagaggtgttgggagttgggtggagtttagaggaattaaattttggttttgcgtttcgtttagtttaggttttatttttttttgggaacgtgagtattaattaaggtaggagaacgtcgtatttagggagggttaggttttttggtttggggtagatttcgggattgttcgagggtttttgataattttttagtatttgttttagggttgttttagttggagtttttgggacgtttttgtgggggtatcgttgagttcggatagtgggatttaagtcgttttgttcggtttttggggaataatcgtgtggggcgtaaggtttgtgggaagggatttggagaggagggaagatgttacgggagtttgtatagggtttttatgtgttttaattttgttttataattgaaagtttgtggtattttgtggcggacggttacggagttagtttttttttttattatttcgtatttggttttggaaaagtatgttgtcgttttaagatgaagttgaaattttatttttggtgttagagggttatataaagggagttttttatttgttttatttgttttttgaaggattttatatttaattattaagtattaaaataaaataggttttgtatggtagtttatgtttgtaattttagaattttgggaggtaattattgaaattttgtttttatatatatatatatatatataaattaaaaattaattgggtgcggtggtgtttgtttgtaattttagttattagggaggttgagttgggaggatcgtttgagttcgggagttggaggttatattgagttatgattgtattattgcgttttagtttgaatgatagagtaagattttggtttaatagtaaaataaaattttcgtatttagttatatcgttatatttttggtataaggtaaagatatatgttagtatgaagtttgaaagtttgttttatttcgtaaatattttgtgttttgtattttttagaattaggatttgtattaagattttaattgtgaataagttcgatttagttttatttatagaagtgtttattttggtaaattaaagtattagataattataatatattaataattgtttataaatttaataatatagtatttagtagagtaagaatgtaatttttgggaaagagtaggatataggatggtaattggaatgatggaaaagttaaaatgtaagagttaagaaattaatttttttaagaagatggggggattgggcgtggtggtttatacgtgtgatttcgatacgcgtttgtaatttcggttattcgggaggttgaggtaggaggatcgtttgaattcgggaagcggaggttgtagtgagtcgagatcgcgttattgtattttagtttgagtaataagagtgaaatttcgtttttttttatttttaaaaaaagaagttggagtttttggatggaaaattttagaggatattgggtaattgggaggaagttaaaaaggggggaaagggaaaaaaaaagatgggggttttggatggaaaattttagaggatattgggtaattgggaggaagttaaaaatggggtgaaagggattttaaaataaatggatatgatatatggttagtgaaggtttttaaattttatttttggaatgtatgagatgattattatatattaatattgtgtgaatattttttttttagattattatagtataattattttttatttcgtttcgtttagatggggttttgttttgttgtttaggttggagtgtagtggtatgatttcggtttattgtaatttttgattttcgggtttaagcgatttttttgttttagttttttaagtagttgggattataggtgtttgttattacgtttaggtaatttttttgtatttttagtagagatagggttttattatgttggttaggttggttttaaatttttgagtttaggcgatttgttcgtttcggttttttaaagtgttgggattacgggcgtgagttattgtattcggtaagtataattattttttttagttttaatatttttaaattatttagaaatattattattgatttatgtagtatttttaaatattatttttaattgtttaattttatatttaggtcgaaatagttttttaagttttataaaaatatagtcgtggtgaaaaaaagtattgaagagttatggtattttagattaaaattttgtttttggtcgggcgcggtggtttacgtttgtaattttagtattttgggaggtcgaggtaggtggattatttgaggttagtagtttgagattagtttggttaatatggtgaaatttcgtttttattaaaaatataaaaattagtcgagtttgttggcggttgtttgtaattttagttatttaggaggttaaggtaagagaatcgtttgaatttgggagacggaggttgtagtgagtcgagattgcgttattgtattttagtttgggtagtagagcgagattttgttttaaattataaataataataaaaattttattgataaaattgcgggttttgaaaagaaaagattttgaatatttaattaatgagaataaatagacggttgagaaataatttagtgaatagtgaataattttatttaaaatgaaataagaatagaaaagaaaaattatatataaaggcgaattatagtaaaggtgagtattattttgtgaagtttttattttatttttattttattttattttattttattttattttattttattttattattttttgagaatgaatttcgttgtgttgtttaggttggagtgtagtggtattatttcggtttattgtaatttttggtttttaggtttaagcgatttttttgttttagttttttgagtagttgggattataggtacgcgttattatttttaggtatgttttagatttatgtatgtatgaatgtattagattttatatatatttttttttgtggttataagttaagtgttttgaaatttattgatttgggtaaattttttttttaaatatattatttggtattataaattttttaattttagtaaatgatttttttaaatgattttagtgttttgtgaatatttatatttgattttagtttatttgaataatttttgttagaaagagaaaatagttaaatggagatttggtttgttgtgtaggggttgagagaagtgtgattattttgattttttattagtaggaaattgtttaatagttatattttgaaagtaatttgaggtaattgtaggagggttgtatggcgggaaagaaattgttgaaaataggttgggtgagttggttcgtatttgtgattttaatattttgggaagtgaagttgggcggattatttgaggtgaggagtttgagattagtttgtttaatatggtgaaatttcgtttttattaaaaataataaaattagttaggtatggtggtaggcggttgtagtttcggttattcgggtggttgaggtttgagaattgtttgaatttgggaggtggaggttgtagcgagtcgagattgtattattgtattttagtttgggtgatagagcgagattttgttttaaaaaaaaaaaaaagaaattgtagaaaatttttttttttttttttttttattattgtttttgattagttaaaaaaaaaaaaaaagtcggttgggcgtggtggtttatgtttgtaattttagtattttgggaggtcgaggtaggtggattatttgaggttaggagtttaagattagtttggttaatatggtgagattttgtttttattaaaaatataaatattatttggacgtgatggtaggcgtttgtaattttagcgattcgggaggttgaggtaggagaattatttgaattcgggaggtggaggttgtagtgagtttagatagtgttattgtattttagtttaggtaggttaaggtgggaggtttatttgaggtagagtttgagattattttgggtaatatagcgagattttatttttgaaaaaaaaaattgttgaaaatattttagttttttttttttttgaaaaagaagttattgtttatagaaataaaaggcggttcggcgtggtggtttacgtttgtaattttagtattttaggaggtcgaggtgggtggattacgaggttagaagattaagattattttggttaatatggtgaaatttcgtttttattaaaaaatataaaaaattagtcgggcgtggtggcgggcgtttgtagttttagttatttgggaggttgaggtaggaaaatggcgtgaattcgggaagtagagtttgtagtgagttgagatcgcgttattgtattttagtttgggcgatagagtaagattttcgttttaaaaaaaaaaaataaaaggtatagatttcgtttaaattgttattttttttataggttatttttgattattatgtttaaaattataatttttgttttttggaaatttttgtgtttttgttttttttttttttgagacgggattttattttgttgtttaggttgtgaagcggtataattatagtttattgtagtttttatttttttttttagtttttcgagtagttgggattatagatacgtgttattatgtttggttaatttt

SEQ ID NO: 1835 - DNA, 7359 bp, Artificial Sequence
  chemically treated genomic DNA (Homo sapiens)
aaaattattagatttagaaattttttttaataaataattttagatttttttttaaatttttgttggaatgttatttttaattttataatatttaggaaaaggtaaggttaaagataattaaatgttttttgatgatgggaaaattattagattaattgatttagagtttattaatttttatttatttatttattattttattattattattatttttttagatggagtttcgtatttttttttaggttggagtgtagtggagcgattttagtttattgtaagtttcgtttttcgggtttacgttttttttttgttttagtttttcgagtagttgggattataggcgttcgttattacgttcggttaattttttgtatttttagtagagatggggttttatcgtgttagttaggatggtttcgattttttgattttgtgattcgttcgtttcggttttttaaagtgttgggattataggcgtgagttatcgcgttcggtcgagtttattaatttttaatttaaatatttaattttttgaatttttttttcgtagaattgaatggttttatagaggttatatttgggtaatttttcgtagattgtagaaatttttttttagaggtttttgtttatagattgtagaaatttttttttagaggtttttgagattttttgtttgtttataagtagtattttttttttaggtgggtttttgaggttttttttttattagagtattttgtgtttcgtagttttcgtttgtttagcggaagttggaggatagtagttttgtttttaataagtgagagttttataggtatgttaggttaaaaaataagtaaaagatcgttttttgtttttataatttagttgagagttaggatataaaaagggattttaggttaggcgcggtggtttatgtttgtaattttagtattttgggaggtcgaggtgggaggattatttgaagttaggagatcgagattagtttagttaacgtggtgagattttcgtttttattaaaaatataaaaattagttaggcgtggtcgtgggcgtggtggtgggtttagttatttaggaggttgaaataggagaattatttgaattcgggaggtagaggttgtagtgagtcgcgattgggttattgtattttagtttgggtgataagagttaaattttattttaaaaaaaaaaagattttaatatataaagagattttgagttgttaaaattaaattaataaggtgggtagttttatttttttttttattattagttttataaggttaagatatttgatagagaaggagtttttgttaaattggtagttcgtaaaaataaaggtgtagtttttaatttaaaattttattttaatattaagttttataattattttgattaatatatttttaaggatttagcgatcgtgtgtgtgtgtgtttagacgaaaatagaaacggttttttaaaatatttagtttgtaaaagtatagtgttttgaattatttagtattattattttgattaagtattattaagtattattatttgattgttttaatttaataagtttgggcgagtttggtattgtgttaggattttttggagaaatttaagaaaggtaagattgcggttttatttttttttatttttttattattcggattttgggtaggtaggggattagggtgggggttttaattttcggtttgtgtttgtttttttagggggtattttattgagtattaaatacgcgtaggtgttgtattagatgttaggagtttcgtaagcggaggagttgcgtatacgcgtgttagttaattgggcgtatagtgttcgtggcgtcgtagattcggtttttagatttagtttttttttatagggatcgttcgtttcgtttcgcggcggtttggggagtagtagtttcgggtttcggttttgttttgtcggttttcgtcggtgcggttgcgttttttatattttatcggaagtttcgggtttggtcgtcggtaggcggtggcggaggcggcgtcgaggttggttgttttatatttttgtttcgggatcgtagggcggtttttcggttttttttttcgtttcgaatttttcgttttagttttcgtttgttgaggcggggatttttcgggtgtagtcggggatttggtatttcggttgtagagatcgtttcggatttaattgtttttagtttagtcgcgggcgtttcggtttcgtaggggtttattttttttttcgcgggtatcggcgttgtttggtttttagcgttgttttcgtaattggatatgtggaggtggcgacgcgatattttttcgttttcgggcgggtttatcgatttggttgggggtttagtttgtagagtcgggcggcgggggttgtgttggcgtcggtaggcgcgaggaattatagagcggggcgtttagttttattatggggcggtttacggagatttttcgtgggagtggggtttggtgtaggggcgttttaaaggacgagtgggagatggggatacgcggcgtagagagatttttcgtggatggagtcgatggaggtttagtgtagaagagaaaggggttaaggagacggataaggagttattagagacgcggggggaatttttcgtagaggatgcgggaagtcggggaaaggaagggatttcggaaggaagggttgagagtcgggttaggtgttggtaggagggttggttggatagaaattggggcgggtttagggtatttggcgttttcgatatgcgtatatatttggagagatgattttttggagatttaagtgtttgtatagataattttttttagaagttttatcgttaggtgaggcgagagtagatgtagaaattggagacgagaataaagagtgttttaaaagcgtgcgtggttataggattggttttgggtttaggggtttttatttattagttgtgagattttgaataagtcgtttagtttttttgtgttttagtttttttatttgtaaggtggggatgatgatggtaatatttgttttatagagtgaaaattagatgagatgatgtttgtaaaattacgtaagacggtatttaaaagtagtattatttttttttttttttattagagtaggttgcgtacgttttgatgttcgtgggaatgagtaggtagagagggtggtattgaggtcggaggggagagaagggatttatagatggggagagaagttttgggtgtttgttttattttaaattaggggaaggagggaataggtagggttggttgtaggaaagtttgtaggtatggggtatatagttaaaagggagtgttttttgatagttttgatgtaggtttggaggtcgtttgttatgggggtggaggttttgatgtatattgtggcggtaagatgtcgtgttgtttttgttattagtttgtggtagttttggtgttatattagggtaggtgggtagtttaatgtattttaggttagatgatttgttttgtttatttgttgaggttttagtagatagacgtgaaagtatagtataagtataatgtattattttaatttttttttttgaggagttggaaggtttgtagttattatttgagttaaatgttatttaagtattttatttgggttatatattatattttgatttattattttatttagttattataataaatgggtgaaataggtattattgttttattttatagatgtagaatttgagttttagggaagttaaggattttgttttagggtttatagttagtaagtagtggatttaggattttaatttagttttgtttgattttaaaatttatgatttgaaattattgtgaaagtttgtaaaatttttgtagtagttaagtaggatggaaagatgtgtagggattgttttttttatttgatagatgagataagagttgggtattttgatttttattttaagtatatagagtttggggttttatagttttggtgtgaattttattttattattagaggttgtgtgtttttggattaggtattttgtttttttgattttatatatagttgtagaagaattttttgtaggttgttgtaaggatttggagggaaattgttgtttagtatatagtatatattttgggagttatcgtttttttagtgtattttttttgtaaatgtggatttatattttatttggatgttgagattagttgttgtgattttgtatttgtttagcgttttgttttttttgaggtagtaaagtggtggtatttgatcggagtatgtagttatttatgattttttgagtggggtggtgtggggagggttttgaggagtttgtggttttaggttttggattttattagggtttttttgttttttttggttgttttagttttaggtaagatagggttttagaattttatagtttagaggttatttgttgtaattttttttttatagatggagttattagaatttattgtgaggaagtgatttttttttgaggttatttagatattttaaatagagtagagtaaaagcgtttagaatttgaaattttggatttgtttttaatattttggggatttttattaggaaggtgagtatttttattgagaattttaggttgtttagaggtgttagggaatatagattagggattagttgtggttttttttttcgatgtgtttagggaagtgggggaagttagcggtagtttgcgatttttaattaggggaatttttattgtgttttttgagagtttgtgatacgggttattttttttgatttgtttttttgtttttttttattttaaaaaaaaaaaaaaatgattggatatttttaaagtttttagttattatttaggggatttttatcgttataaagggtaatttttgttttatttttgttgtgatttagttgtgacgttgaattatataagttagagagaagaagataaagttattagagtttttatttattagagagtgaggtttaggttaggattttataaggttggttttttgttttggagtaatttaaataggttttttggttagtttggaattttgagatggtttttagtttaggtagtagttttcgttcggtttttgatgagaatgagtttttttttgggtgtttttttatcgtttgttaggatttaaaggagtttagggttttttgttgtgtaggttgtttttttgagaattcgaggtgaggtgatggaggagcggagggtgggtagaaagtgggtgttagggagggatttttgatgggaggtgaggggtagaggagtttgtgattttaggcggtgattttttttttttgggttttagtttttatattttttttttatattttttgatattgtttttttggttgtggtggaaggagaggaagttatagaaaggtattagtttttataggggaaagttatttatatcgaggagagtttcgaggttgtgaggttattgttttattgtgtggtttggtgttttgttaatgtttttaagtcgtagttcgtttgtttgtaaagttgttttttgtgttatagaattgttaatgaagtttaatgaataataattataaaagtttttataataataaatataaattttttggtgaatgataaattgttagacgaatatttttttttttatagtattgtttattattttagatcgtttgttgggaatttttttggaggggataaagagatcgatatatatttgtgtatttaatgatatttaaaatattaataatttagaaaggtatgatattagtattattgtggatatttttttttaagtaattatgtatttattgtgtgttaaatgttttgtttttgggtttttagtataatttagaggggtggatattattatgattttattttataaatgagaatattgaggtttaatagattaggttagttttggttagttttttggtaaatatgtttttaaattattttatgtgatgattttttgtttgcggttttatagtttaagaaggtggtaaagttgaattaggtaagtgagaagtttaaatatgacgataaaggaggaggttgtgagaatagcgaggagaggttgtggtcgtggaaaggttagttaggaggtggaggagtagaggtttattggttttattattaagcggattgttagggtttagtttaggttttggtagtgggttttttggttttttttttttttttttttaaaatttggtagaggagggagttgattggaagttggagggttgaggtttgaggtttaagttttgaagagtttttatttagttttgtttttgatttattttattttgattaatttatatgttttttggggttttatttttttatttgtaaaatagattatttcggtagcggtagtaggttagagatattaggagttttgtaaaaatatagttgttggttaggcgtagtggtttatgtttgtaattttagtattttggtaggtcgaggtaggaggattatttgaggttaggagtttgagattagtttggttaataaggtgaaattttatttttattaaaaatataagaattagttgggtgtggtggtgtgtatttgtaattttagttatttgggaggttaaggtatgagaattatttgaatttgggaggtagaggttgtagtgagttgagatcgtattattgtattttagtttgggttatagagtaagattttgttttaaaaaaagaaaaatttttaaaaaatagataaaaaatttacgggtatttaggtgttatttattagaatttgatatttatttttgattaagaatttttaggatagatgttttttgaggtttttttttgttttaataggttatgattttttgtaattattaaatatataagattaaaattaaatggaggattaaatgagaagagtaaatatagttatatgttagtaattttttgtttaaatttttgagattagatgtgttttgtaatttagaattttttttagaaaagtaaattagggtattatgtaattgtggtagggaatgcggtagtgttttgtaattaagtatattaatgtttttgtaatgaaatatgtatatatttatattaagtggggtaagtaagggttataatagttttcggttagtgtagttacggtaggtttggtagtttaggaagtttattgtaaattattaaaaaatgtgggatattcggtagttttgcgatttaggaattgtggttttgggattgtggacgtatatgattattattttgttgatagttgaggtttttggagttgttaggagagtggatggtgtagggagttgtagtgtttttttttaaggttttgtttatgtttttttagg

SEQ ID NO: 1836 - DNA, 7359 bp, Artificial Sequence
  chemically treated genomic DNA (Homo sapiens)
tttggggaaatatggataaagttttggagagaggtattatagttttttgtattatttatttttttgatagttttagaagttttaattattagtagggtggtgattatgtacgtttataattttagagttatagtttttaaatcgtaaaattgtcgagtattttatattttttggtagtttgtagtgagttttttgggttgttaaatttgtcgtgattgtattgatcggaagttattatagtttttatttgttttatttagtgtgaatatatatatgttttattgtagaaatattaatgtgtttgattatagggtattgtcgtattttttgttataattatatgatgttttgatttgtttttttaaaaaaaattttgaattataaaatatatttgattttaggggtttaggtaaaagattgttgatatgtgattatatttgttttttttatttggttttttatttggttttggttttatatgtttagtaattatagaggattatggtttattagaataagaaagggttttagagaatatttgttttagaggtttttaattaggaatgggtgttagattttaatgggtaatatttgggtattcgtgggttttttgtttgttttttgggggtttttttttttttgagatagggttttattttgtagtttaggttggagtgtagtggtgcgattttagtttattgtaatttttgttttttaggtttaagtgatttttatgttttagttttttaagtagttgggattataggtgtatattattatatttagttaatttttgtatttttagtagagatgaggttttattttgttggttaggttggttttaaatttttgattttaagtgatttttttgtttcggtttgttaaagtgttgggattataggtatgagttattgcgtttggttagtaattgtgtttttataaagtttttggtgtttttgatttgttatcgttatcgagatagtttattttataagtgagggaatgaggttttagagggtatgtggattggttaaggtagagtgagttaggagtagagttgagtagaagttttttaggatttaggttttaggttttagttttttaatttttaattagtttttttttttgttaggttttggaaggagggagaggggaaattaggagatttattattagagtttgagttgaattttgataattcgtttgatggtaaaattagtgaatttttgtttttttattttttggttggtttttttacggttatagttttttttcgttatttttatagtttttttttttgtcgttatgtttgaattttttatttgtttgatttagttttgttatttttttaagttgtaaaatcgtaaataaaaggttattatatgagatagtttaagggtatatttgttaggaaattgattaaagttgatttaatttgttaggttttagtgtttttatttgtaaaataggattataatagtatttatttttttaagttgtgttgaggatttaagggtagagtatttggtatatagtaggtgtataattgtttaaagagggatgtttataatagtattgatattatgtttttttgggttgttaatattttaagtattattaaatatataaatatatatcgatttttttgttttttttaaaagggtttttagtaaacggtttgaggtgatgagtaatgttgtggaaggagagatattcgtttaatagtttgttatttattaagaggtttatatttgttattataaggatttttgtgattattatttattgggttttattaataattttatgatatagaaaatagttttatagataagcgagttgcggtttagggatattagtagagtattagattatatagtgagatagtggttttatagtttcgaggtttttttcggtgtggatggtttttttttgtgggagttgatgtttttttgtggttttttttttttttattatagttagaggggtagtgttagggagtgtgagaaaagggtgtggaaattgaggtttagagaagaaaagttatcgtttgaagttataggtttttttgttttttattttttattaggggtttttttttggtatttattttttgtttatttttcgtttttttattattttatttcgggtttttagagagatagtttgtatagtagagagttttgggtttttttgggttttggtagacggtgggagggtatttaaagggaaatttatttttattaggggtcgggcgaggattgttgtttgagttggaggttattttagggttttaggttggttagagggtttgtttaagttgttttagggtaggggattagttttgtggagttttggtttgggttttattttttggtgagtaggagttttgatgattttatttttttttttttggtttgtgtggtttaacgttatagttgagttatagtagggatggagtaggaattattttttgtggcgataaaaattttttggatggtgattgaaggttttaggagtgtttagttatttttttttttttttagagtgagaaaaagtaagagagtaagttagagaaaatgattcgtgttatagatttttagaaagtatagtgagagtttttttggttgagaatcgtaggttgtcgttggttttttttatttttttgggtatatcggaggagggggttatagttggtttttggtttgtgttttttggtatttttgagtagtttggaatttttagtgggggtgtttatttttttggtggaaatttttagggtgttggagataggtttaaaattttaagttttaggcgtttttgttttgttttgtttggagtgtttgggtgattttaaggagaagttatttttttatagtgggttttgatgattttatttgtaaaaaagaagttgtaataggtggtttttgggttgtaagattttgggattttattttgtttgggattgaggtaattagaaggagtaggaaagttttgatgaaatttaaggtttaggattatagattttttagggttttttttatattattttatttaggaagttataggtggttatatgtttcggttaggtgttattattttattgttttaaggagaataaagcgttaaataaatgtaagattatagtagttggttttagtatttaagtgggatgtagatttatatttgtaggaaaagtgtattggggaaacgatggtttttagaatgtgtattgtgtgttgggtaatagtttttttttaaatttttatagtaatttgtaaggaatttttttgtagttgtatatagggttagagaagtaagatgtttggtttaaaggtatatagtttttggtagtggagtgggatttatattagggttgtggggttttaagttttgtgtgtttgggatggagattagagtatttagtttttgttttatttattaaatggagaagataatttttatatatttttttattttgtttggttgttatagaggttttgtaaatttttatagtggttttagattatgggttttgaggttagatagagttgagttgaaattttgggtttattgtttattaattgtgggttttgggataaagtttttaatttttttgaaatttagattttgtatttgtaaaatgggataataatatttattttatttatttgttgtgatgattaaatgagatagtgggttaaagtgtggtgtgtaatttaagtgaagtatttgaatgatatttggtttagatggtgattataggttttttagttttttagagaaaaggattaaagtggtgtattatgtttatattgtgtttttacgtttatttattggagttttaataggtgggtagggtaggttatttggtttgagatatattaaattgtttatttgttttggtgtaatattagggttgttataggttggtggtaaagatagtacggtattttatcgttataatgtatattaggatttttatttttataataaacgatttttaggtttgtattaagattattagaagatatttttttttaattgtgtattttatatttgtaagtttttttgtagttagttttatttgtttttttttttttttggtttgggataaaataggtatttaagatttttttttttatttgtgggttttttttttttttttcggttttaatattattttttttatttgtttatttttacggatattaaaacgtgcgtaatttgttttaataagaaaagggaaaaatagtattatttttgggtatcgttttacgtaattttatagatattattttatttaatttttattttgtgaagtaggtattgttattattatttttattttatagatgagaaaattgaggtatagagaggttaagcgatttgtttaaggttttatagttagtgagtggggatttttgaatttagagttagttttgtaattacgtacgtttttaaaatattttttattttcgtttttaatttttatatttattttcgttttatttaacggtagaatttttagaaaagattgtttatataggtatttggatttttagggaattatttttttaagtgtatacgtatgtcggggacgttaaatgttttgggttcgttttagtttttatttaattagtttttttgttagtatttgattcggtttttagttttttttttcggaattttttttttttttcggtttttcgtattttttgcggggaatttttttcgcgtttttggtggttttttattcgtttttttgattttttttttttttatattgggtttttatcggttttatttacgaggagtttttttgcgtcgcgtgtttttattttttattcgttttttggggcgtttttgtattagattttatttttacgggaagttttcgtgggtcgttttatgatgaggttgggcgtttcgttttgtgatttttcgcgtttgtcggcgttagtatagttttcgtcgttcggttttgtaggttgagtttttagttaggtcggtgagttcgttcgagggcgggggagtgtcgcgtcgttatttttatatatttagttgcgagggtagcgttgggagttaggtagcgtcggtgttcgcggaaagaggaatgagtttttgcggggtcggggcgttcgcggttgggttgggggtagttgagttcggggcggtttttgtagtcgaggtgttaggttttcggttgtattcgaggagttttcgttttagtaagcgggagttggagcggggagttcggggcgaggaagggggtcggggagtcgttttgcggtttcggggtaggggtgtagggtagttaatttcggcgtcgttttcgttatcgtttatcggcggttaggttcggagttttcggtggagtgtgaaggacgtagtcgtatcggcggaaatcggtaaggtagggtcggggttcggggttgttgttttttagatcgtcgcggggcggggcgagcgatttttgtgaggggaaattgagtttgagggtcgggtttgcggcgttacgggtattgtgcgtttagttaattgatacgcgtgtacgtagttttttcgtttgcggggtttttggtatttggtgtagtatttgcgcgtgtttagtgtttagtaagatgttttttgaaaaaataaatataaatcgggaattggagtttttattttggttttttgtttgtttaaaattcgagtagtgagaaggtgaagaggagtaaaatcgtagttttattttttttggatttttttagaagattttagtatagtgttaggttcgtttaagtttattgggttggagtaattaagtgatagtatttgatagtatttgattaaaatgatagtattaagtggtttaaggtattgtgtttttataaattggatattttaaggaatcgtttttgttttcgtttaaatatatatatatacggtcgttaaatttttaagaatatattaattaaaatagttatggaatttagtgttggggtagaattttagattaaaagttatatttttatttttgcgaattattaatttgataagggttttttttttgttagatgttttaattttgtaggattgatggtggagggagggatgaagttgtttattttgttggtttggttttaatagtttaaaatttttttatgtgttagggtttttttttttttgagatggagtttggtttttgttatttaggttggagtgtaatggtttaatcgcggtttattgtaatttttgtttttcgggtttaagtgatttttttgttttagttttttgagtagttgggtttattattacgtttacgattacgtttggttaatttttgtatttttagtagagacgggggttttattacgttggttaggttgatttcgattttttgattttaggtgatttttttatttcggttttttaaagtgttgggattataggtatgagttatcgcgtttggtttagggtttttttttatgttttgatttttaattggattgtaagagtagggaacgattttttatttgttttttaatttggtatgtttgtaagatttttatttattggaggtagagttgttgttttttaattttcgttagataggcggaagttgcggaatatagggtattttagtgaaagggggattttagaggtttatttgggagggagatgttgtttgtggataagtagaagattttaggggtttttaagagagaatttttgtaatttatgggtaggggtttttaagagagaatttttgtaatttacgggaggttgtttagatgtagtttttgtggggttatttaattttacgggaaaaggatttaaagagttaagtgtttgaattaaaaattgatggattcggtcgggcgcgatggtttacgtttgtaattttagtattttgggaggtcgaggcgggcggattataaggttagaaaatcgagattattttggttaatacggtgaaattttatttttattaaaaatataaaaaattagtcgggcgtggtggcgggcgtttgtagttttagttattcgggaggttgaggtaggagaagggcgtgaattcgggaggcggagtttgtagtgagttgagatcgttttattgtattttagtttgggagagagtgcgagattttatttagaaaaataataataataataaaataataaataaataaataaaaattgatggattttgagttaattagtttgatagtttttttattattagaaaatatttaattatttttgattttgtttttttttgggtgttgtgaagttagaaataatattttagtaaaaatttgggaagaaatttggggttatttgttgaagggagtttttaagtttagtgatttt

SEQ ID NO: 1837 - DNA, 6196 bp, Artificial Sequence
  chemically treated genomic DNA (Homo sapiens)
agttggtttttttttaattgattgttattattattatttttgagatagagtttggttttgttatttaggttggagtgtggtggtataattttggtttattgtaattttcgttttttatgtttaagcgatttttttgtcgtagttttttaagtagttgggattataggcgcgggttattacgtttagtttattttttgtatttttagtagagacgaggttttattatgttagttaggttggttttgaatttttgattttaagtgaattgttcgtttgggtttcgtaaagtgttaggattataggtatgagttatagtgttcggtttttgattaattatttttattttgatttttttgtagagacgagattttatcgtgttgtttaggttggttttaaatttttggttttaagcgatttttttgttttagttttttaaagtgtagggattataggtgtgagttagttagttcgttagaattgtttttttgtggtcggggattttagttttttattttttttgttattattgttttttttttttttttcgaatatttcgcgtgaggggtttgtatatttacgtttatttcgatttttttttttttttttttttttttttttttttttttttttttttttttttttttttttttttatttttgagacggagttttattttgttgtttaggttggagtgtaatggcgtgatttcggtttattataattttagttttttaggtttaggttatttttttgttttagttttttgagtagttgggattataggtgttcgttattatgtttggtttgttttgtttttttatttttattttttttgtatttgtttataagtatttttggttcgagaagggtattagtagtttgtttttttgttggcgatttttgttgttagttagggtttattttaaggataggatgggttttttagtttagttgttttattgtgtatttacgatagagcggggtgttttggcgttacgattattttagttttttgaatttttttcgatatttttagtagtttttttagtttaaaatggtgtttttaaattttaggttatgaattaaaagtaagtttaaagggtaatggttattattaaaaaataaatagaacggaaaatatcggagtgcgtcgtaggtttgagatgatttgttgttacgtgtgtgtatatatataggttatgaataattgggttattatgtaaaatgtatttaaaggtttagaagttatttgttggaataattagtaaaattgtgattttgtcgtgtattagggttcgtttttcgaggttgggtattatggtttatatttgtaattttagtattttgggaggttgaggtgggcggattatttgaggtgaggagtttaagattagtttggttaatatggtgaaattttgtttttttttttttttttttttgagagggagtttcgtttttttatttaggtcggatttttttgtttaggttggattgtagtggcgttatttttatttttgtttattgtaagtttcgtttttcgggtttaggttattttttttttttagtttttcgagtagttaggattataggcgttcgttatcgtatttggttaattttttgtatttttagaagagacggggttttattgtgttagttaggatggtttcgattttttgatttcgtgattcgttcgtttcggttttttaaagtgttgggatgataggcgtgagttatcgcgtttggttgtgaaatttcgtttttattaaaaatataaaaaattagttaggtatggtggtgtgtgtttgtaattttagttatttaggaggttgaagtaggagaatggtttgaatttgggaggtgtaggttgtagtgagttgagatcgcgttattgtatgttagtttggataataagagtgaaatttcgttttaaaataaaataaaataaaataaattaaaattaaggtttttattttttatttttaggttacgtgtagtatgtttgagtgagagaagttgttagtattttttagtttaagttgatttataggggttagtggtttttgtgtgggaaggcgttatttgaggtatagattattatatttagggagagttataagaaaattttttttttagttttaaagtttttggtattttgttacgaatatttttttttttttattgaaagataaataggatggttttttgagttgttgtatgtttgtgagttatttgagtatttgtatgtatttttttaaaaatgtagtaagtagaatatgtaatgttatattaatttttgtgagaaatgcgtttaaagatggtgtcggtttgttgttggacgttgttatagggaatagagatttgtttttgaagtatagcgaggagagagtttttttttttgtttattattgttgttttgtggttttaattgtaggggcgagaatattcgttattaatttttaaagtagttgttttgtttggggtaaatttttttgttttgtttttttttaattttttatagtagaggatttttagaattgtttaattggagaagaaaaaggaggaggaggggagggagagaaagggagggaataggttttattagtagagggtttagtttggttgtgtttgattttatttttaatgttgttttttaatgttaggttggagtatgaaaagagtcgtagaaaatttttttatgggtttttggattttttgttttgttttttttttttttttttttaattatttatttatttttatttttttgagatagggtttcgttttgttgtttagattggagtttagtggtgttattatggtttatagtagttttaattttatggatttaagcgattttttcgttttagttttttaaagtgttgggattataggtataagttattattttattttttttttttttttttagatagagttttattttgtcgtttagataggagtataatggtataattttagtttattgtaattttcgttttttgggtttaagtgatttttttgttttaattttttgggtagttgggattataggtatattttattacgttcggttgatttttgtgtttttagtagagacgtggttttattatgttggttaggttggtttcgaatttttgattttaggtgatttgtttgttcgcggttttttaaagtgttgtaattataggtgtgagttattatgttcggtttatgttttgttttttttaaaataattaaaaatagtttagtttaggaaagggagttttttttgattttggtaaagttaaattaggttataggtaatatatagtataaggtaggcgttgggagtgggttttagtcgatagggtgttaggattgtgggttaagtagggttggggatatgggaggttttagtgtttgggttatgggaagtggttgggattttgagtttgaggttagtaatattttaatttttgataggtaagaaagggtatttgaggtttttaaggggagtttattatgggggtgggggagatcgttggagtttataggtttttgtgagggacggcgaaggcgggtttgttatttttaaaagagttgtgtttgtggcgtagacgggggtgttattgtggtttggtgagtgtggttgtagaataagtatttgttgggttaatggagttagagatatggtttaatgtttttgatgtttagatagatttttagtagttaggtcggattatttggggttttggaacgttttatgggtgaagttgtaggaggagatgttggattttttgtttttatttatatgagttattggagtaatataagaaggtagattggttttggttatttatattggttttagttttggggtagggttttttataagtttttttgagaagtgaaaaatgtaaagttttttttgtttttttattattgatttgtaaattttagcgaaggttttattttttagttggtttagagttttttagaagtttttttttcgttttttatttcgttaggtttagttaggttgggtgttgttttggtgggtttaggtgaattattgatatattattgatgtttttggggtagaaggtagaggtttcgggagaaatgcgtaggttttagcggtttggtggagggtgtagggggcgtaggggtagttaggatcgtcgaggacgttgggggtacgtggtaaattggttattttgtttattcgtgagtaagatattatttcgggggcgtgggagggtttaagggagggagaaaggaaagtgttattaaattaatgtggagttttgttttttgtatgcgaaaaggggttttacggtttgagttatttttagttttatttgcgtgtgcgcgagggtgcgtggtttggtacgcgtgcgtacggtgttggtgagcgtgtgtgtgcgtgttcgtttgaggggaatgtgatcgtcgtgtatgcgttcgcgatagtgcggggggtcgtatatcggattcgtgcgtgtgcgtaggggtcgcgtgtggttatgggtatacgggcgtgtacgtacgggggttgcgtatgttatgttggcgtggggggtgcgggcgaggtggtcgcggggaggagcggcgttagtatttttcggtttttacgcggtttgcgtggttttttgattcggaaaggcggggacgcggggacgcgcggcggcgggggcgcggcgggggcggcgtagagcgaggaggttcgcggggcgcgcggcggggacgggagggaggcggggggcgttcggggtcgttttcgtttcgcgtcgcggcgtcgtcgttgttaaggtcgggcgggcggtcgtcgggcgttagggtttttagtaacgggtcgcgggcgcgcgcggggggtcggcgggcgcgtggggtcggcggcgttcgcgggtttttgtcgtttttacgcgcgcgggcggcgggggcggggcggcgggcgcgtcggggatttttagcgcgcgagaggaagtgtttgcgcggggttgcgtgagggagcgagggagcgagggagcgcggcgcggtcgtcgcgtgcgcgagtcggggttgtagtttagtcgggattttttagtcggcggtagtcgcggcggtcgtcggttttttttcgtttttcgttatggggtagttcggggagtagaacgttgcggatcgcggcggaggacgcgttcggcgtttttgagtcggtcgagcggcgacggatcgcgaggtaaggggtcgcggcgggcgggcgggttttcggcgcgcggtcgggcgtttttattttcgtcgtttttatttcgcgttttgggcggcggggttcgggggtttcggggttgttcggcgcgggttcggcgcggcgtaggttcggttcgttttagcggcgacggcggggcgcggttttagtttggtttcgcgttttagtcgggttgtttttcgttttcggacgttttaatttcggtaaattttgtttcggaggtcgggttcggggttcgagggggtcggggcgttcgtatttttttaggaaacggggcgcgtaggtttcgttacggtcgtgattttcgttggcgttgaggattcggtatttcgcggggtcgcgggttttacgcggggggacgggcggtttaggggttgcgtggtcgagcgcgttgttcgggtcggtcgggggggttcgggcgttattggaaagttggttttgagttatttcgttttagaggcgttttcgatcgtttggcgggcggcgcgggggttcgggtatgggtagagggcgcgaatttttttcgcgcggtcgtcgagggtcggcgattttcggggtatcgggcggtttttggtcgcgggttttgcgtttttttcgcgggcgttaggcggttttcggcgggttggtcggttttacgtcgttagttagtttcgtgtggggatttcggtttagtatttggattcgaggagataattttgtgtggaaaatttttttttttcggttggaaatagtaataaattggaaacggatgaggtgttatggacgtgtttggaaatgtaagaaatttttagattacgagttgttgacgggattagttgtattttacgtttttcgaattaagtttagaattagtttttagaatgatatgtgatgcgtggtgcgtggtgtgtgtgtttgtgtgtgtgtatggatataatttatttatttttgtggcgttagaaaggttatgtcgagcgttgtagcggtttt

SEQ ID NO: 1838 - DNA, 6196 bp, Artificial Sequence
  chemically treated genomic DNA (Homo sapiens)
gaagtcgttataacgttcgatataatttttttgacgttataaaaatgaatgaattatatttatatatatatataggtatatatattacgtattacgtattatatgttattttgaaaattgattttgagtttaattcgaaaaacgtgaaatataattggtttcgttaatagttcgtaatttgaaggttttttgtatttttaagtacgtttataatattttattcgtttttagtttgttattgtttttaatcgaagggagagaattttttatatagaattattttttcgggtttaaatattagatcgaagtttttatacggggttggttggcggcgtggaatcggttagttcgtcgagagtcgtttggcgttcgcggggaagacgtagagttcgcggttaggagtcgttcggtgtttcgggagtcgtcggttttcggcggtcgcgcgagggggattcgcgttttttgtttatattcggattttcgcgtcgttcgttaagcggtcggaggcgtttttgaggcggaatgatttaggattaattttttaataacgttcgggttttttcggtcggttcgggtagcgcgttcggttacgtagtttttgagtcgttcgttttttcgcgtgaaattcgcggtttcgcggggtgtcgggtttttaacgttagcgggggttacggtcgtagcgaggtttgcgcgtttcgttttttgaaaaggtgcgggcgtttcggttttttcgggtttcgagttcggttttcgggataaagtttgtcgaagttgaggcgttcggaggcgggaggtagttcggttggggcgcggggttaggttgaagtcgcgtttcgtcgtcgtcgttgggacgggtcgggtttgcgtcgcgtcgggttcgcgtcgggtagtttcgaggttttcgggtttcgtcgtttagggcgcgggatggaggcgacggggatggaggcgttcggtcgcgcgtcggaggttcgttcgttcgtcgcggttttttatttcgcggttcgtcgtcgttcggtcggtttaggggcgtcgggcgcgtttttcgtcgcggttcgtagcgttttgtttttcgggttgttttatggcggggggcggggaagagtcggcggtcgtcgcggttgtcgtcggttggaaagtttcggttgggttgtaatttcggttcgcgtacgcggcggtcgcgtcgcgttttttcgttttttcgtttttttacgtagtttcgcgtaggtattttttttcgcgcgttggaaattttcggcgcgttcgtcgtttcgttttcgtcgttcgcgcgcgtgggagcggtaggagttcgcgagcgtcgtcggttttacgcgttcgtcggtttttcgcgcgcgttcgcgattcgttgttaagggttttagcgttcggcggtcgttcgttcggttttagtaacggcggcgtcgcggcgcggggcggggacggtttcgggcgtttttcgtttttttttcgttttcgtcgcgcgtttcgcgggttttttcgttttgcgtcgttttcgtcgcgttttcgtcgtcgcgcgttttcgcgttttcgttttttcgggttaaaaagttacgtaggtcgcgtgggggtcgagaggtgttggcgtcgttttttttcgcggttatttcgttcgtattttttacgttagtatagtatacgtagttttcgtgcgtgtacgttcgtgtgtttatggttatacgcgatttttacgtatacgtacgggttcgatatgcggtttttcgtattgtcgcggacgtatatacgacggttatattttttttaagcggatacgtatatatacgtttattaatatcgtgcgtacgcgtattaggttacgtattttcgcgtatacgtaggtggggttgagggtgatttaggtcgtggagttttttttcgtatgtagagggtagggttttatattagtttggtggtattttttttttttttttttttggatttttttacgttttcggagtggtgttttgtttacgggtggatagggtagttagtttgttacgtgtttttagcgttttcggcggttttggttgtttttgcgttttttgtattttttattaggtcgttggggtttgcgtatttttttcgaggtttttgttttttgttttaaaggtattagtggtgtgttagtgatttatttaggtttattaaggtagtatttagtttggttgggtttggcgaggtgggaagcgaagggagggtttttgggaggttttgggttagttgaggggtgaggttttcgttggagtttgtaagttagtggtgaggggatagaaaggattttgtattttttattttttaagaaggtttataaagagttttattttagagttgagattagtgtgagtagttaaggttagtttgtttttttgtattgttttagtgatttatgtgagtggaggtaggaagtttagtatttttttttatagttttatttatggaacgttttagaattttagatagttcgatttggttgttggaagtttatttggatattagagatattggattatgtttttggttttattagtttaatagatgtttgttttatagttatatttattaggttatagtggtattttcgtttgcgttataggtatagtttttttagaggtgataggttcgttttcgtcgttttttatagggatttatggattttagcggttttttttatttttatggtggattttttttgggagttttaggtgtttttttttgtttgttaggagttgggatgttattgattttaggtttagggttttaattattttttatagtttaggtattgaggttttttatgtttttagttttgtttagtttatagttttggtattttgtcgattggggtttatttttaacgtttgttttatgttgtgtgttatttatggtttggtttaattttgttaaaattaggaaagatttttttttttaggttggattatttttggttgttttaaaagaagtaggatatggatcgggtatggtggtttatatttgtaattgtagtattttgggaggtcgcgggtaggtaagttatttgaggttaggagttcgagattagtttggttaatatggtgaaattacgtttttattaaaaatataaaaattagtcgggcgtggtggagtgtgtttgtaattttagttatttaggaggttgaggtaagagaattatttgaatttaggaggcggaggttatagtgagttgagattgtgttattgtatttttatttgggcgatagagtgagattttgtttggaaaaaaaaaaaaaaagtaggatggtggtttatgtttgtggttttagtattttgggaggttgaggcgggaggatcgtttgagtttatgaggttgaagttgttgtgagttatgatggtattattggattttagtttgggtaatagagcgagattttgttttaaaaaaataaaaataaataaataattaaagaaaagaaaagaagaagtaaggtagaaggtttaaagatttatgagagggttttttgcggttttttttatgttttagtttagtattagaaagtaatattgagaatgaagttaggtataattaggttgagttttttgttggtgagatttatttttttttttttttttttttttttttttttttttttttttttttaattgagtagttttgaagattttttgttgtggggaattgaagggggataggataaagaagtttgttttaagtagggtaattgttttgggggttggtggcgggtgttttcgtttttgtagttagagttatagggtagtagtgatgggtaggaaggagagtttttttttcgttgtattttaaaggtagatttttgttttttatggtaacgtttaataataaatcgatattatttttggacgtattttttataggagttgatgtagtattatatgttttgtttgttgtatttttggagaagtgtatgtagatatttaagtgatttatagatatgtaatagtttagaaggttattttgtttgttttttagtgagaaggaaaaggtattcgtggtagagtgttaggggttttggggttaggaaaggggtttttttataattttttttgaatgtgatggtttgtgttttaggtggcgtttttttatataaaaattattggtttttgtgggttaatttgggttgaagggtgttggtaattttttttatttaaatatgttatacgtggtttgggggtggggggtggggattttggttttgatttgttttgttttattttattttgagacggagttttatttttgttgtttaagttggtatgtaatggcgcgattttagtttattgtaatttgtattttttaggtttaagttatttttttgttttagttttttgagtagttggaattataggtatatattattatgtttggttaattttttgtatttttagtagaaacggggttttatagttaggcgcggtggtttacgtttgttattttagtattttgggaggtcgaggcgggcgaattacgaggttaggagatcgagattattttggttaatatagtgaaatttcgttttttttaaaaatataaaaaattagttaggtgcggtggcgggcgtttgtggttttagttattcgggaggttgagggaggagaatggtttgaattcgggaggcggagtttgtagtgagtagagatagagatagcgttattgtagtttagtttgggtaaaagagttcggtttgggtgaaagagcgagatttttttttaaaaaaaaaaaaaaaaagaaatagggttttattatgttagttaggttggttttgaattttttattttaggtgattcgtttattttaattttttaaagtgttgggattataggtgtgagttatggtgtttagtttcggggggcggattttgatgtacggtagaattatagttttattaattgttttaataagtggtttttgaatttttgaatatattttatatggtaatttagttgtttataatttgtgtgtgtatatatacgtaataatagattattttaaatttgcggcgtatttcgatatttttcgttttgtttattttttaatggtggttattattttttaagtttatttttgatttatgatttgaagtttgaaaatattattttagattgaaagagttgttgaagatgtcgaagggggtttagggagttggggtggtcgtggcgttaaagtatttcgttttgtcgtgagtgtatagtggggtagttgggttgggaagtttattttgtttttgaagtagattttggttgatagtagaggtcgttagtaaagaagtaagttgttggtgtttttttcgggttagggatgtttgtaaataaatgtagaggaaatgggggtggggaggtagagtaagttaggtatggtggcgggtatttgtaattttagttatttaagaggttgaggtaggagaatggtttgaatttgggaggttgaggttgtagtgagtcgagattacgttattgtattttagtttgggtaatagagtgagatttcgttttaaaaataaaggaaagaaagaaaggagggaaggaaggaaaggagggaaggaaggaaagaaggaaggaaggtcgagatgggcgtgggtgtgtaaattttttacgcgggatattcgagaggggaggagagggtagtgatgatagggaaggtgagaggttggggttttcggttatagaaaaatagttttagcgggttagttggtttatatttgtaatttttgtattttgggaggttgaggtaggaggatcgtttgaggttaggagtttgagattagtttgggtaatacgatgagatttcgtttttataaaaaaattaaaataaaaataattaattagaggtcgggtattgtagtttatgtttgtaattttagtattttgcgaggtttaggcgggtagtttatttgaggttaggagtttaaaattagtttgattaatatggtgaaatttcgtttttattaaaaatataaaaaatgagttgggcgtggtggttcgcgtttgtaattttagttatttgggaggttgcggtaggagaatcgtttgaatatgggaggcggaggttgtagtgggttaagattgtgttattatattttagtttgggtgatagagttagattttgttttaaaaataataataataataattaattagaagaaaattagtt

SEQ ID NO: 1839 - DNA, 8220 bp, Artificial Sequence
  chemically treated genomic DNA (Homo sapiens)
  unsure 6499..6500, 6567, 6581, 6584, 6591..6592: n is a or g or c or t
tttagtttattattgtggaggttttgttgggttatgaaatggtgtaggtggtttgtggggttttttacgtgttggttttgtttattgagcgagaattatttgtttggggtcgtggagatagcggtaagttttagtttttaggttttattttatagtatttttagttatgatttgtttttttttatatttattttttattttatagtatatttttttttttttttttttttttaaattttttttatttatttaataaatttttattttatatcgattatgtgtatattttgtgttgggtgttgagatgagatggagatgtggttttttttaggtgtttatgaggtaatgaaggaaattttatttatttatttagtttttttttttattttgagatggagtttcgttttgttatttaggttagagtgtagtggcgtgattttagtttattgtaatttttattatcgggtttaagcgaattttttgttttagttttttaagtagttggtattataggtattcgttatcgcgtttagtaaatttttgtatttttagtagagatagggttttattattttggttaggttggtttcgaatttttgatttcgtgatttatatgttttagttttttaaagtgttgggattataggcgtgagttattacgtttggtttatttattaattttttttattgaggttttttttgggttaggtattaggttggttattgaaattagagatgatattgatgggtttttgtttttttggaggatttagtttagtgggagaaagatgatattgttagtatgttagagaatagatagtattagggttatattttagtgtagaggcgtggaatttagtgaatagtaatgttaattggaggagagagatgttatttgaatagggttttaaaggaggaggattttgagtcggcgtggtggtttacgtttgtaattttagtattttgggaggtcgaggtaggtggattataaggttaggagtttaagattagtttggttaatatggtaaaatttcgtttttattaaaaataaaaaaattagttgggtatggtggtgtatgtttgtaatttcggttatttaggaggttgaggtaggagaatcgtttgaatttaggaggtagaggttgtagtgagtgaagattatatttttgtattttagttttggcgatagagtgagatttagtttcgaaaaataaaaataaaaaataaagaaggaggattttaattagtagaggggtttaggaaaggtatttgggattgagagaatagagaatttatgttgttttttttttttagtgggttttttttattcgggtattatttttattaaagtttaaattaattttttttgggtttttttttgtaggtagattggggttaggtattagggagttttatagttgtttttagtaggtgtttatgtttttaggataggaagtttagcgagttgtatgtggtatcgatttttttatgatttttattgtgtttggttaagttttagtttgtgggagtaataggtgaatagattattaggatgattaatttgtttttggttttttttggttgtaagtgtttcgtttattattgtttattttttattaaagattagaattgagggggttgagggtgttattggtttaatttagggtgggatttgttttttggtgtattagtttttgtttaaattgtttgttagttggatttggtttttggttttgtttttagggtttaataagttgggtttggattatttttttttgggggaggagtttgttttttattagtaagtggaggaggttttgagttttatattattaggttttgtatttttggattaggagtttttgttgagtatagatttgggtattgtttatttagttgttgtgattggtgaggaggatttgggttttggaggttagagggggatttacggtttttttggtattttgttgaagtatttttttttttttttttttttatagtttcgggtgattgttatatttttggtagtaattagtacggatagttgggtattaatattcgtcgaggtagtcgggtattttgtaaggtttaaggttttgagggtattaagatggtaatggtagtttgtggggatgtttttattgtagttattggggtaggtgaggattgagtatggtgggggtagatagtgttatgagtagtggggggtgggggttgttatttagggttattggattttggagttttttaggggttattttggtaatgtgggaggggagattttgttcgggttgtgtttattttttattttttttttggggattttttttggtagagagcgaagtgtatttttggggtaaaggggcgcgaggtcgattgggaaggagggatgaggatgtcggattttttcggttagtgtagttggatgagatatatttttatacggtgattttcgtgttttgttgttatggaaatatttttttggttgttcgatgtgagttgtaattttttttattttattatatagtttagttggtttttgtttatatttttatttttagtgtttatagatggttatattattaaaagtatttttagtttttagataaaaaaagtagaagttgcggttgaaaagttttaagttttttgtttggggtggttaaggttggtgttttttgggttttatggaagggttgtttttattgttttttagggtttatatgtatttttttttttattgttgagtttcgttgatgttgaaattttttttttggtttaatagggtttagaatttagggtttagtgggagtgggaggtgggtgatgatttttggaggtattgtttttagaagttgtaagggttttttttcggtattttttagcggttatagatgagtcggtttttttttgaggtattcggatttatttttggattattttgatattgttttttttttgaatgttttgaaaagtgtaggtgtttaaggtatgatttgtagttgttttttggattgtgttattatggggtattagggttggtaaaatttttgttttgtttttggttttggatatggaaattttaattattttgtttttttattatttttttgttttttttatttttttttttttttagttagtgtttttagggtttagtttggttagagttagaaggtagatttagtttttggaagtagggtggtttttagagttttgttataaaaaggttgaaggtagtcgggcgtagtggtttacgtttgtaattttagtattttgggaggttgaggcgggcggattacgaggttaggagatcgagattattttggttaacgtggtgaaattttatttttattaaaaatataaaaaaattagttgggcgtggtggtacgcgtttgtaattttagttgtttaggaggttgaggtaggagaatggcgtaaatttttttagtttgggcgatagaattagatttcgttttaaaaaaaaaaaaaaaataaaaaaggttgaaggtagttgtagttttatatagattttatttttttttttagtttagttagaaaataagtttgggtcggcggcggtggtttatatttgtataggtagtgttttggttaggaggattttttgattttttgtggttaggagttgggagattagtttggggattatagcgagatcgttgtttttattaaaaaaaaaaaaaaagaagaaaataaggttgggtgcggtggtttacgtttgtaattttagtattttgggaggttaaggcgggcggattatttgaggttagtagattgaggttagtttggttaatatggtgaaatttcgtttttattaaaaatataaaaattaattaggtatggtgacgggcgtttgtaattttagttattttggaggttaaggtaagagaattttttgaattcgggaggtgaagtttgtagtgagtcgagatcgtattattgtattttagtttggatgatagagtaagttttttttttaaaaaaaaaaaaaaaaaaaaaaaaaaaaaagtatttggtgtttatcgggattttatttttatattttggagtagggtaagttagggtttgtttggattggttattaggtttgtttagtttttgtatagttcggggttgggcggttttcgggagtgttgttattttttttatatttttattttgaggtaggatttgttagacgtcggtttgttttttttttttagtaggagggtaggagttattaagtgttgtagaaaagattcgcgttggagattgttcgttttttttatgtttttttttagaaatagttgagagaatgggtagttggtgggattagatcggttttttagaggataggaaggttaataaaaatattagttgtttgtttggagtgtggtgtttttaagggtgggggtggcgattaggtattttaggattgggttgggttcgatttcggtggtagggttgcggttaagggaggaatgtgggcgtagtcggaggttggggtcgaggtttttttggtttagcgtttagtttagttttttcgttttagttgggtttttcggagttggttgttaggtttcggttgtttagtatttggaagttggggttacggtttttgggttgtttacggtttcggaggtcgagttgttgtttttggagaagaaaatttttgtggcgcggttcgttttttttttcgattcgtattttttcggggttcgcgggttttggggagaagcggagttacgatttttgttttttaggggaaagaaaagtttatgatttcgtgggtgggcgagattggcggttattagatttaaaaattatgtattcggttttttttttttcgagggcgggttttatagtcgagttttggtcgcgatcgttagtcggcgtcgttcggagtcgggagcgtcgttttagcgaggcgcgggttgtggggtcgtcgcgtgtttggtttcgttcgttcgtgtcggtcgttcgttcgttatgtttggtttcgattataagtttttggagaagtttaagcgacggttgttgtgtttattgtgcgggaagtttatgcgcgagtttgtgtaggtttttatttgcggttatcgtttttgcgatatttgtttgtaggagttttttaggtgttggtcggggagtaggggatagcgggggcggggcggggcggggggcgtcgtttggggagggtttcgggttcggggtaaggcgggtttttgtttgcgttgcgattttgtgattttaggggcgtttcgtgacgttacggggagggatgacgttaagtttcgagggaggtttttttcgtaggaattcgaggggttcgggcgggttttaattgttcggttcggggcggaagatttcggcgttttttcgtggggttaggaggggaagaggttttttttcgttatttgagagtcggcgcggttttagttttgaattttgaattttgggggaagaggataaaattcgttttcgcgtggtagtttgagttttcggagtttttttttatttaattttttttgatttttcgaacgtttagagaacggtagttattgtttttttattttatagattatgaaacgagatttaaagaaaggttgcgatttgtttagggttatatagttatttaaaggtttaattaggatttaaattcggattgtttatgattatataatggaggaaggattgaattttttttcgaagaaggatttttttaggcggtttttttttttttcgggggttggagtaaggcgggtggtttataagttatgaagaagggggtcgtattcgtgttgttattgaattttcgttgtttttttaggacgtaggttagtttttggtttttgggtatttattaagtttttgggcgttttgtatgttttgaattttttgtttacgtagggaattttttaggttcgggtgtgggaagtagggtgaaggagtttcgatttttcggaggttatgtttttagagcgtaggggaaggtcgagtcggttattgtttggttgtttgttgggacgaggggatcgagggtttggtagggatagtatttttgagacgtttgttttcggtgttttttttcgtcgtgtttttttttttcgttcggtttttcgtagtttttattggcggaaattttagtaggttttttgttttttgttttttatagtttgggtcggtttttgtttttatatatgtttcggtataagttgtaggattgttttttttttttcggtagtgtatatatttatttttttatagatatagttttattgttttcgttattgttttttttcggttttttgggttttagatgaggttagttgagtttttcgatttttttatagttgatttattttgattgtttcgggaaaggagcgggggacgagtttgtgtagtaagatcgttttttttttttttataatattattattattataaaattagtcgggtatggtggtatttttttgtaattttagttatttgtgagattgaggaannngggaaaaaaagggagaagggtttttttttttttttttttttttttatatttttggcgtttttatgnattaaatattttanaanaaaaaannntttttttttttatattttttttttttttttttattttgtttttttttttgggttttggtttttattgtatagtttggagtaggtttttgttttgtttgttttttattttttagtgtttgagttgtgttgttgaggtttttgaaggggagagaggtggttgggtggtttttgttttttattcgttacggtataagtataagtgagggtgtttatagttttggttgggttttaagttgtaggttaagtttttgtttgaagtttagggatttgtttttgttttttttttttttttaaaattatttagttagtatatttttgaagtagttaagtggattttttttttttgggtttatttttttttttttatttttgtttgagttgttaggttggtttaggaaggttggttgttttgtgggtagatatatttttttagtgtttgtggttgtattgtttttggtattgaagtatggttagtggtagtgggattaaggggaggaggtgggtgttagaaatttttggggtagttggggtatggattgtttgggttttggagagtgtttttagaattgggtttttatgtgggttttggtttcgtttggatttttgtttgttttttatttatttgatttagatttgttaggaatgttttgttttagggttttgagttttgttgggtgagttattgttttgtttgagttatgttaggtatgtgtgattggttttggttggggttagtaagggtatgtcgatagaaagaagtatgttaataggttttttgggtgttgacggttaggtagggtttggtgtaggagaaggcgggtagttagtaggaggggacggttattaggttttagaagtttattgagtagtgtttagagttttagttgtgtttgttggatatttttttttgttttagttttttttttttgtgtgtgtggtgtagtagagtttgtttgagttgtggagttagatatatatagttaggtgttgttttatttgtaagttttttcgttttatttgtaaaatgggggtattttatttttttttagaggtaggtggtaagggtcgggtgggaatgtaaataggtgttaaggagtatgttttttttttttttttttgtgggagatatatttttaaaggagtagggtagggtaaggtggtcgtaagttgatttttgttttggtttttggtagaggatttttttggggattgggtagttttcgtatttaattttagtttatttttgtttttttttttagttagtttttagcgtagttaatgaaaattaatttagggggagggggtgattgtgtagcgtgttttttttttagtttagttgttattttgggggagggggtgttagttgttatttgttggttaagttttgattgaggtagttgtttgtgttttttttaggtttagatttttttttttaggataggggttggggttttttgggattttggggaagtagagttttttaggtttttgtttgtttttttgttttatttaggttggttgggaatcggtttggtgaggaagggaggttgttttagtggagggggtggggttaggttttttttttttttaatgagaaattttttttttgttttttttttattttagt

SEQ ID NO: 1840 - DNA, 8220 bp, Artificial Sequence
  chemically treated genomic DNA (Homo sapiens)
  unsure 1628..1629, 1637, 1640, 1654, 1720..1721: n is a or g or c or t
attgaaatgggggaggggtaggaaaaaggttttttattaggggaaagggaggtttggttttattttttttattgaggtagttttttttttttattagatcggtttttaattagtttagatgagataaaagggtaagtagaggtttgaggggttttatttttttaggattttagaagattttagtttttgttttgggaaggggggtttgggtttagaggaggtatagatagttgttttagttaggatttggttaataggtggtagttggtatttttttttttaggatggtagttggattgggaaaggaatacgttgtatagttattttttttttttaggttagtttttattggttgcgttgaaagttgattgggagggggaatagggatgggttgagattaagtgcgaaggttgtttagtttttaggaaggttttttgttaagaattagggtaaaggttagtttgcggttattttattttgttttgtttttttgagggtgtgttttttatagaaaaggggaggaaaggtatgttttttggtatttgtttatatttttattcggtttttgttatttgtttttgagaaggggtggaatgtttttattttatagatgaaacgaagaggtttataggtgaagtagtatttggttatgtgtgtttgattttatagtttagataggttttattatattatatatataaggaagagaagttggggtaaggaaaaatgtttagtaagtatagttaagattttgggtattgtttagtgggtttttgaagtttggtgatcgtttttttttgttagttgttcgtttttttttgtattaaattttatttggtcgttagtatttaaggagtttgttggtatgtttttttttgtcgatatgtttttgttgattttagttagggttagttatatatgtttggtatggtttaggtagagtaatggtttatttagtaggatttagggttttggggtagggtatttttggtaggtttgagttaggtaggtggaaggtaggtagggatttaggcggaattagagtttatatgggagtttagttttagaggtattttttaggatttaggtagtttatgttttaattgttttaaggatttttagtatttattttttttttttgattttattattattggttatgttttaatgttaaggataatataattataggtattgaaggggtgtgtttgtttatagggtaattagtttttttgggttaatttaatagtttaggtaggagtggggaaagaggggtgggtttagggggagggggtttatttggttgttttaggaatgtgttgattgagtggttttggagaaagggaggggatagaggtaagtttttaggttttaggtagaagtttagtttgtagtttggggtttagttagggttgtggatatttttatttgtgtttgtatcgtggcgggtgaggagtagggattatttaattattttttttttttttagaagttttagtagtatagtttaagtattgggggatgggggataggtagggtagaggtttgttttaggttgtgtagtggaggttaaggtttagggaagaagataggatggggggaggggggggaaatataaaaaaaaaaannnttttttnttntggggtgtttggtntataggggcgttaaaagtgtggggaaaaaaaaaaaaaaaaaggggttttttttttttttttttttnnnttttttagttttataggtggttgggattataaaaaaatattattatgttcggttaattttgtaataataataatattataagggggggagaagcgattttgttgtataggttcgtttttcgtttttttttcgaggtagttagggtgggttagttgtgggggggtcggggggtttagttggttttatttggaatttagagggtcggggaagagtagtggcggagataatggggttgtgtttgtaggagagtaaatgtgtatattgtcgagggggagggggtagttttgtagtttgtgtcggagtatatgtgagggtaggagtcggtttaggttgtggggaatagaaaataaagggtttgttgagattttcgttagtaggagttacggaggatcgagcgagggagggaggtacggcgggagggagtatcggaggtaggcgttttagaggtattatttttgttaggttttcgattttttcgttttagtaaatagttaggtagtggtcgattcggtttttttttgcgttttgggggtatgattttcgaagagtcggggtttttttattttgttttttatattcgggtttgaggggttttttgcgtgagtaggagatttaagatatatagggcgtttagaaatttgatggatgtttaagagttaagggttaatttgcgttttgagagggtagcgggagtttagtaataatacgagtgcgatttttttttttatgatttatggattattcgttttattttagttttcgggagagaggggagtcgtttagaggggttttttttcgggggaggatttagttttttttttattgtgtgattataagtagttcgggtttaaattttagttaagtttttaagtaattatgtgattttgggtaagtcgtagtttttttttgaatttcgttttatgatttgtgaaatgggagaataatagttatcgttttttgaacgttcgaagaattagaagaggttagatgggggaaagtttcggaggtttaaattgttacgcgggagcgggttttgttttttttttttaggatttaaagtttaaggttgaggtcgcgtcggtttttaggtgacggggaagggttttttttttttttgattttacgagaaggcgtcgaggtttttcgtttcgggtcgggtagttgggattcgttcggatttttcggatttttgcggggggggtttttttcggggtttgacgttattttttttcgtgacgttacggggcgtttttgaggttatagggtcgtagcgtagataaaggttcgttttgtttcgggttcgagattttttttaggcggcgtttttcgtttcgtttcgttttcgttgttttttgtttttcggttagtatttgaggaatttttgtaggtaggtatcgtagaaacggtggtcgtaggtggaaatttgtataggttcgcgtatgggtttttcgtatagtgggtatagtagtcgtcgtttgggtttttttaggaatttgtagtcgaagttaggtatggcgggcgagcggtcggtacgggcgagcggggttaggtacgcggcggttttatagttcgcgtttcgttggagcggcgttttcggtttcgggcggcgtcgattggcggtcgcggttagggttcggttgtgaagttcgttttcggaagaaaaagggtcgagtgtatggtttttgggtttggtgatcgttagtttcgtttatttacgggattatgggttttttttttttttgggggatagagatcgtggtttcgtttttttttagagttcgcgggtttcggggaagtgcgggtcggaaaaggggacgggtcgcgttataaaggtttttttttttagaggtaatagttcggttttcggggtcgtgagtagtttaggaatcgtggttttagtttttaggtgttaggtagtcgaagtttggtaattagtttcggggagtttagttggggcggggaggttggattgggcgttgggttagaggaatttcggttttagttttcggttgcgtttatattttttttttggtcgtagttttgttatcgaggtcgggtttagtttagttttggggtgtttggtcgttatttttatttttgaagatattatattttaggtaggtagttgatatttttattggtttttttgttttttgggaaatcggtttggttttattagttatttatttttttaattgtttttggggaaaggtatgggggggacgggtaatttttagcgcggattttttttgtagtatttagtgatttttgtttttttgttggggaagagaggtaagtcgacgtttagtaaattttgttttaggatgaaagtgtaggggaggtggtagtattttcggggatcgtttagtttcgggttatgtagaagttaggtaggtttaatggttagtttaggtaggttttggtttgttttgttttaaagtatggagatagagtttcggtaagtattaaatatttttttttttttttttttttttttttttttgagagggagatttgttttgttatttaggttggagtgtagtggtgcgatttcggtttattgtaaattttatttttcgggtttaagggatttttttgttttagtttttagagtagttgggattataggcgttcgttattatgtttggttaatttttgtatttttagtagagacggggttttattatgttggttaggttggttttagtttattgattttaagtgattcgttcgttttggttttttaaagtgttggaattataggcgtgagttatcgtatttagttttatttttttttttttttttttttttggtggagatagcggtttcgttatggtttttaggttggttttttaatttttggttataagggattaagggatttttttggttaaagtattgtttatgtaggtgtgagttatcgtcgtcggtttagatttattttttaattgggttaggggaaagggtagggtttgtgtggagttatagttgtttttagttttttttgttttttttttttttttgagacggagtttggttttgtcgtttaggttggaggggtttacgttatttttttgttttagttttttgagtagttgggattataggcgcgtgttattacgtttagttaatttttttgtatttttagtagagatggggttttattacgttagttaggatggtttcgattttttgatttcgtgattcgttcgttttagttttttaaagtgttgggattataggcgtgagttattgcgttcggttgtttttagtttttttatggtaaggttttggaggttattttgtttttaaaggttaggtttgttttttaattttagttaggttggattttggggatattgattgaagggaggaaggggtaggaagggtaaagaggtggtaggagaataaagtggttgaggtttttatatttaaggttaaaagtagagtaggggttttgttagttttgatattttatgatgatataatttaggagatagttgtaagttatgttttgggtatttgtattttttagagtatttagaggagaagtaatattagggtggtttagaggtgaattcgggtgttttagggggggatcggtttatttgtgatcgttggagggtatcgaagagaaatttttgtagtttttgagggtagtgtttttagaaattattatttattttttatttttattgggttttggattttggattttgttaggttagaaagagagttttagtattaacgggatttagtagtaggagaaagaatgtatgtgagttttggggagtagtggaggtagtttttttatgaggtttaagaagtattagttttggttattttaggtaggaagtttgaagttttttaatcgtagtttttgttttttttatttgggggttaaagatgtttttggtgatgtggttatttgtgaatattggggatgggagtgtggataggggttagttgggttgtgtggtgaagtgggaaaagttataatttatatcgaatagttaggagggtgtttttatggtaataggatacggaagttatcgtgtaagggtgtgttttatttaattgtattggtcgagggagttcggtatttttattttttttttttaatcgatttcgcgtttttttgttttaagagtatatttcgttttttgttaggaagaatttttaggagggaagtgggaagtgggtatagttcgagtaggatttttttttttatattgttaggatggtttttgggaggttttagagtttagtggttttgaatagtaatttttattttttattgtttatggtattgtttgtttttattatgtttagtttttatttgttttaatagttatagtgaaggtatttttataggttattattgttattttgatgtttttaaggttttggattttatagggtgttcgattgtttcggcgagtattggtgtttaattgttcgtgttgattgttgttaaaagtgtagtaattattcgaggttatgggggagaggaaggaaaggggtgttttaatagggtattaaggagatcgtgagtttttttttgatttttagagtttaagttttttttattagttatagtagttgagtgagtagtgtttaggtttatatttagtagaggtttttggtttaggggtgtagagtttagtagtgtgaagtttagggttttttttatttgttggtgggggataggttttttttttagggagaggtggtttaggtttagtttgttgaattttgagggtagagttagaagttaaatttaattgatagatagtttgggtaggagttggtgtattaggagatagattttattttgggttgaattaatagtatttttaatttttttaattttggtttttggtgaaaggtaggtaatgatggacggagtatttgtagttaaggagagttaggggtaggttagttattttgatgatttatttatttgttgtttttataggttagggtttggttaggtatagtgaggattatggaggaatcgatattatatataattcgttgagttttttgttttgggggtatgggtatttgttgggggtagttgtgggattttttggtgtttagttttagtttgtttataagaagaaatttagaaggagttaatttgagttttagtgggggtgatgttcgaatgaggagggtttattgaggggagggaatagtatgagttttttgtttttttagttttaaatgttttttttaggtttttttgttggttaaaattttttttttttattttttatttttatttttcgagattgagttttattttgtcgttaaggttggagtataagggtatgatttttatttattgtaatttttgttttttgggtttaagcgatttttttgttttagttttttgagtagtcgggattataggtatgtattattatgtttagttaatttttttatttttagtagagacggggttttattatgttggttaggttggttttgaatttttgattttgtgatttatttgtttcggttttttaaagtgttgggattataggcgtgagttattacgtcggtttaaaattttttttttttaaagttttgtttaaatgatattttttttttttagttgatattattgtttattgaattttacgtttttgtattggggtgtagttttgatgttatttgttttttggtatgttggtaatgttattttttttttattagattgagttttttaggaagataagaatttattagtgttatttttagttttagtggttagtttgatgtttgatttaaagaggattttaataaaaaaaattagtggatgggttaggcgtggtggtttacgtttgtaattttagtattttgggaggttgaggtatgtggattacgaggttaggagttcgagattagtttggttaagatggtgaaattttgtttttattaaaaatataaaaatttgttgggcgcggtggcgggtgtttgtaatgttagttatttgggaggttgaggtaggagattcgtttgaattcggtggtggaggttgtagtgagttgagattacgttattgtattttagtttgggtaatagagcgagattttattttaaaataaaaaaaaaaattaggtggatgaatgaaattttttttattattttataaatatttgaaggaagttatatttttattttattttagtatttagtatagggtgtgtatatagtcggtgtaaaataaaggtttgttgaatgaatgaagagaatttgagagaaaagagggaagagagaatgtgttgtgaggtggaaggtgggtatgaaggggagtaagttatggttgaggatgttgtgagatggggtttaaaggttggagtttatcgttgtttttacggttttaggtaaatagttttcgtttagtggatagggttagtacgtgagaggttttataggttatttgtattattttatagtttaataaagtttttataatggtgggttaga

SEQ ID NO: 1841 - DNA, 13573 bp, Artificial Sequence
  chemically treated genomic DNA (Homo sapiens)
tttttataaaaggttagcgtatttatatttttatttttgtttttggtattttttagattttgatttttaggtgtttttgtttagatcgtatgtattaggttgcgttttttttttgaatatatagtttttttaggttgtgttatttttttaaaatagttgggtatagatattttttggaaagttttgtgtttttttaggagtatgtttattttgatttgaagtttgttgttttagttttttttttttgttttaattatattgattttaaggttttggattataaatgtagtttattttagttttagggtttttgtaataggtgttttttttgtatggattattttgttgaaagatttttgtatgtagaaattattatttaggtatttagtttaaattttttttttatagatgagtggtgagtgagggaatgaagttgtatttgtatttatagttattttttatttttatattattgtttgagttttattttttgttatattagttgtggtattagatttttataagagtataaattttttcgtgaattgtatatgtgagggatttaggttgtatattttttatgagaatttaatgtttgatgatttgttattgttttttattatttttagatgggattgtttagttgtagtaaaataagtttagaaattttattgattttatattatggtgagttgtataattattttattatatagtgtaatgtaatgataatagaaataaagtgcgtaataaatgtaatgtatttgaattaatttaaaattatttttttgttttattttgttttgtagaaaaattgttttttaaaaatttattttttggttttaaaatgtttggggattgttgtattgttgtattttttgggttaagaatagtgtttaatatattttattaattatttattgttgtgtattaaattatttaaattttagagtttaagataatatttattatattatagtttttgtaggttttagtttagggttttttgtgagattgtagttaagatgttatttgatggtttgattggggttggaagatttatttttaggatgatttatttataaggttttggtagaaagttttagtaatcgtttggttattggtaagagggtttagttgtttagtagtttttttaaagggttatttgggtgtttttaggatagggtagggttttttttttatagtaaataagagagagtaagatagaagttataatgttttttatagtttagtttagggaggtatatttcgttatttttataatattttgtttgatatggtttggttttgtttttatttaaattttattttgaattgtagtttttttaatttttacgtgttgtgggagggatttagtgggagataattgaattataggggtagttttttttatattgtttttgtagtagtgaataagttttataagatttgatggttttataaagggaaattttttttatttagattttatttttttttttgtttgttgttatgtaagatatgttttttgttttttattatgattgtgaggtttttttagttatgtggaattgtgagtttattaaattttttttattttataaattatttagttttaggtatgtttttattagttgtgtgagaatagattaatatattgttatatgaggtagttttatgtattgtggaagtaaattatacgtgggtataaatattatttttaaggtaggttgttatatatatttataatggttgtttaataagtgtattttgagttaatgaattgtgttataattttataatttaatttgtagagagttattttatttttaaatgtttggggaagttttatttttttaattttatttttagttgtgtaaaattattttttattttattttttaaataggatgtgagaaatagtaatttaggaatgatattgttttagtttaatttgtgttgttataatagtataatattgattgggtaatttataatgaatagaaatttattggtttagttttggaggttgggaagtttaaatttaaagggttggtattttgtaagagtttttttgttgtgttattttatgttggagggtaaagtgaaggtaagagagaaagagatggagagaaagacggggttgaattaaatttgtttttttataaggaatttatttttagaataacgaatttattcgtatgataatggtattgatttatttatgaagagtgtttttttacgatttaaatgttttttattaggttttattttttaaaattattatattggggattaagtttttaacgtatgaaatttaggggacgtattgaaattatagaagatatggagattatatttttatttatgtttgatttatttataaggataattggataaaatattttaaattattaggttggtataaaagtaattggtattttttttattaaaagtaaaggtaaagattataattatttttgtattaatttaatagtagttttttaggaaatttgattattgtggttgttatatataggtaattttattaataggaatatttaattatttttatttgcgtaggattttttagtttgtaaggtatttttttatatgattttatttgaatttataatagttttgaaaagaagataggatagattttattataattttatagataaggatatttgattaggttttaattttaatgagagttagaagtaggagtagaattttggtttttttatttcgagtattaggaaagaatttaagaaagaattgtgtataaagtaggtttagttatgtagtagaaaagataattttaatattttaatggtttaaaataataggcgtttgttttttgttttcgtaagtttaatgtaggtggattgattttttaaggtaattgttttttatatattaattgagtgatatatttttttttttttgtagttgttttttgttttttggttgtatataggggaaatagttttgtaatgaaaataaaacgttttgatttaggaatgatatgtatttttttcgttatagtttataggttagaattagttacgtggttttgtttgattgtaaagggaaatggtatttgtaagttttttgtgtgtttaaggtatggatgagtattaaaatttttttttatattgaataaattggatttgaaggagtaggaaaaggttttttgagggtatttatgaaaataatgtaaagaaatatatatagaatatttaatttttttgaaagtttggtgttggagttttttataatagatttttattattttatattgataaaagtttggtaaggtagatattatttttttttttatagtttttggttattgtagtttatggaggttatgtaatttgttttagagtttatattaagaagtggagggaattttgatttttttgtttttttttttttttagtttttaattttatataatgatttttttttttattttataagagatttaatttttaagaggagtttttagggagggatatataaaggttggtaatgttttattttttaaagttgggtggtgagtatatagatgtttgtgttttttttatgttttaagtgttttaaaatataattttttaaaagggggttgatagaatttgagaattagtgataaattttttttaaaaagagaagtatttttaatgaatattggtagttagaaagtaggatatatagtattggtaatatttattgagtttatattatgttttagttttgggtttatttgtttgttcgtttgttttttgagatagggttttattttgttatttaggttggaatgtagtggtgtaattatggtttattgtagttttgattgttagggtttaagttatttttttattttagtttttagagtagtcgagattatagatatgtattattatatttaggtaatttttaaattttgtgtaaagatggggttttattatgttgtttaggttggttttaaatttttggttttaagtgatttttttgttttagttttttaaagtattgggattataggtatgagtttatttgtgtttggttagatagttttaaataatttttttatatattttattttatttttttaataattttgtgaggtagatattattattatttttatgttaatacgagatgagaaaattgaaataagtatagattaagtattttatttgaattatatatttattataggaaaaatcggattggaattaagtattttggttttaggatatatacgtatgattattattttggaaaattttttttaagaggtggacgatgaattaaatatgtagaggtggatgaaatttttttgtgtttttttagtaaaacgcgtggtatattttttagacgtttatgattagttaaatagggaatttaaaatagtttttttatgatagagaaagataaagcgttggtgtttttggtaggaaatttaaagaaatatttaaggtaagggttgatttttttggatcggatgaaggggaagagtaggtaataatagagggttttatggatcgtagaaattttttgggtaaggagggtggagttggggaggggtttaagaatttttgaaggttaagcgatttagtttagttggggtttttttttgtttggagaggggtgttataaaagcgtagtttgggattattattgtcgttattgtttattaaattaagttatttcgggagggattttttcgtcgttatttttattttaatatatatttattgatatattcgggttcggttgtgcggtgtaacgaatttttaggtgggatattcgagtaggaagaaagttaggttgcggggttgggggcgtcgttcggttcgcgttatagttcgtttggaggattatcgttagggggtatttttttcgaattcggtcgttttgtttttttttcggcgcgttttttgtttttcgtttttcgtagttagtagagaaggcggaagtagtggcgttcgtagttggggtttggtttgcgggcggttagcgaaggtggcgaaggtttttattggatttagagtttgtcgtttaagtagtttcgtttcggcgcgtagtgtttgtgttcgttttttattagcgttttggttgagcggagtcgtgcggttggtgggggagttttgtttttttggttcggttttttcgcgtattagaacggtgagttttttttaggcgtttttttttggcggtcgtcgtttcgttttttagcggttagggacgtcgtttttcgttttttcgttttcggtaggtcggggacgtagtttttgttttttcgttttttattagtcggggacgttttttttgttttttcgttttttataggttagggacgtcgtttttattcgtttgttttttacgggtcggggacgtcgtttttgttttttcgtttttcgttggtcgaggatatcgttttttgtttttcgttttttgtaggtcgggacgtagtttttgtttttacgttttttataggtcggggatatcgttttttgttttttgatttttgttttttaggttttttttttttcgtttattttattttttaaaaaatttcgcgtcgttttatttaatttcgttttttttaatttcgtttttttttttttttagataaggaaattgttttttgtagttgttcgttttttggagtaaatatttgtttaaatttttaaaaaattttttacgtttttggcgatttcggttgttattgttatgggaaagttatttttggattttttgttgaattttatagaagttttaggtagcgagtttaaaaaaaaaaaaaggtttagatgatacgaatgttttttttttcgtttttaaattcggtagttcgagcgattgttttagacgtcgggttgataaagttgtttttagtatttggtttaaggggaattttagttgagttaggattgttttgaatgtgaatagaaagtatttaaataaagtattagtagtttcgttgtatggtatttaattgtttttttttttgagagtagattattattattgaatgttttgttatataggttttatgtagaaacgagaaaaattggtaaagaaattttgtgttggttttgtgaatttggtcgttattattttatttatttttttttgattattagggaagggagaggggttttttaaattttgaggttgagtgtataggtaggaataatgtggttttttttgtgattttaggaaggagttcggtatgtggtgggtataggattatattagagttttagtttgtatgtattataatattttagaattgtaatatgagtttttttttgtgataaatttgggtatgtgatgtcggtaaatttttggatatttagatttggagagaagtttaaatttttgttttttggagtagagtaaatagtgtttaggaaggggaatgttttttgaatttggatttaaagttaaggtataatagttgagtattttgtagtattttttggttattggagtatatttgtaggtttttatattttagaaattaagaagttggtaaatagtttttgtttttaaagttagtagtatattaaagataattttttatattttttttatatggttttattttaataagttatatgtttattcgtatgaattttagttgatttaaaattgatttatttaagatataatttgttgattttttttaatttggtatatatttttttagtatttgttttggaggataaattttttgtggattattttattttttttttttttaagatatgttatagtatttttttttgattataatgtatatttagatattaattcgtgaatttaagttttgatttatgataaggttgtttttaatattatttattttacggttgaaataagttagtagtagttaacgttttataatttttaaggtagtgtttattatattagatttcgtaattgtaaaaggggattatagttaggatatttttaatatataagttaaggaataatttatattttgttttatttttttattaatttttgtagaaagttacgtaagtatattagaatagaggttgtaagaaatttttattttaggtttggtataatggtttatgtttgtaattttagtatttcgggaggatgaggtgggaggatagtttgagattagtttgggtaatatggtaaaatttcgtttttataaaaaaatataaaaattaattaggtttggtggtatatatttgtagttttagttatttgggagattgaggtgggaggattatttgagtttaagaggtggaggttgtaatgagttatgatcgtgttattgtattttagtttgggtaatagagtaggattttgataaaaaaaaaagtgtgtgtatatatatgtatatataatatatgtatatatacgtatatatatttatgtatgtataatatatgtatatatacgtatatatatttatgtatgtataatatatgtatatatacgtatatatatttatgtatgtataatatatgtatatatacgtatatatatttatgtatgtataatatatgtatatatacgtatatatatttatgtatgtataatatatgtatatatacgtatatatatttatgtatgtataatatatgtatatatatatatatttatgtatgtataatatatgtatatatatatatatatatttatgtatgtataatatatgtatatatatatatatatatttatgtatgtataatatatgtatatatatatatatatatttatgtatgtataatatatgtatatatatatatatatatttatgtatgtataatatatgtatatatatatatatatatttatgtatgtataatatatgtatatatatatatatatatttatgtatgtataatatatgtatatatatatatatatatttatgtatgtataatatatgtatatatatatatatatatttatgtatgtataatatatgtatatatatatatatatacgtatatatatttatgtgtatatacgtatatatataaagtattttttgttttttttttagtgttagttatcgttataattaagttaggtgatttttttttaagttattgtagtttttaaaattaaagggataaaatgttttattaaagaaagaggaaataaaaatgttaagtggtagttaagaattgtttttaatttaattttttttttatgtttagttatatgaaattaaatattgtggatttaaaggataattatatgaaaaagtttatttggaaaatagaaagtttttggattgtattttaaagcgtggaaagtaatgtgaaatttgaaggtaaatagattttgaatatgtttatttttatgtgttatattgtatttttatagtggagttttttttaaggaattataattgattagatagatttttttaggaatatattagttataaaaggtttttttagatttaaagatttttaagttttttgaattggattggaagtaggtagtgtatagattatttaataaattatattttaaattggatatttgggtagaaaagaaaagatatatttagttttataatttttgtttttgttttgtggttagtatttggatatatgttttatattaaataataaatattaattttttaaaagtgattttatttaaaaaaaaaatggtttaagattgaaatatatttgatgttgttaagcgtagagaaaatggatttttgtatatatattgtgtttgtgtgagtggaaattagaatgtttttgatatatattagataattagtattatttattagaaagtttaaaaagttatatattttttgatttaataattttatttttaggaaatttatttaaggaagtaattggatatagaaatgtatagatatattttattttatagtattggttttttgtatttttcggatatttttttgttttttttttttaatatattgaagatttatgttaattttgtgttgtgtaagtttttgtacgttatttttttaatagcgtgtgtttattttgtatttgtttgttatatttttgtaatttttggaatattttaaattttattatgtttgttatagtgatttgtgattagcgatttttgatgttattattgtaattgttgttttggagtatatgtattatatttatatgagatgatgaatttaataaatgtgagagttttgattgttttattgattagttggtttttttattgtttttttttttaggtttttttatttttttgagatatagtaatattgaaattagattaattaataattttataatggtttttaagtgtttaagtaaattaaagagttatatgtttgttattttaaattaaaagttagaaataattatgtttattgaagaaggtatattagaagttaaaatgggttatttagttaaattgtgaatagaaaggaaaagtttttgaaggaaattaaaagtggtattttagtgaatttattaataagaaagtgaaatagttttattgttgatatggagaaagttgtaatggtttggatggaagattaaattagttataatatttttttaatttaaaatttaatttagagtaaggttttaattttttttaattttgtaaagtttgagagaggtgaggaagttgtaaaagaaaagttggaagttaatagagattggtttatgaggtttaaggaaagaaacgtattttcgtaatataaaagtgtaagatgaaagagtaagtgttgatgtaaaattatagtatattatttagaagatttagttacgatcgttgatgaaggtggttatattagataataaatttttagtgtatatttaatagttttttattggaaaaagatgttatttaggatgtttatagttatagataagtttatttttggttttaaaattttaaaggataggttgatgacgtttttgttaggggttaatgtagttggtgaatgttgagttgatattagtgtttatttatatttttgaaaattttagagtttttaataattatattaaatttattttgtttgtgttttataaaggtaataataaagtttggatgatagcgtatttgtttatagcgtagtttattgaatattttaagtttattgttaagaattgtttaggaaagagagatgttttttaaaatattattgtttattaataatgtatttaattatttaagagttttgatggagatgtttaagaagattaatgttgtttttatgtttgttaatataatatttattttgtagtttatggattaaggagttatttagatttttaagttttattatttaaaatatgtattttataaggttatagttgttatagagaatgagttttcgatggatttggataaagtaaattgaaaattttttggaaaggatttatttttttagatgttattaagaatatttgtggtttatgggaggaggttaaaatattagttttaataggagtttgaaagaagttgaatttgaaagaagtttttatggatgattttgaggagtttaggattttattagaagttattgaagatggtagaaatagtaagagaattagaattagaagtggagtttgaagatatgattgaatttttgtagttttatggtaaaaaatttgaatagatgaggagttgttttttatggatgagtaaatagtggttttttgagatggaattaatttttggtgaggatgttgtgaatattgttgaaataataataaaggatttagaatattttataaatttagttgataaagtagtgggagaatttgagaggattaacgttatttttgaaagaagttttcgtggggtaaaatgttattaaatagtattatatgttatagagaaatattttatggtagtaaattttattgttgtattattttgagaaatttttatagttattttaattattagtagttattaatttgattagttaatagttattaatattgacgtaggattttttattagtaaaaaatattatagttcgttgaaggtttagatgatcgttagtattttttagtaataaggtgtttttaaattaaggtatatatattgtttttttagatataatgttattgtatatttaatagattattgtatagtgtaaatataattttgtatgggaaataaaaaaattgtattatttgttttattatggtatttggattattgcggtggtttggaattgaatttaaaatgtttgagtatgtttgtatatgggaataaaaataataaaggatatatattttagtgtagtataatagtattatttgtttttagatttggaaggtataaagggggttttatatcgtattttacgatttagttgtagtgattagttttgttattttttgttgttttgttattgtttgtttttttttaatttgtatgaattttttttaggagtttatattagatatagtaaggttatgggagttatttttaatttcgggaatattgtattaaaattaaataaattatagtcgggttcgggggttcgtgttttaattttaatattttgggaggttagggtaggtggatcgtttgaggtgaggagttttagattagtttggttaatatggtaaaatttcgtttttattaaatataaaaattagttgggcgtggtggcgggcgtttgtaattttagttattggggaggttgaggcgggagaatttagaggcgggggttgtagtgagtcgagatcgtgttattgtattttagtttgagcgatagagtgagattttgttttaaaaaaaaaaaaaaaaatttaagtaaattatatgttaagtttttttgtagattttttggaattttgttaatgtagtgtagtagtgttggatagattatgtttaatagtagttgtggttagtattttagtgtaataaaataaaggtaaataaattttaaatgtagttttatggataaattggttaaaatatggataaaagtagtgtattataaagtgtaaagttttaaggttaggtagacgtgggttttgattttaattttgttatttattagttgggtaattttaggtaagttatttaatttttaagttttatagttattattttgataagtggtgataataaaatttaaatattatataaagttgttgtaataatttatttttattgtttggtattgttttaagtgttttgtatatattaatatatttaatttttttagtaatttaagtggattttattgttagaattattttatagatgagaaaattgaagtatagaaaggttatataatttgtttagtttataaatggaagaaaagagttaaattcgtattatttaattttagtatttgagtttattattatttattagtattgcgtttttagttagaatagtattttattgtaggcggttattaagtgttatttagaatttttgaaaagaataaaaaggtatttgtagtggtaaaaggattgagtattattgttttaattttcgatttggtgaagtggtagttaggaattttatataaaagtgagataagtaggagaatatgattggaggtttatattttgttttttgaatgatatttgatatatattagaaattttttttaaaagtaattatttaaaatatagttgtggttatatgggttgtgaattgtttttaaatattagtttttcgtttgtaaatattataatggtttagaatttgaggatattttatttgtttatgaaattaatagttttttataggtaaataaaatattatttgtttttttagttattaataatgaaatatagttatttgatttgattgaaggtagaaggatataaaaatatatttttttaattttatttttaatatttaatagaaatttttatattgagtatttggaagtttttatagaattttagatttagaagaaaaaattaagatttaaatggttaagtaatttgtattaaattatatatttaatagtggtatatgattatttgattttttgcgtattgttttttttggtattgagttgttagttatattattttttttagtttaggatattttaaggaattttaataatatggataagttttttagcgatgtttagtgaatatttattgtatgaaaaatcgtgtgttaagtattgcggaaatggaaattaaaatatttagtttaattataggaaataaatatgtaaatagataattgtgatatagaagagtattataattgaggtgtttttttttttttaattttatatgttgtcgttttattagattatgaatttttgaagggatttagttttttttgtgtgttttaagtgatttgtataaataataatatatatatttattgaaggagagaattaggtaatttataatagttatgaaaaagtttaaaatatttttaaaagttttttgtaaataatattaatatagttgatgtatatgaattaaaaagtgatttgtatagataagttatgatatatatgtgtggggtgtgagtgtgtgtgttatttataaaggtattttttttttgttatttttataga

SEQ ID NO: 1842 - DNA, 13573 bp, Artificial Sequence
  chemically treated genomic DNA (Homo sapiens)
tttgtagaaatagtaagaaaaaaatgtttttataagtaatatatatatttatattttatatatatatattatagtttatttatataagttattttttaatttatgtatattagttgtattaatgttatttatagaaaatttttaaaagtgttttgagtttttttatgattattataagttatttgatttttttttttaataaatatatatattattatttgtgtaaattatttggagtatataaagaaagttgggtttttttagaagtttatgatttagtagaacgatagtatataaagttaaaaaaggagaagtattttagttgtaatatttttttatattataattatttgtttatatgtttgttttttgtgattgagttaaatattttaatttttattttcgtagtatttagtatacgattttttatatagtaagtgtttattaagtatcgttaaagaatttatttatgttgttgaagttttttgaagtattttgagttgaagggaatagtatggttagtagtttagtgttaggaaaagtagtacgtaaggaattaggtgattatgtgttattgttagatgtgtgatttagtgtaagttatttaattatttagattttggtttttttttttaggtttaaaattttataaggatttttaaatgtttagtgtggagatttttattaggtattaaaaatagaattgaaaaagtgtatttttatgtttttttgtttttagttaggttaagtgattatgttttattattaatgattggaaaaataagtgatgttttgtttgtttatggaaaattattggttttatgagtagatgagatatttttaaattttaaattattatggtatttataggcgagaagttaatatttaaaagtaatttatagtttatgtaattataattgtattttaaataattatttttgaaaaaaatttttagtatgtgttagatattatttaagaaatagaatgtaggtttttagttatatttttttgtttgttttatttttatataaaatttttggttgttattttattaaatcgaggattaagatagtagtatttaatttttttattattataaatatttttttattttttttaaagattttgagtagtatttgatgatcgtttataatgaggtattattttggttggaaacgtagtgttaataagtggtgatgagtttaggtgttggaattgaatgatacgaatttaattttttttttttatttatgagttgggtaaattatataatttttttgtgttttaatttttttatttgtaaaatggttttaataataaaatttatttgagttattgagaagattaaatgtgttaatatgtgtaaagtatttagaatagtgttaggtagtaagaatgaattattataataattttatgtagtatttaagttttgttgttattatttattaaagtggtaattatggagtttaaaagttaagtaatttatttaagattatttaattaataagtaatagagttgggattagaatttacgtttatttgattttggagttttgtattttgtaatatattatttttatttatgttttgattaatttgtttatgaagttgtatttaaaatttatttgtttttattttattatattaaagtgttggttatagttattattaaatatggtttgtttagtattattatattatattgatagaattttaaagaatttgtaaagaaatttggtatgtggtttatttaagtttttttttttttttttgagatagagttttattttgtcgtttaggttggagtgtaatggtacgatttcgatttattgtaattttcgtttttgggttttttcgttttagtttttttaatagttgggattataggcgttcgttattacgtttaattaatttttgtgtttagtagagacggggttttgttatgttggttaggttggtttggaattttttattttaaacgatttatttgttttggttttttaaagtgttgagattaaggtacgaattttcgagttcggttgtggtttatttagttttgatatagtattttcgaagttaaaaatagtttttatggttttgttatatttgatgtggatttttagggaaggtttatatagattgaaaggaagtaaataatggtaagatagtagaaaatagtagaattagttattatagttgggtcgtaaaatacggtatagggttttttttatattttttaaatttgaggataaatgatgttgttatgttatattagggtatatattttttgttatttttatttttatatataggtatatttagatattttggatttagttttaaattatcgtaataatttaaatattataataaagtaagtaatataatttttttgttttttatataaagttatgtttatattatatagtagtttattaagtgtgtaatagtattatgtttaaaaagataatgtatatattttaatttaaaaatattttattgttaaaaaatgttagcgattatttgagtttttagcgagttataatattttttgttggtagagggttttgcgttaatgttgatggttgttgattgattaggttggtggttgttgatggttgaggtggttgtgaaaattttttaaaataatataataatgaagtttgttattatgaagtatttttttgtagtatgtgatgttgtttgatagtattttattttacgagaattttttttaaaaatagcgttaatttttttaaatttttttattattttattaattaagtttgtagaatattttaaattttttgttgttattttaataatgtttatagtatttttattaggagttgattttattttaaaaaattattgtttgtttatttataagaagtaattttttatttgtttaagttttttattatgagattgtagaaatttagttatatttttagattttatttttaattttagtttttttgttatttttattatttttagtgatttttaatgaagttttgaattttttaaagttatttatgagggttttttttaagtttaattttttttaaatttttgttaaggttgatattttgatttttttttatgagttataaatgtttttaatggtatttagaaaggtgaattttttttagaaagtttttaatttattttgtttagatttatcgggggtttattttttatggtagttatagttttatgaaatgtatgttttaaataataagatttggaagtttaaatgattttttgatttatgggttataaaatgaatgttatattagtaggtatgaaaataatattaatttttttgaatatttttattagagtttttgggtgattaggtgtattgttaatgagtagtaatattttgaaaggtattttttttttttgaatagtttttgatagtgggtttaaaatatttagtaaattacgttgtaaatagatacgttgttatttaggttttgttgttatttttataaagtataggtagagtagatttagtataattattaagggttttaggatttttaaaagtgtaaatgagtattggtgttaatttaatatttattagttgtattagtttttaataaaaacgttattagtttgttttttaaaattttgaagttaggaatagatttgtttgtagttatgaatattttaggtggtatttttttttaataaaaggttgttaagtatatattgaaaatttgttgtttggtgtagttatttttattaacgatcgtagttagattttttagataatgtgttgtagttttatattaatatttgtttttttattttgtatttttatgttacggagatgcgtttttttttttaaattttataaattaatttttgttagtttttaattttttttttgtagtttttttattttttttaaattttatagaattgaagagaattaggattttgttttggattaggttttggattaaggaaatgttgtggttagtttgattttttatttagattattataattttttttatattagtaataaggttgttttatttttttattagtgagtttattggagtattatttttaattttttttaaaaattttttttttttatttataatttggttaaatggtttattttgatttttgatgtgttttttttagtaagtataattatttttagtttttgatttaaagtgatagatatgtggttttttggtttatttgaatatttagaggttattgtaggattattaattggtttaattttaatattgttgtgttttaggggagtagggaggtttgaggagagggatagtaagggaattagttggttagtggagtagttagagtttttatatttattaagtttattattttatatgggtgtggtgtatgtattttaaaataataattataatagtaatattaaagatcgttgattatagattattataatagatataataaagtttaaaatattttaagaattataaaaatgtgatagataaatataaagtgagtatacgttgttggaaaaatggcgtgtaaagatttgtataatatagggttgatataaatttttaatatgttaaaaaaaaaaaataaaaaagtattcgggaagtgtaaaaaattagtgttataaaatgaggtatatttgtatatttttgtgtttaattatttttttaggtaaattttttagaggtagaattgttggattagagggtatgtaattttttaagttttttgatagataatgttggttatttaatatgtattaaagatattttaatttttatttatataagtatagtatatatgtaagagtttattttttttacgtttgataatattaggtatattttagttttgaattattttttttttaagtaaaattatttttgagaaattagtatttgttatttggtgtaggatatatatttaagtgttggttataagataaaggtagaaattatgaagttaggtgtatttttttttttttgtttaaatgtttagtttaaaatatagtttattggatagtttatatattgtttgtttttagtttagtttaaaaggtttgaaggtttttaggtttgaagagattttttatagttaatgtgtttttaagaaaatttgtttaattagttataattttttaaaaggaattttattgtgggaatgtagtgtgatatataaaagtgagtatgtttaaaatttatttgtttttaagttttatattattttttacgttttaagatgtaatttagaagttttttattttttaaataaatttttttatatagttattttttaagtttatagtatttagttttatgtaattagatataaagggaaaattaagttaaaaataatttttgattgttatttagtatttttgttttttttttttttggtaaaatattttgtttttttagttttaagaattgtaatgatttaaggaaaaattatttaatttaattataacgataattaatattaagagaagaataaaaagtgttttgtatatatacgtatatatatataaatgtatatacgtgtatatatgtatatatatatgtattatatatatataaatgtatatatgtatatatatatgtattatatatatataaatgtatatatgtatatatatatgtattatatatatataaatgtatatatgtatatatatatgtattatatatatataaatgtatatatgtatatatatatgtattatatatatataaatgtatatatgtatatatatatgtattatatatatataaatgtatatatgtatatatatatgtattatatatatataaatgtatatatgtatatatatatgtattatatatatataaatgtatatatgtatatatatatgtattatatatatataaatgtatatatatatatatgtattatatatatataaatgtatatacgtatatatatatgtattatatatatataaatgtatatacgtatatatatatgtattatatatatataaatgtatatacgtatatatatatgtattatatatatataaatgtatatacgtatatatatatgtattatatatatataaatgtatatacgtatatatatatgtattatatatatataaatgtatatacgtatatatatatgtattatatatatatatatatatatatatttttttttttgttagggttttgttttattgtttaggttggagtgtagtggtacgattatggtttattgtagtttttattttttgggtttaagtgatttttttattttagttttttaagtagttgggattataggtgtgtgttattaagtttggttaatttttgtatttttttgtagagacgggattttgttatattgtttaggttggttttaagttatttttttattttattttttcgaagtgttgggattataggtatgagttattatgttaggtttaaaataaaaattttttatagtttttattttagtatatttacgtggttttttataggaattaatgaagggatggaataaagtataaattgttttttaatttgtatgttaagagtgttttgattgtaatttttttttgtagttgcgaaatttagtatgataagtattattttaaagattgtggaacgttaattattgttaatttattttagtcgtaaaatgagtagtattgaaagtagttttgttataaattaagatttaaatttacgaattagtatttgggtgtatattataattaaaagagaatattgtaatatgttttgggggagggggaagtaggataatttataaaaagtttgttttttaaggtagatgttaaggaggtatgtgttaagttaaaagaagttaataagttatgttttaaatgagttaattttaagttaattgaaatttatacgagtaaatatgtaatttattgaagtaaaattatgtaaagaaaatatgagaaattatttttaatgtgttattagttttagaaatagaaattgtttattagttttttaatttttaaagtgtgaagatttataaatgtattttaatggttaagagatgttgtaaaatatttaattgttgtgttttaattttgaatttaaatttaaggggtatttttttttttgggtattatttattttgttttaggaggtaaggatttgaatttttttttaaatttaagtgtttaaaagtttatcggtattatatgtttaaatttattatagagaagagtttatgttataattttgaaatattgtggtgtatgtaggttgaaattttgatgtgattttgtatttattatatgtcggatttttttttagagttataaaagaggttatattgtttttgtttatatatttaattttaaaatttgaaaagttttttttttttttttagtaattaaaggagaatgaatgaaatgatagcggttaagtttataaggttaatatagaatttttttattagtttttttcgtttttatatggaatttgtgtaataagatatttagtaatagtaatttgtttttagagaaagaaataattaaatattatatagcgaagttgttaatattttatttaggtgttttttgtttatatttaagatagttttaatttagttggagttttttttaagttaaatattaggaatagttttattaattcggcgtttggaataatcgttcgaattatcgagtttaggggcgggggagaaaatattcgtgttatttgagtttttttttttttttaaattcgttgtttgagatttttatagagtttaatagggaatttaaaaatagtttttttatgatagtgatagtcggagtcgttaggaacgtaaaggattttttaaaaatttaagtaggtgtttgttttaaggagcggataattgtaggaggtaatttttttatttgggaaggggaaaaagcggagttgaggggagcgaggttgagtaaggcgacgcggggttttttagggggtggaatgagcgaggaagaggaggtttggggagtagaggttaggggatagggaacggtgttttcgatttgtgggaagcgtggggatagaggttgcgtttcgatttgtaggaagcgaggggtagggaacggtgttttcgattagcgggaagcgagaggataggggcggcgttttcgattcgtgggaagtaagcgggtaggggcggcgtttttgatttgtgaaaagcgaagggataggggaggcgttttcgattggtgggaagcgaggggatagggattgcgttttcgatttgtcgagagcgaaggggcggggggcggcgtttttgatcgttgggaagcgaggcggcggtcgttaggaggaggcgtttgaaggagatttatcgttttagtgcgcggggaggtcgaattaggagggtagggtttttttattaatcgtacgatttcgtttagttaaggcgttggtagaggacggatatagatattgcgcgtcgagacgaggttgtttggacggtaaattttggatttagtgggagttttcgttattttcgttggtcgttcgtaggttaagttttagttgcggacgttattgttttcgttttttttgttggttgcggggagcgaggggtagggagcgcgtcggggaggagatagagcggtcgagttcggagagagtgttttttggcggtgattttttaggcggattgtggcgcgggtcgggcggcgtttttagtttcgtagtttggttttttttttgttcgggtgttttatttgggaattcgttgtatcgtatagtcgaattcgagtgtgttaatgggtgtgtgttggaatgaggatggcgacgagaagatttttttcggaataatttaatttggtgagtagtggcgatagtagtaattttaaattgcgtttttatagtatttttttttaagtaggagaaaattttagttgggttagatcgtttgatttttaggaatttttaaatttttttttagttttattttttttgtttaggaagtttttgcgatttatagaattttttattattatttgttttttttttttattcggtttaagggagttagtttttgttttaaatatttttttgaattttttgttaagaatattagcgttttgtttttttttgttatgggaaaattattttaaattttttgtttaattggttataaacgtttagagaatgtattacgcgttttgttggagaagtataaaagagttttatttatttttgtatatttggtttatcgtttattttttaggggaggttttttaggatagtagttatgcgtatgtattttgaagttagaatgtttggttttaattcggttttttttataataaatgtgtgatttaggtaaaatatttaatttgtatttgttttagtttttttatttcgtattaatatggggataataatagtatttattttatagggttgttggaaggatgagataaaatatgtaaagaaattatttaaaattatttggttaggtataaataggtttatgtttataattttagtattttgggaggttaaggtaggaggattatttgaggttaggaatttgagattagtttgggtaatatagtgagattttatttttatataaaatttaaaaattatttgggtgtggtggtgtatatttgtagtttcggttattttggaggttgaggtgggaggatggtttgagttttggtagttaaggttatagtaagttatgattgtattattgtattttagtttgggtgatagagtgagattttgttttaaggaataaacgaataaataaataaatttaaaattaggatatagtatgggtttaataaatgttattaatattatatgttttattttttggttgttaatatttattaaaaatgtttttttttttaagaagaatttattattggtttttaggttttgttaatttttttttaaaagattgtattttgaaatatttaagatataaaaagagtataaatatttgtgtgtttattatttagttttaaaaaataaaatattgttagtttttgtgtatttttttttagaagttttttttaaaaattaaattttttatgggatggaagaaaagattattatatgaaattgagagttggagaaaaggaagagtaagagaattagagttttttttattttttagtgtgagttttggggtaggttatataatttttatgaattataatgattaaaaattataaaaaaggggataatgtttattttattaggtttttgttagtataaaataataaaaatttattgtgagagattttagtattaggtttttaaaaagattaggtgttttgtgtatgtttttttatattgtttttataagtgtttttaaggggtttttttttatttttttaaatttaatttatttaatataggagagagttttagtgtttatttatgttttgggtatataggaaatttataaatattatttttttttgtaattaggtagggttacgtgattagttttggtttgtgagttatgacgagaaggatgtatattatttttaggttaaagcgttttatttttattgtaagattgttttttttgtgtgtaattaaggagtaaagggtaattataagagggaagagatgtattatttagttgatgtatgaagggtagttgttttggaaagttaatttatttgtattggatttacgagagtaggaaataaacgtttgttattttaagttattgagatattgggattgttttttttgttgtatagttaagtttattttatgtatagtttttttttgaatttttttttgatattcgaaataagaaagttaaagttttatttttgtttttgatttttattgaaattgggatttggttagatgtttttatttatagagttgtaatgaaatttattttgttttttttttagagttgttatgagtttaaatgaggttatatggaaagatattttgtaaattaggaagttttacgtagatggaaataattgaatatttttattagtaaagttatttatatatagtaattataatgattaggttttttgaaaagttgttattagattggtgtaaaaataattgtggtttttgtttttatttttaatggaaaaaatgttaattatttttgtattaatttaataatttaaaatattttgtttagttgtttttataagtaaattaaatatgaataaagatatagtttttatattttttatagttttaatgcgttttttaaattttatgcgttggaaatttgatttttaatgtggtggttttgggaggtgggatttaatgagaggtatttgggtcgtggaaggatattttttatgaatggattaatgttattattatgcgagtgaattcgttattttgggagtaggttttttataaagggataagtttggtttagtttcgtttttttttttattttttttttttttgtttttattttgttttttaatataggatgatatagtaagaaggtttttgtaagatattagttttttgagtttggattttttagtttttagaattaagttagtaaatttttgtttattataaattatttagttagtgttatgttgttatagtagtatagattgaattaagataatattatttttgggttgttgttttttatattttatttgaaaaatgaaataggaaatagttttatatagttgaaggtagagttgggaaggtaaaatttttttaaatatttggaaataagatggttttttataagttgaattataaaattatgatataatttattagtttaaaatatatttattgaataattattataagtgtgtgtggtagtttgttttgaagatggtatttatgtttacgtgtagtttgtttttataatatatagggttgttttatgtaatagtatattagtttgtttttatatagttgataaagatatatttgagattgggtagtttataaagtaaaagaggtttaatggatttatagttttatatgattggggaagttttataattatggtggaaggtaaaaggtatgttttatatggtagtagataagagagagaatgagatttaagtgaagggggtttttttttataaaattattagattttgtgagatttatttattattataagaatagtatgggggaaattgtttttgtgatttagttattttttattgggttttttttataatacgtggaaattaggggagttataatttaagatgagatttgggtggggatagagttaaattatattaaataggatattgtggaaatgacggaatgtgtttttttagattgggttatagaagatattgtagtttttgttttgtttttttttatttgttatgagggaaaagttttgttttgttttgaggatatttaagtagttttttagaaaggttgttgagtaattgagtttttttgttaatagttagacgattgttgaggttttttgttaaagttttgtgagtgagttattttggaagtggattttttagttttagttaagttattagatgatattttgattgtaattttataagagattttaagttggaatttataaaaattgtgatataataaatgttgttttaagttttaaagtttgggtaatttggtatatagtaatagataattaatagaatgtgttaggtattgtttttagtttaggagatatagtagtgtagtagtttttaaatattttggaattagggagtggatttttggaagatagtttttttatagagtagagtggggtagagggatggttttgggttgatttaagtgtattatatttattgcgtattttatttttattattattatattgtattatataatgaaataattatataatttattataatgtagaattagtgggatttttgagtttgttttgttgtaattagatagttttatttgggggtgatgagagatagtggtagattattaggtattaaatttttataaggagtgtgtaatttagattttttatatgtgtagtttacgaaagggtttgtgtttttgtgagaatttaatgttatagttgatgtggtaggaggtggagtttaggtagtaatgtgaggatggggagtggttgtaaatatagatgtagttttatttttttatttattatttatttgtgaaggagagatttaaattaaatatttgagtgatggtttttgtatgtaaagattttttagtagagtggtttatgtagagggaatatttattgtaaaggttttaaagttgaaataagttatatttataatttagagttttaaagttagtgtggttgaggtagggagaaggaattaaagtagtaggttttagattagagtgggtatatttttgaggggatataaaattttttagaaggtgtttgtgtttagttgttttaaggaggtgatataatttggggagattgtgtgtttagagaagaaacgtaatttggtatatgcgatttggataaaaatatttgagagttagaatttggggggtgttagaagtaagaataagaatgtagatacgttaattttttatgaaag

SEQ ID NO: 1843 - DNA, 5511 bp, Artificial Sequence
  chemically treated genomic DNA (Homo sapiens)
agggttgtttgatttgataattattttttttttaattaaattgataaaaataagtaatggggaaaagattttttgtataataaatggtgttgagataattggttagttatatgtagaagattgaaattggattttttttttatattatatagaaaaattaatttaacgtggagatttttttattatattatatagaaaaattattttaacgtggattaaagatttatatgtaaagtttaaaattgtaaaaattttcgaggataatttaggaaatattattttagatgtaggatcgggtagagattttatgacgaagacgataaatggagttttaataagaataaaagttgataaatgggatttttaattaaagggtttttgtattatggtttagaaattttttttaggtagtttttttttgtttgttttttatttttttaggatcgtgtatttttgttatttgatgtaataggaaaagaaattattaatataataaatatataatttatagaatgggagaaaatatttgtaaattatgtatttgataaaggtttaatatttagaatttataaggagtttaaataatttataagtaaaaattgaagaatttcgttaaaaagtgggtaaaagatataaatagatattttttaaaagaagatatatatatggttaataagtatatgaaaaaatgtttatattataaattattagagaagtgatattattttttaatagaaattgaagaggttaagtatgttaatgttatatggtaagtaaatggtagggttaaaattttattttaggttagtttgatattttgttagatgtggttatgttttttagagttatttttttatatgtgtaaattttatttaatattttaaaattttttaaaaatattttgaattatatattttgttttaaataaaatttttagatgaggaataattttatatatttttatatgaatatttaggtaaaatttgaagtttttaagttttaaataaatttttatttttaagatttatttagatgatgttagagtgttttttgaatttggttttttttattttgtatttattttttattaatattaataaataaatattaataaagaatatatttaaaaggtaattttattttgaaatagaagagaggaaaatgtatgttttaataatgttagtttttaggtaaagatattgtgagtttgtttgtttaaatatattttatttggaatttagtatgaatttttaatagatgttttttagataagaaagtagtaaattaaatgtaattgtataaataagaagattagagggattattttgaagggtataaaatgaattaagagtttttagtttgggttattatagtatttgtttattaatgtaaagtaaggtaggtgtttatagtgagaaggttttgtgaaatgatatgtttttaagttatttttttttatttttattattttattattttttagaaagtggtaaatgttgaaagataatttgttttaataggttgtaatattttaaattattgttttaaattgtttagtagtagatggaggtgagagaattatttatataaggataaggaaaaaatttattgatttaaagaaagagaaataattgattagttttttaatgaaggatatttgatatttatggtttttttttgtttttattttgatttaaatattgttgtttatttaatgatgtgtgtattaaatttttttaattattgtattaatggttattttttatgaaaatgtattttcgggaatgttagagtaaatttatttttgagtatttgttggggtaatgtattttgtattataagttttttttagttatttaatagttaaattttttttgatagtgtttaatatatatatagttgttgtatagtatattttgttttttagaaaaatatattgttttagtgaagttttaggattatttataggatgggtaattagttttttttatagtaagggatttggagagtaaaaattaatgaaggaaattagtagagtagagaggaaagtgtttattaagaatgaagtattgggagtaaaaataagagaaaaaaagagaggaaagaggtaaaggaaagaatatattttggaataagaaaatacgtttaaagtagggatatatatgtttatgtatttgaagaaggtattttattatttaggttttgtttgaaattatgttttttatgtttaggtatttaataaattatttatggtgattttagaataagtaattaagtggtaaagatgagaatttagatgataatgaggaagaaattgtggtatattatagaggaagggattaattaacgcggatttgtatagtgttatatagttatgtgattttttttatatagagagttaagtgttttatatgtattgttttattttttttatgattttaggaagggatatatggaaaaatgaaggtataaagatattaaattgtttagttgtatataattataattaaatttttaagtagaatttagattattaatttttaattaattaattagatttgatattaatttattatatagaattatagattatttgtgttgcgaagatttttatgattattttttggttttaagttttgtttttataggtgagaaagttgaggtttagaaagattttgtgggtgaagttttattattcgtaataaagaagtaaaggaaaagaaaagtttttgttttttttatgtttataaagttgtatagatattgtggttggtaatttagtatttttattttttatttttgttagtttagagttttatatttataggagaaattttaaaaaaatatagagtatttatagttagtatgataataggaaaattaaaataaatttttattttatattttaaaaagggttaggtgtatttgttattttttattttgtagatggggaaataatatttaaatagattatatattttagttaagtttttatagatttatggaagaattttgttttttaatttttagattaatatttttattattaggttattatattgattttatatagaattatagagttaaaagttaaaatatgtgaagttagttgttttttatagaaaaaatttagtagttggttgtttaaataagtaagaattataatggttatgatgggtaagtattttatataatttattagttagtaattttaagattttatagaggattattaagttttgtatttttaaaatattggaagtaattttgtattatagagggagtttatatttgagaagcgtttgagaaagttagattttatgagtaaggaatttgtatgtttttgttttttaatttaaatattaaataaatttttcgtggaatgtttgaatatgtaatattttatttaaaagaatttgtgagaaaaatttttgttattttaatttttaaaagttaagtttttttaaaatgggttagtttatttttttgtgtaataagaagtatagtaaatataaatttttgataattgtaggttttaaagttttaatttggatttttttagagtattagaataatttgcgtttttattatttgtgtttatattagtttttttattggatagttagttttttaggtaaaggatcgtagttttttcgtttgtgtttgttagtgtttggtttagatgtttaatatatgtttatttaatttatttataatttttattttaggaatagaaggttgattgaaatgattattgatttttggaatttgatatttaaaataaatttttggtaatttgtgtaatgtggtttttatggttttttataagttgattgaaaaaaaaattttggttaattaaggtcgaatttatgaggttttagtttatagaggttttagtgtatatagtttaaagatgttgttgggatataattgatagatttggggaaattttggtatttttgattattgaataaaatatttagtaaattatattttatttaatagaataagtaaataagtttatgtttatagattataatattattttattaaggtatatattttttttattgataatgatatttgagaaggaaaaaaatttaaatatatttagttagttgtataatatttgtaagattaaaaaaattttttttaatttttaaggtgattaatttatatttaaaagtttgaaatttaattatttttttttagtagtagatttaaaataattatgttataatattatttagagggataatgatattaatattaatattatattaatattatattgatatgatatatttaatatgatattatatttaatataattatatttaattaatatatattgataatgatatttaattgatattgaataagttttttattacgtaggttttattgagatgtatgttttgtttttgtttgaggtattgtggattttttatttttttttatgtatttaaaaattatttaatatttttggttaatttataatggagttgttatttttgattgtatttttttaattgtgttaattttttttttttttttgtttgttaatttttttgagaataaattatatatttgttttgtgtaaaataatttttaatttgttttagttgtatatatttttattttaaagggatattttaagggtttggaagtgggattagggggtttttagatttttgagttagttttttaatattagttgtaattttagttgattttttttggattttatttttttggtgttttttttgattaaatggtagaattataagtatgattatatgtattgggatggtattgaagtttggttatatttttttttggtttttttgttttttttgattttaataaataggttttttaattttatttttgatttagtatgattgttttttttttgatgtttatgttttttggttttatatgtgggtaagcgatgtttttttgtattttaattgagtatataatgtatatcgaaaggagagagtgtgtttattgtttaattattaatattattatttgtgttggatattgtatgatacgggtatgtagtttatgttattttttttggttgtaaattatataagttttgaagaagtttatttttatatagaaaggaaatgaaataaattataattttattttttaaatttaatggttattggttttttagaagtagagtatataggttataatattatgtgaatttatttagtataatggatacgtataattttataatagttttgtgttttagttttatttaaattttattttgtttttatgattaacgatgaaagagaggagggttttatttttgtttttgtagaatttaacgtggttaagttggtattggagaatggggttaagtaatttttttttagttgtatttgtgatgaaggaatataagtgaatttatttttatgtttttattatttatatgttttttaaagttttgttatattatgtttttttttttgttttttttttagg

SEQ ID NO: 1844 - DNA, 5511 bp, Artificial Sequence
  chemically treated genomic DNA (Homo sapiens)
tttggggaaagaatagaaaagagagtataatgtgataggattttaggaaatatatagataatagaaatataaaaataaatttatttatatttttttattataaatataattgggaaagaattgtttagttttattttttaatattaatttaattacgttgaattttatagagataaaagtgagattttttttttttttatcgttgattatgggaataagataaggtttaagtaaagttgggatataaaattgttataaaattatgcgtatttattgtgttgagtagatttatataatattgtaatttgtgtattttgtttttaaggagttaataattattagatttgggaaatgaggttgtgatttattttattttttttttatataggaatggatttttttagggtttatataatttatagttaaaagaagtgatatgaattatatattcgtgttatataatatttagtatagatggtggtgttgatggttaggtaataagtatatttttttttttcgatgtgtattgtatatttagttggaatataaaaagatatcgtttgtttatatgtaaggttaaaaagtatggatattagaaagagagtagttatgttaaattaaagataaaattaaagaatttatttgttaaaattagaaagggtaaagaaattaagaaaaagtataattaaattttagtattattttaatgtatatgattatgtttataattttattatttggttaaggaagatattagaaagataaagtttaaaaaaggttaattgaaattataattggtgttaaggggttaatttagaaatttaggaattttttgattttatttttaaatttttaggatatttttttaaggtggaaatatgtatagttgggataaattaaagattattttatatagaataggtatgtaatttgtttttaaaaagattaataggtaaaaaaaaaaaaaaggttgatataattagaagaatataattaaggatgatagttttattatgggttagttaggaatattaaataatttttggatgtatggaagaaaatagaggatttatagtgttttaggtagaaatagaatatgtattttaatagagtttgcgtgatgaagaatttgtttaatattaattggatattattattaatatgtattgattggatatagttatattggatatgatattatattggatatattatattaatatgatattgatatgatattgatattgatattattatttttttggataatgttatgatataattattttaggtttattattgaggaagggtaattaaattttagatttttgaatgtaagttgattattttgaagattaagaagaatttttttaattttataaatattgtatagttagttagatgtgtttggattttttttttttttaagtattattgttagtaaagaaaatatatattttaatggagtagtattgtggtttatgaatataaatttgtttgtttgttttattaaataaaatataatttattaaatattttgtttaataattagaagtattaagatttttttaaatttgttagttatattttaatagtatttttaagttatatatattaaaatttttgtaaattgaaattttataggttcggttttggttaattaggattttttttttaattaatttataagaaattatgaaaattatattatataggttattagggatttattttaaatgttaaattttagagattagtggttattttaattaattttttatttttagaatgagaattgtagataaattagataaatatatattgagtatttgaattaggtattgataaatataaacggaaaagttacggttttttatttaaagggttgattgtttagtggaggagttaatatgaatataaataataaaaacgtagattgttttagtgttttgaaagagtttaaattaagattttaagatttataattattaaagatttatgtttattatattttttattatataagaaagtaaattaatttattttaggaagatttaatttttaaaggttaaaataataggggttttttttataaatttttttaaatgaaatgttgtatatttaaatattttacggaaggtttgtttggtatttgagttaaggagtaaaaatatataaattttttatttatggaatttggtttttttaagcgttttttaaatgtgagttttttttatggtatagagttgtttttagtattttagagatatagaatttgatgattttttgtaggattttaaaattattaattggtaaattatgtaaaatgtttatttattatggttattatagtttttgtttgtttagatagttagttattgagttttttttataggaaataattaattttatatattttaatttttagttttataattttgtataaaattaatgtggtgatttggtgatgaaaatattggtttaaaaattaagaaatagaatttttttataaatttatgagaatttgattaaaatatataatttgtttgagtgttatttttttatttgtaaaatagaaagtgataagtatatttgattttttttaaaatgtaggatgaaaatttgttttggtttttttattgttatattaattatggatattttatatttttttgaagttttttttataaatgtagaattttaaattaataaaagtagaaaatggaagtgttgaattattagttatagtatttgtataattttgtgggtataaagaaagtaagaatttttttttttttttatttttttattgcgaatagtaaaattttatttatagaatttttttgggttttaatttttttatttataaaagtagggtttagagttagaagatgattatgaaaattttcgtagtataaatagtttgtaattttatatgataaattagtgttagatttgattgattgattaagagttagtgatttaaattttatttaaggatttaattgtaattgtgtgtaattgagtaatttaatatttttgtgtttttatttttttatatgtttttttttaaaattataaaaagaataaaataatatatgtgaaatatttggttttttatataagaaagattatatagttgtataatattgtataaattcgcgttagttaatttttttttttgtgatatgttataattttttttttattgttatttgggtttttatttttgttatttaattgtttattttgaaattattatgaataatttgttgggtatttaaatatagaaggtatggttttaggtagggtttaaataatgagatgttttttttagatgtatggatatatatgtttttattttgaacgtatttttttattttaagatatgtttttttttttgtttttttttttttttttttttttttatttttgtttttaatgttttatttttaataaatatttttttttttgttttgttaattttttttattaatttttattttttaaattttttattatgaaaagaattaattgtttattttatgaataattttggaattttattaaagtagtatatttttttagaaagtaaaatgtattatatagtagttgtgtgtgtgttgaatattattaaaggaggtttagttattaaataattaaaaagaatttataatatagagtatattattttagtaggtatttaaaaatgaatttgttttaatattttcggaagtatatttttataaaagatggttattagtatagtaattgagaggatttaatatatatattattaaatggataataatatttaaattaaaatgaaaatagaagaaagttatgaatattaaatattttttattagggaattaattagttgtttttttttttttaagttaatgaattttttttttatttttatgtaggtagtttttttatttttatttattattaaataatttggagtagtaatttaagatattatagtttgttgaagtaaattattttttagtatttgttattttttaaaaaatgataaaatggtgaaagtgaaaaaaaatagtttaagaatatattattttatagagtttttttattatagatatttattttattttgtattggtgagtagatgttgtggtgatttaaattaaaagtttttggtttattttatattttttaggataatttttttgatttttttgtttatataattgtatttgatttattgtttttttatttgaaaagtatttattgaaaatttatattgaattttaaataaaatgtatttagataaataagtttataatatttttatttggaaattgatattattaaagtatgtattttttttttttttgttttaaaataaaattattttttaaatatattttttattaatatttatttattaatattaataaaagatagatatagaatgggaaaaattaaatttaaaaaatattttaatattatttaaataagttttgggaataaaaatttatttggggtttgagggttttaagttttatttaaatgtttatgtaaagatatataaaattattttttatttaaaaattttgtttagaataaaatgtgtagtttaaaatatttttgggggattttaagatattaagtaaaatttatatatgtgaaagaatgattttgaggaatatggttatatttgataggatgttaagttgatttgagataaaattttggttttgttatttatttgttatatgatattggtatgtttgatttttttagtttttattaaaaggtaatattatttttttaatgatttgtggtgtgagtatttttttatatgtttattggttatgtatatatttttttttgaaaagtgtttgtttatgttttttgtttattttttaacggggttttttagtttttgtttataaattgtttaagttttttatagattttggatattagatttttgttagatgtatagtttgtaaatatttttttttattttgtaggttgtgtgtttattatgttgatagtttttttttttgttatattaggtaataaaagtatacgattttagagagatgggaaataaatagggagaaattgtttggagaaagtttttgggttataatgtagaagttttttagttaaaggttttatttgttaatttttgtttttgttgaaattttatttgtcgttttcgttatgaaatttttgttcggttttatatttggaatgatattttttaggttattttcgagggtttttatagttttaggttttatatgtaagtttttaatttacgttgaggtgatttttttatatggtgtagtgaagggatttttacgttgagttgatttttttatatggtgtagggaagggatttagttttagttttttgtatatggttagttagttattttagtattatttattgtatagggaattttttttttattgtttgtttttgttagtttaattgaaaaaagaatgattgttaaattaggtagtttt

SEQ ID NO: 1845 - DNA, 6270 bp, Artificial Sequence
  chemically treated genomic DNA (Homo sapiens)
atttataattaaagataaaaagaaaaataattttttattgagaaaagtattaatattttttttgtgagataattttaattagtttaataagtgtaataattggaatgtttaagggagaggaaagtgataagggggaaaattatagatgtagaaatggagaaataatggttaaaaattttttaagtttgatgaaaattataaatatataaatttaagaattttaaaatattttaagtataggaaatttgaagaaaagtatattaaggtatattatagtgaaattgtttttaataagtgataaaatttgaaaagtatttcgagtaagaaaaaaaaaaaaaaaaaagtagattataaaggagtaaagaaaattttgatataagatttgtttttgtaaataatgtaagtaataagaaaatgaagtaatgtttttaaagtattgaaagttaaaaataatgttaatttatgattttatatttagtgatgatatttttttttaaaaagaagataaaagtaatatttttttagatatagaaaagttggaataatttataattagtagatatgtatgataaaaaaattaatgaatgttatttaagtaaaaggaaagtgatagtagtgaaaaatatggattaatattaaggaatgagaaagattagaaggggtaattgttttattatttgaatttttttaaaagataataatattgtattatgggatttataatttatgtatgagtaaaatgtatggcgatggaagtataaaggttaggtaggagaggagaaatggagtataaataagtatttaataagtatagtgttgaagggtttttttaaattaagtataaattggtataatattaattgaatgtggattatgataatttaaacgtatatgttataaattttaaagtaatgagtataataattagagttatagttaagatttagtaaagaagataaaacggaattataaaaattttttaatgattttaaatatatgtttaaaataaaaggagaattggattaaataataatggagaaatagaaaattaatagtaagattatttatttaaatgtaatgtgaataatgatattaaatgtaaatgatttatataaattaaataaaaggtagagacggcgagattgaaagtaagatttaattttatgttatttataagaattgtatatttaatataaaaatttaaagaggttaaagtatgaaaaaattatattatgataacgttgattaaaagaaagatggattggttttattaataatagaaaagtagattgaagagtaaaggatattataaggtataaagaaggttatttaataataatgaagagaataagaaaataatagttttaaatacgtatttatttaataatagaattttaaaatatatgaattttaaattgtatgaagaaaaatttgatagaaatgtaatgagggggaaaaaaaataaatttttaattgtagtaaaaaattttagtatttatgttttaataattgatatgataagtagattttaaagttagtaaaaatataaaagatttaaataatattattaataatttgatttaattatatttgtagaatatataattttataaaagttgattatttatttttttttaagtatatattgaatattttattaagattgattatattttgaattataaaatgagttttattaaatttaaaagtgtttaagttatataaattattttttttgtttataatagaattaatttataaattaataatagaatatttgagaattttttaaatatttggaaattaaattatatgtttttaaagaattaaggaagaaatttaaaagaaaaattaaaaagtattttaaattgaatataaatgaaattataagatatcgaaatttgtgggatgtttttaaagtagtatagggaaagtttatagtattatatatatataatattataaaagaaaaatggttttaaattagtgattttagttttaagaaattttattttaagaagtaaagaagagttaattaaattttaagtaggtagagtaataaaataataaagattagagtatatattaatgaaatagagtataaaaaaaaatagagaatttaagaaataaaaatttgtttttttgagaatatgaataaaattgataattttttggataaagtatttaggtgaaaaaaagaagatataaattattaatattaggtatgatagagttgatattagaatagattatataaatataagaggataagagaatattatgaataaatttatgttaataaatttaataatttagatgaaatagataatttattatatgatataaattgtttaggttattttaagaagaattatatgatttgaatagttttaaatttatgtttagaaattggatttatagttaaaaattttttaataaggaaaatgtaaggttttaatagttttattggagaattttattaaataagtaagaaaggaatgatattagttttatataaatttttatagaaatttaaagaggaaggaatattttttaatttattttgtgatggaagaattaattgtttttatattaaaatttgataaagaagttatagaaaagaaaataatagattattattttttgtgaacgtttatgtaaaatttttaaatagaattttagtaaatttaatgaaggagtatattaaaaagatgataaatacggtcgggtacggtggtgtatgtttgtaattttagtattttgggaggttggggcgggcggattacgagattaggagttttagattagtttggttaatatggtgaaatttcgtttttattaaagatataaaaaattaatcgggcgtggtggcgggcgtttgtaattttagttattttggaggttgaggtaggagaattttttgagttcgggaggcggaggttgtagtgagttaagatcgtgttattgtattttagtttgggcgatagggcgagatttcgttttaaataaataaataaaaaaaggataaatatattatgattaagtgagatttatttttgtaatttaaggtgggtttaatattcgaaaatcgattattatgatttattatattaataaattattatggaattattattacgaataagatttaaaatagttttattatttataaaattttttggtgtttatttgtagttagttttattttaggtttttgtaatcgttgattttttttttgtttttatggttttgtttttttgagaaagttatataaatgaattattaatatgaataattatatataaatacgtaatattttgagtttggttttttttatttaatattatgtatttaagatttgttttataataatattatggtaatttttaaaaaaataataataaaagttcgggtgcggtggtttaagtttgtaattttagtattttgggaggtcgaggcgggcggattacgaggttaggagatcgagattagtttgattaatatagtgaaatttcgtttttattaaaattacgaaaaaattagtcgggcgtggtggcgggcgtttgtagttttagttattcgggaggttgaggtagtagaattgtttgaatttcggaggtaaaggttgtagtgagtcgagatcgcgttattgtattttagtttgggcgacggagtaagatttcgttttaaaagaaaaaaaaaaagaaaagaaaatttgtgtatgttgtattagtagtttatttatttttattgtagaatagtattttaatgtggaggtattagagtttgtttatttattatttagtcgcgagatatttggttcgtttagtggttatgaataaagtttttgtaaaatttggaatatatatattttaaatgtacggtttaatgaattttgataaatgtatatatttatttaatttttagtttaattacgatatggaaattttgtgtgtttttttttgtttttttttagttaattttttttaatttttattttgatttttataattataatttttttttttttgttttagttaagtttatataaaaggaattatgtagtatagaaggaattgatattttttttattttaagaggaataagtgattgaagatttttaagaaggaaataggtataatttgatttatgtttgtaatgatttttttggttattgtgcgaagaatggtgagtatgttatttaagtattatttttttttttattttttagggggaatatgatttaatgaaatttttgggtcgattagaatttttatattggatttattattaagggaatttggaattatttttgttattttcgattttttttagtagatggttttaaagtttagtttttgaattgtttcgcggagtcgcgggttgtaacgtgaggcggtcgttgttagtcgatttaattatcggagtggtttttgtagttggatagtaacgagaattttttaggggtgtagggcgacggtttcggtcgtatcgcgggttagttagggttgcgtgttcgtttttgatttttagtagaggtgtttttggttaggaggagttgaagttttgtaggatattggttcgttcgcggatagtttatttcgcggggattttttttggataaggagtgcgtgcgagtggtttttaggtagatagggtgtttagaaggttatacgttagggaaggtggttttttggatttaaagaggaggaaaggagggggtatttaaattaggttttggagagaattaatgggaggggcgttcggggtgggggggcgggttggaaaatagaggggatagttaggattggtgttgggtgttagggaatagacggagcggattgcgtgggtttagttaaggaaagtgaagtaagtagatttgtttgggttaaggttgtttagggaagcggagtatttaagtgtttttttttttttttttttagttttttttatagtggtgaggttatagttttttggagttttttttttttttatttttttcgttttcgggttttttttggtttggggtaattcgaggtgtagagttgagaatgaggcgatttcggaggatggagaaatagtttcgagtttcgtggaaaatgaggtcggcggatttgttgtagttggtgttgttgttcgatttgtttagggatttgggcggaatggggtgttcgtttttattttgcgagtgttattaggaggaggattttagagttatttgtaaggatatttaacgtatttttagtttatcgtttagtacgtagattttgtgagtattcgggagagattagggtaggatttagagattaagggtatttgtagaggtggttcgaagtgtataaaagtagtttaataatagttcgaagtagtgtgtgagtgtgtgtatgtgtgagtgaatgtttgtgtgtgtagatgtgtgtgtgtgttaaaaatttaatcgtttatatttgggaaggtattattgttgatatttttatttttaatataggaaaatgttataaaattttggtgtataatgatcgtgagagttgttttttttaataagttgttatttagtattttgtttaattttggttgaatttgttttatttgaattaataaggataatggtattttaggaattgatttttttgattttattttgggtaataaaaaattgtaaaaatatgtattttttttttttgtttttttagatgggaggttattttagtagttttgttgatttattaaattgttgataaaggtttaagtaggggttttttttaaaatgaattgtttatatagtatttgtaagttatttatttaaatgtgaattgttagtgaaatagtacgtttagaattttgttttgtgatagaggtataaagaaatgaaattttataaaagtatagtatatttatttgtatgttaaatgttattagattagaaatttgatgttaaataagattatatatatataatttgttttttaatagtaatttaaattagtgattattgaaattgtagataaaattaagggaataaagtttgttttgattagttaaaaagagaatagaaagaaaggatagtaaaataatttaggttggttaaatttagttaagataaaaaaaaatgtaggttattaaagaaaatgttgatagatgaaaagaaatgggaaagttgtatttttagatttttttaagaatttagtttatgaagattatttaatagtagatgaatatttgagtatagagatatatttttgtgtttagagatattttagtgttttagta

SEQ ID NO: 1846 - DNA, 6270 bp, Artificial Sequence
  chemically treated genomic DNA (Homo sapiens)
tgttaagatattaggatatttttgagtatagaaatatatttttgtgtttaaatatttatttattgttaaatagtttttatgagttaaatttttgagaaaatttagaggtgtaatttttttatttttttttatttattaatattttttttaataatttgtatttttttttattttaattggatttaattagtttaggttgttttattgttttttttttttgttttttttttaattaattaagatagattttatttttttggttttgtttataattttaatgattattgatttaaattgttgttaagaaataggttgtgtgtgtataattttatttaatattaggtttttaatttggtaatatttaatatgtagataaatgtattatatttttatgaaattttatttttttatatttttattataaagtagggttttggacgtattattttattggtagtttatatttgagtaagtaatttatagatattgtatagatagtttattttaaaaagggtttttgtttaaatttttgttaataatttgatgaattagtagaattgttaagataattttttatttagagaaataaaaaggagaaatatatatttttgtaattttttattatttaaggtaagattaaaaaggttagtttttgagatgttattatttttattaatttaaataaaatagatttaattagggttaggtaaagtgttgaatagtagtttgttggaaagaatagtttttacggttattgtatattaaagttttgtaatatttttttgtgttgggaatgaggatgttaataatgatatttttttaagtgtgggcgattaagtttttagtatatatatatatttatatatatagatatttatttatatatatatatatttatatattatttcgggttgttattgagttgtttttgtgtatttcgggttatttttgtagatgtttttgatttttgggttttattttgatttttttcgggtatttatagagtttgcgtattgggcggtaagttggggatgcgttgaatatttttgtaggtgattttgaagttttttttttgatggtattcgtagggtggagacgaatattttatttcgtttaggtttttgggtaggtcgagtagtagtattagttgtagtaagttcgtcggttttattttttacgggattcggggttatttttttatttttcgaaatcgttttatttttagttttgtatttcgggttattttaggttaaaggagattcgggagcgggaggggtgggaagagggagggttttaaggggttgtgattttattattgtggaggaggttggagaaggggaaaaagaggtatttaagtgtttcgtttttttaggtaattttgatttaaataagtttgtttgttttattttttttggttggatttacgtagttcgtttcgtttgttttttgatatttaatattagttttggttgttttttttgttttttagttcgtttttttatttcgggcgttttttttattagttttttttaaagtttagtttagatgtttttttttttttttttttttaaatttaaggagttattttttttagcgtgtagttttttagatattttgtttgtttgggagttattcgtacgtattttttatttagagaaagttttcgcggagtggattgttcgcgggcggattaatgttttgtagaattttagttttttttggttagagatatttttgttgagggttagaggcgggtacgtagttttggttagttcgcggtgcggtcgaagtcgtcgttttgtatttttggaggattttcgttgttatttaattgtaggggttatttcggtggttgagtcgattggtagcggtcgttttacgttgtagttcgcggtttcgcgaggtaatttaggaattgaattttggggttatttgttgggaagaatcgggaatggtagaaataattttaggtttttttaataatgggtttagtatggaaattttggtcgatttaagaattttattgagttatattttttttggaagatgggaagaaaaataatatttaagtggtatatttattatttttcgtatagtagttaaaaagattattataaatataaattagattgtgtttattttttttttaaaagtttttaattatttattttttttgggataaaaggaatgttaattttttttatattgtataattttttttatatgaatttggttaggataggaaggaaaaagttgtggttatgggaattagaataaaggttaggaaagattgattagaaaaagataggagggaatatatagggtttttatatcgtaattaggttggaggttaagtggatgtatatatttattaaaatttattaaatcgtatatttaaaatatgtgtattttaaattttatagaagttttatttataattattaaacgaattaagtgtttcgcgattagataatggataaataaattttgatatttttatattggaatattattttgtaataaaaatgaatgaattgttgatataatatgtataaattttttttttttttttttttttttttgaaacggagttttgtttcgtcgtttaggttggagtgtaatggcgcgatttcggtttattgtaatttttgttttcgaggtttaagtaattttgttgttttagtttttcgagtagttgggattataggcgttcgttattacgttcggttaattttttcgtaattttagtagagacggggttttattgtgttagttaggttggtttcgattttttgatttcgtgattcgttcgtttcggttttttaaagtgttgggattataggtttgagttatcgtattcgggtttttgttgttgtttttttaaaaattattatggtattgttatggaataaattttgaatgtataatgttaagtgaaaaaagttaaatttaaaatattacgtatttatatgtaattatttatattaatgatttatttatatagtttttttaaaaaggtaaaattatagggataggaaaaagattagcggttgtaaaggtttagggtagggttgattataaatgaatattagagaattttgtgggtaataaaattgttttaaattttgttcgtggtgatggttttatggtagtttattaatgtggtgaattatagtgatcgattttcgaatgttaaatttattttgaattgtagggataaattttatttgattatgatgtatttattttttttttgtttgtttgtttgagacggagtttcgttttgtcgtttaggttggagtgtaatggtacgattttggtttattgtaattttcgtttttcgggtttaagggatttttttgttttagtttttagagtagttgggattataggcgttcgttattacgttcggttaattttttgtgtttttagtggagacggggttttattatgttggttaggttggtttggaatttttgatttcgtgattcgttcgttttagttttttaaagtgttgggattataggtatgtattatcgtgttcggtcgtgtttattatttttttaatatatttttttattggatttgttaaaattttgtttaaaagttttatatagacgtttataagggatagtagtttgttatttttttttttgtaatttttttgttaaattttggtatgagggtaattaatttttttattatagaataagttgggaaatatttttttttttttaaatttttataggagtttgtgtagaattgatattattttttttttatttatttggtagaattttttagtgaagttgttggaattttgtattttttttattggaaggtttttaattataaatttagtttttaaatatagatttagggttatttaagttatataattttttttgaggtagtttgggtagtttgtgttatataatgaattgtttattttatttaaattgttgaatttattggtatgagtttgtttataatatttttttatttttttatatttatataatttattttgatgttaattttgttatatttgatattgataatttgtatttttttttttttatttaagtattttatttagagggttattaattttatttatatttttaaagaagtaaatttttgttttttagattttttatttttttttgtgttttattttattgatatatgttttgatttttattattttattattttgtttatttggggtttaattggtttttttttattttttaaggtgaggttttttaagattgaggttattgatttgaggttattttttttttataatattgtatgtgtgtagtgttgtagattttttttatattattttagagatattttataggtttcgatattttgtaattttatttgtatttagtttaaaatattttttagttttttttttagattttttttttgattttttagaagtatgtggtttagtttttaaatatttgaggaatttttagatattttgttgttaatttgtaaattaattttattatagatagggaaaatagtttgtataatttgaatatttttaaatttagtgagatttattttatgatttagaatatggttaattttggtaaaatgtttagtgtgtatttgaaaaaaaataagtgattagtttttgtggagttgtgtgttttataaatgtgattaggttaagttgttgatagtattgtttaagttttttgtatttttgttaattttaaagtttatttgttatattaattgttgagatatgggtattgaaattttttattataattggggatttgtttttttttttttttattgtatttttattaggtttttttttatgtaatttaaagtttatgtattttgaagttttattattaggtaaatacgtgtttgggattattatttttttgttttttttattgttattaaatggttttttttatattttgtgatattttttgttttttaatttatttttttgttattggtagagttaatttattttttttttgattagcgttattatggtatgatttttttatattttaatttttttgagtttttatattaaatgtgtagtttttataaatagtatagagttgggttttgtttttagtttcgtcgtttttgttttttgtttggtttgtatagattatttatatttaatgttattatttatattatatttaagtgaataattttgttattagttttttatttttttattgttatttgatttaattttttttttattttaaatatatgtttggagttattaaggaatttttatgatttcgttttattttttttgttgaattttagttataattttggttattatatttattgttttaaggtttatagtatgtacgtttaagttattatagtttatatttagttgatattatattaatttatatttggtttaaaagaattttttaatattgtatttgttgaatgtttgtttatattttatttttttttttttgtttaatttttatgtttttatcgttatatattttatttatatataggttataaattttataatatagtgttattattttttaaagggatttaaataataagatagttattttttttggttttttttattttttagtattgatttatattttttattgttgttattttttttttgtttgaatgatatttattaatttttttgttatatatatttgttggttataaattattttagtttttttgtgtttgaaaaagtattatttttgttttttttttaaaaaaggatattattattaggtatagaattatagattgatattatttttaatttttagtattttaaaaatattgttttatttttttgttgtttgtattgtttataaggataaattttatgttaaagttttttttgtttttttataatttgttttttttttttttttttttttattcgggatgttttttagattttgttatttgttgagagtaattttattgtaatgtgttttgatgtatttttttttaagttttttgtgtttggggtattttgagatttttggatttgtgtgtttatggtttttattagatttggaaaatttttagttattgtttttttatttttgtatttatgatttttttttttattattttttttttttttgagtattttaattattgtatttattaggttaattgaaattgttttataaagagaatattgatgttttttttagtaaaaaattatttttttttttgtttttgattatggat

SEQ ID NO: 1847 - DNA, 5654 bp, Artificial Sequence
  chemically treated genomic DNA (Homo sapiens)
ttgtgggaagatttattatttttgatttaatcgttttaataattatggattgtttaggttttttatttttttttgtattagttttgataagttatatattttaggaatttatatattttattttagtttttatgtttattggtatttattataattttaatgttcgtttattagtatttagttttattttttatttttaatattatttatttgtgtttttattgtttttttttttagtggttaaatttgatattatttttttgttttattaaatgtttcgtggatttttggttttgttgattttttttattgtgattttgttttgttttatttatttttgtttattttattttttttatttatttggttttaatatattgttttttttttaatttttttaaattaagaagaggataatttttaatttttaggttttttaaatttttttttcgttttaatttttttaattattgttaattttatggttttttaaatttttaaggtatgtatttaaggttataaattttttttttaaatattatttaaattatattttttatattttgatatatggtatttaattttaatttttatttattttagtatttttttaatttttattatgattttttgtttattttaggagttttgtagtaatgtggtttttgttattgttataattgtagtatagtttttttataatgttgtttttttgttagagaaagtaatttatatgatattaattttttagaatgttttgaaatatgatttacggtaaaaatgtggttaatttttgtaaatgtgttttttgtatttgaaaataaggtatattttgatattgttgggtgtagtgttatgtttatatttattggaataagtttgttagttggtttgtttaaattttttatatttttattggaatgtttttatttgtttgatttattattattgagaaggtatagggtaaatttttgtttaattttttaagaaatttttaaattgtttttaaaggatttatattattttgtttttttattagtaaagtataaaggttttattttttttatagttttgtaaatatatggttttttttattttagtttttttagtgagtatgtaatggtattttattgtggttttgatttgtatttttttaatgattaatgatgttgagttattttttatgtgtttattagttatttatagttttttttggtgaaatgtttatttaatttttttgtttattttttaattaagtagtttgttttattattgagttgtaagggttttttatattcgtatagaattagtacggggtagggttatacggatttttttgtcggtgtttggttttggtattttttcggtaggtggttttttcgtttttagtacgtgagtggtttagaattttcgtagaagtaggttttatggggtgtggtcgaatttacgtcgggttttaatttttgtgttgtgttggagaagtttttaggtttttggttattaaatggttttaggaggggtattttttaaaagatttttatgtggggtttttgtgttagtatttttttgttttaatattttttttttatattttaggaagtgagtgttatagtttttattttttagaggggatttttaggtaggtttgttttgggggatagagatagggtttttttttggaaaggtgattttgataagttattgtatttttttgagttattttttttgtatttgtagtttggggttagtgttttttttgggggtatcgtttagttttaggtgggattaggtgaggcggtgaggtttaggttttaggtaagggaggtcgagcgggggttggtagagggcgggtggtttagaggggtagacggtagtgtgagttagtggtggtggtaaagtttttcgggtggatggtggacgtagagaggatggggtagtttttgtgtgtaagtatttgttaagttggtatggtgttttttaagttttttttattttttaaggtcgtggtttatttttgtttatgtttataaagatattttgggggtttttgaagttatttgttggtttagggttggtaaggtttgggagtcggttttttttagtttttatattggtaattaggtttaggttggtttggtcgagtaggggtttagggtgtttagtagttgttggggaggttagggttattataattgagtttttggggtagggattgtgggtagagaagttgtttggggaggtttggtttttagggtttagatttgatttttagtagtttttaaagggttatttatttttatattttttaggtttttatagtgtttatgaggggaatagtagagaggggttgagtgggtaggaaattttttagggagggtagggtttttgaatttcggttgtatattttgttttttggttttttagtttttgttttatttgttagagtattatttttgggttgtaagttttgtttttaggggagtgagttttttagttttttttgagagggttattggggtataggtaaagagaggagttgggcggggttgggggagtatattttatttggttttatttggtttttaaatttttttttttttttttattttttttagttttttatttgtttttgtttgttttttgttttttttttaaggttttttttattttgaattagtttttttttttgtggaataggggttggagtgtttattttggggagttttttgggttaggtggaggttgggtatagtggtggtatacgggtattattggttttttaaggtttttttggaattttcgagggtacgttttttttatagagttttttaagttgtttttttggtttttagtattttcgatttttatttttatttttatgtatttgttgtgtttttggggtttagagggatttttttttttttttttggggttttagtattagttaggtttgtaggtatatagtaggtgtttaagtaattacgagtgtcgggggatttgtttggagtcgaagttttattggttggttttttaatggggtaggtaggttggtgggtttggaggtgttttaggtatttgtgggttggcgtagtgatagagcgttttgttttcggtcgttttttttggttttttattgtttagaggtgttttttgtttaggttttattgttcggtagtttagggttttttggaagtaaaagaagggatattagagttcgaattttttttgtagttttttcggaataatgttcgaatttttttttttcgttaaaggttgatttttttttatttatttattttatttgttgtttttttattataggattttagttttgttgtaaggataggtgttaggtagggggtagtgttgattcgtcggttttaggtaggtgttttatttttaggttagaattttggtatagtttaattttgttttttgtcggtattgtttttttatattatatttttgtttattgttaggttttttggttatatcggtgggattatcgggtagttgttatttgtatgttatttatagaatcgggtttggggcgtttttttgagtcggacgtttttttattttttatagtgattttgaagggtaggtggaggtagggttggttttaggtttgggttttacgttttgttgttattgttttgatattttaaatatattttgaattaggggattttcgtttttattttgcgtgagtttcgttattgaggttaattttgattttagagttgggattttttgttgtaattattttagggcgtagttagggggtaggggtgcgggaaggtgggagacgtggagtagtagtcggggtttttggggttttttcggtcggttttatttttatttttgggaattcgggaagagtcggttttcgttttttgtttattaaattttttaaaggaagagggtaaataaaatcgttcgtttgtttagttggaaagcgatgatttagtcgttttcgtcgattttcgtttttaggttgattttagagagcgggcgtcgcggtttagttcgaattttttagtttttgggattttttttcggttcgggtcgtgggggcgcggtcggagtagttcgtattttagttcgggatattacgagggcgtagggaggagaacgggtttttttttttttttttattttttgagttttatgggttgttggtttagttttttttacgtgttttttaatttagtaaaggttattgtttttattttatagaagcgaaaatcgaggttaagagaggtggtcgtttttggcgtagttcgtgggtggtaagataggagttcggttcgttagggtagggttattttcggagagggtttttgggcggttttgggaaaggttttcgaataggacggaacggttagggttcgggagtaaggaagggggtttcgattttttttttgtttcgggagttcgagagcggtagggttggatttggggcgtttggagggtgaaggtttggtttcggttgtttttttacggtgggtcggtttcgggttcgcgggtgtttttcggggtttttcggcgtgagttatcgcgggtagggttggttgtagcgtattttttcgcggggtcggtttgcgagacggtgcgggcgagcgttcgggcggggcgggatttcgagttattttacggggtcggatagttggggtacggggggtaagaggagcgcgggtttttgagatgggaggggacggtcggggatcgattagagcgcggacgcgacggtgcgggttcggacggttgggtttggggagggtatggttcggggcgcgcggggtttaggcgggcggggtggttcgagggtcggggcggggcggggaggggcggggcggggaggggtagttataaaggtcgcgtcggggttacgaggagtagagtcggcgtcgttatcgttcgtattgtcgtttttagtttcgcgttcggtacgatatgaaatttttcgacgaggtgttacgcgagggcgagttggagaagcgtagcgatagttttttttagttatggaagaagaagcgcggggtgtttattttcgatcgtttgagtttgtttttcgttagttttcgcgcgcgttttaaggagttgcgtttttattttatttttaaggtggattgcgtggagcgtacgggtaagtacgtgtattttattatcgttattatcgattataaggagatcgattttcgttgcgcgggcgagagttgttggaacgcggttatcgcgttggcgtttatcgatttttagaatcgtcgcgttttgtaggattttcgtagtcgttaggaacgtatcgtattcgtcgtattcgtcgaggacgtcgtggttgtcgcggtcgtcgtatttttcgagttttcggagttttttaggttattttcgtagtttaaatttcgtacgttatgagttcgtcgcggtgagtgattgttcgcgtttcggcgagttttgcgttttaatagtcgggatcggggtttttgggaaaaattattttaattttagacggcggggcgggggcgttgtatttttttgggggattcggcgtttcgtaatcgcgttggttttttcgcgttagggtttcggggttttttaggttggattcggatcggttttggtatagttttttgatttagttttttttttatagg

SEQ ID NO: 1848 - DNA, 5654 bp, Artificial Sequence
  chemically treated genomic DNA (Homo sapiens)
tttgtggggaaaggattgggttagagagttgtgttagggtcggttcgggtttagtttgaggggtttcgagattttgacgcgagggggttagcgcgattgcggggcgtcgggttttttaaggaggtgtagcgttttcgtttcgtcgtttggggttgaagtggttttttttaaaggtttcggtttcggttgttagggcgtagggttcgtcgggacgcgggtagttatttatcgcggcgggtttatggcgtgcggggtttgggttgcggggatggtttggagggtttcgagggttcggagggtgcggcggtcgcggtagttacggcgttttcggcgggtgcggcgggtgcggtgcgtttttggcggttgcgaaagttttgtagggcgcggcggttttggaaatcgatgagcgttagcgcgatggtcgcgttttagtagttttcgttcgcgtagcggaagtcgatttttttgtggtcggtggtgacgatggtgaagtatacgtatttgttcgtgcgttttacgtagtttattttgaggatggagtggaagcgtagttttttggggcgcgcgcgggggttggcggggaataggtttaggcggtcggaggtgagtatttcgcgtttttttttttatagttggaagaggttgtcgttgcgtttttttaattcgttttcgcgtagtatttcgtcgggggattttatgtcgtgtcgagcgcgggattgggagcggtaatgcgggcggtgacggcgtcggttttgtttttcgtggtttcggcgcggtttttatagttgttttttttcgtttcgttttttttcgtttcgtttcggttttcgggttatttcgttcgtttgagtttcgcgcgtttcgggttatattttttttaagtttagtcgttcgggttcgtatcgtcgcgttcgcgttttggtcggttttcggtcgtttttttttattttagaagttcgcgttttttttgtttttcgtgttttagttgttcggtttcgtggggtgattcgaggtttcgtttcgttcgggcgttcgttcgtatcgtttcgtaggtcggtttcgcggaagaatgcgttgtagttagttttgttcgcgatgatttacgtcggggagtttcgggaagtattcgcgggttcggggtcggtttatcgtggggagatagtcgggattagatttttattttttaggcgttttaagtttagttttgtcgttttcgggttttcggggtagaaggagggtcgaggtttttttttttattttcgagttttggtcgtttcgttttgttcgggggttttttttagggtcgtttagagatttttttcgaaagtggttttgttttagcggatcgagtttttattttgttatttacgggttgcgttaagaacgattattttttttagtttcggttttcgtttttgtgaaatgggaatagtaatttttgttggattagggaatacgtggaaagggttagattagtaatttatagagtttagaaaatggaaggggaagaggaagttcgtttttttttttgcgttttcgtagtgtttcgaattggggtacggattgtttcgatcgcgtttttacgattcggatcggagagaggttttaggagttgaggggttcgggttgggtcgcgacgttcgttttttgggattagtttgggggcgagggtcggcgggggcggttgagttatcgttttttagttgggtagacgggcggttttatttattttttttttttaaagggtttaatagataggaagcgaaagtcggtttttttcgggtttttaggggtgggggtggagtcggtcgagaggattttagagatttcggttattattttacgttttttattttttcgtatttttgttttttagttgcgttttggggtggttatagtaggaagttttaattttggggttagaattggttttaatgacggggtttacgtaaaatgaaaacgagagttttttgatttaaaatgtatttaaaatgttaagatagtggtagtagagcgtaaaatttagatttgggattagttttatttttatttgttttttagggttattgtaaaggataaagagacgttcggtttagaggagcgttttagattcggttttgtgaatggtatgtaggtagtagttgttcggtggttttatcggtgtggttagaggatttggtagtgggtagggatgtggtgtggaggggtagtgtcggtagagggtagggttgggttgtgttagggttttggtttgggagtgagatatttgtttggggtcggcgggttaatattgttttttatttgatatttgtttttgtagtagggttgggattttgtggtgagggagtagtaggtagggtgggtgggtgaggggaggttagtttttggcggggagaggggattcgagtattgtttcggagaggttgtaggaaggattcggattttggtgtttttttttttgtttttagagggttttgggttgtcggatagtgggatttgggtaagaggtatttttgggtagtgggagattaggagaagcggtcgggggtagagcgttttgttattgcgttagtttataggtgtttggaatatttttaggtttattagtttgtttattttattgaggggttagttagtggaatttcggttttaggtaaatttttcgatattcgtggttgtttaagtatttattgtgtgtttgtaggtttggttggtgttgggattttagaggaggggagaggaatttttttaaattttaggggtatagtaggtatatgaggatggggataggggtcgggggtattggaggttaggaggatagtttggaggattttgtggggagggcgtgttttcgaagattttaaggagattttgaagggttagtggtgttcgtatgttattattgtgtttagtttttatttaatttagagaattttttaaagtgggtattttagtttttgttttatagaagaggaaattggtttaggatggagagggttttggggaagggatagagaataggtaggagtagataaggggttgagagaaatgagggggaggaagagggtttggaaattaggtgaggttaggtgaggtgtgtttttttagtttcgtttagtttttttttttgtttgtattttagtggtttttttaagggaggttgggaaatttatttttttgggggtaggatttataatttaggggtgatgttttgataggtggggtaggagttgggaggttagggggtagggtgtgtagtcgagatttagaggttttgttttttttaggggattttttgtttatttagtttttttttgttattttttttatggatattgtgaagatttggggggtatgggggtggatggttttttaggggttgttggaaattaggtttgagttttggaggttaggtttttttaggtagtttttttgtttatagtttttgttttaggggtttagttgtagtggttttggtttttttagtagttgttagatattttgggtttttgttcggttaaattagtttgaatttggttgttaatgtgggggttggagggagtcgatttttaagttttattagttttggattagtaggtgattttaggagtttttagggtgtttttatggatatgggtaaaaataaattacggttttaggaggtgagaggggtttggaggatattatgttaatttggtaggtatttgtatataggggttgttttattttttttgcgtttattatttattcgaggggttttattattattattaatttatattgtcgtttgtttttttgagttattcgttttttgttagttttcgttcggttttttttgtttgaggtttgagttttatcgttttatttggttttatttggggttgagcggtgtttttaggagaagtattggttttaagttgtagatgtagaaagggtggtttagagaggtgtagtgatttgttaaggttatttttttaaggagggattttatttttattttttagagtaggtttgtttgagggttttttttggaggatgagggttgtgatatttattttttgggatgtgggggagggatgttgaggtagaagagtgttgatatagggattttatatgagggttttttgaggaatgttttttttagagttatttgatagttaagagtttgggagtttttttagtatagtatagagattggaattcggcgtggattcggttatattttatgggatttgtttttacgagggttttggattatttacgtgttggaggcggaggaattatttgtcggagagatgttagggttaggtatcggtaggagagttcgtgtggttttgtttcgtgttagttttgtgcggatataaaaaatttttgtaatttaataatagaatagattatttaattagaaaatgggtaagagagttgaataaatattttattaaagaagattatgaatggttaataagtatatgaaaagtggtttaatattattagttattagggaaatgtaaattaaaattataatgagatattattatatatttattaaaagggttaaaatagaaaagattatgtatttgtaaggttgtggagaaagtggaatttttatattttattggtgagaaagtaaaatggtataaattttttggaaatagtttagaagttttttagaaagttaaatagaaatttgttttatgtttttttagtaataatagattaagtagataaaaatattttaatgagaatatagaagatttgaatagattaattaataagtttgttttagtggatatgaatataatattgtatttaataatgttagaatatattttgtttttaagtatagaaggtatatttataaaaattgattatatttttgtcgtaaattatattttaaaatattttaaaggattaatattatatggattgttttttttgataagagggtaatattatgagaaagttgtgttataattataataatgataaaaattatattgttatagaatttttaggataaataagagattataatggagattagaaaaatattaaagtgaatgaagattaaaattaaatgttatatattaaaatgtgggagatgtagtttggatgatatttaaaggaaaaatttataattttaaatgtatattttaaaaatttagaaagttatgagattgatagtggttagaaaaattaaaacgaaaaggaaatttaggaagtttgaaaattaagaattattttttttttaatttagagaggttagagaaagaatagtatattaaggttaagtaaatagaaggaataaaataaatagaagtgaatgaaataaaataaaattataatagagaggattagtaaagttagaagtttacgaaatatttaataagataggggaatagtgttaagtttgattattaagggggaaaatagtgaaggtataaataaataatattgagaataaaaaatgggattaaatgttaatggacggatattaaaattataataaatgttaatgaatatggaaattaaaatgaaatgtataaatttttagaatatataatttattaaaattgatataagaagaaatagaaaatttgaatagtttataattattagagcgattgaattaggaatgatgaatttttttataa

SEQ ID NO: 1849 - DNA, 10026 bp, Artificial Sequence
  chemically treated genomic DNA (Homo sapiens)
cgttatcgtttgcggtttttttaggtagttcgagttcgttcgtttttagagtgttcgagttcggttcgtagttcgttgttttttgttttaggtggattaggggttttcggggtatttcgttttattttcgtaacgttattttttttcgggtagtaggtggttcgatcggcggtttaggcgttcggtcgttgttttcgtttcgtatttattcgtttcggacgtcgcgttggcgttcgtttcggtcggttggagaagttggtcggtttaaattttcggtcgtagttttttaggcggcgcgtattatcgcgttatcgttagagggggattttgcgtcgttcgtcgttatttcgcgtttttttcgcgcggtcgtttcgcgttcggtatttgttaatttcgcgcgcggggttttcgggattcgcgggggtttgagggggacgtcgggtggcgcgggggtcgcgcgggtttgggttgggcggagcgggcgtatttttacggttcggttagtggaaggcgcgggtagtagcggtttcgagtggtcgcggcggtgggttgtgtcggagttttttttttttggttcgttgtaggttggtggcgggaggaggggatagttgcgggcgcggggagggggcgtcgcgtcgcgggggttatggcggagttaggaagtcgggagttcgagattcgggtaattgtcgcggcgtggcggtttgtttttttggagggggagggagtggttttttgggggtgttcggcgcggggttttcgcgcgggatttgggcggaagagggggtttagtttaggagagaaggcgcgtcgttacgttggtattaagggtgattgttcgtttggggcggtttgtcgggtggggtcgtggcgagtggcgggtggggagttttgggtggaagtgggtgatttggtggtattagagagggcgggggagagagaggaggatagggagacgagatttcgttgatttagaggttttaggaagagatattagttaataatttgttagtgagtgaaaggaattaatattgtttagttttgtttggtgtggtattttgttgggtattttcgtggtgtgatttaatttttataataattttgaggagtaggttagaaatttattaagataggagagagcggtagagcgagttgttggaggatatatttagagttgaggtcgggtttgatttttggtttgaagtttacgtggtattagttgtttttgtttatttggtttttttttgaaggtttatgttttttaaaaaattgtttgttttgaatttagttcgtttaattataagttgatgtaatttaatttttaataatagttgtatttaataattagttggtaaaatttttgaaaagttcgttatgggtttttgtaaattgggggatattattgtttttttttagtttttgtagaggttagtttggaagttttttttgttttttaattttgattttttgttttgttttgttttttgagataggttgtggttttgtggtttagattggagtgtagtggcgttattttagtttattgtaattttcgttttttaggtttaagcgatttttttattttagttttttaagtaggtgggattataggtatgtgttattattttcggttaatttttaaatttttggtagagatggggttttattatgttgtttaggttggttttgaatttttgggtttaagtgatttgtttattttagttttttaaagtgttgagattataggtatgagttattatttttggttttatttttttttttaaaaaaaggttttgttttaaaatgtttatagtaatttttaaagtttagtgtttggtggttgggggagggggtgggtaggagggattaggttggggaggtttaagaggagtttttaagttttgttttttaaggggtattttggatttagtttgcggtttacgtttgttttagtgtagttgtgtatttttttgatatgagtttggggcggttacgttttggggttttttatttttagggtatttttatttatagtgatttcggtttttgaattatataggtatttggtttttatttttttttgatatttatagtttgtttttatatttttttttatggtttatagatttttgtgagaagtgttaattaagtagggagattggggtagggtgattttagatttttgaagttttattaagttttgaaattttaagattttagatttgttgttggtagttttagggttattaatgagagtaatggaagaaataatgtaatattattattattattattattttgagatggagttttattttgttgtttaggttggagtgtagtggcgcgatttcggtttattgtaatttttgttttttaggtttaagcgatttttttgttttagtttttcgggtagttgggattataggtttatgttattatgtttagttaatttttgtatttttagtagagatgaggttttattatgttagttaggttggttttgaatttttgatttcgttattcgttcgttttggtttttcgaagtgttgggattgtaggtgtgagttattacgttcgatttaaatcgtttttaatgattattaaaattagttagatgtaatgtatggtggttgtttttttatatttattgtttaattttggttttaagaggtggaggtgagaagttttattataaggaatagaaattatttagagattttatatatttatattatataattagttaagtagtggagtggggtttatattgatttggggggttttttggtttttaaattagggttttttttattgtaaatggatgattgggtgagggaaataaggatttttaagaataggggatagtgtttgggggtgtataggggttgttgtggtttttataatagggttttttaggaaggaatttgtagtatttgttagtatagcgttttttagttgtgttgtaacgtagataatggggattattttttagttaaatattttttggtagtttttttattttaaagatcgtgttgaggttttttgggtttttggaaaagttagattagtttggatttttttttattttaggaagtttttttattttttttgttgttattttaggtaaatataggggttttttgtgtttaatattgaattttaaattatttttaattttatttttttttgtttgtagtttgacgtttttttttagggtttggtaaaggtaagagtgtttcggtgttcggtataaggtttgatcgtatgggtgaagtaggtttttaaaagttagttgcggttagattgtgggggtgggtatagggtgttattttagaatttattaggttttggttattatggtatttggggtaggggaagtttagtttgaggggttaaattttggttgtaaattttgaggttgttttttgtgattacgggtaaggtatttatttttttaattgttagtggttttatttataaagtaggcgttttaatattcgtttaaggttgcggtgtttagtatgtgatttggtttatagaggtattcggtttatagatgttgttttttatttgttttttttatttcgttggtaggattgtatgtagtgggtgttaaggttgggttttatataggggataagtgagggttgatttgtagtttatattttatatatttagttatgtgttttggtgggggtttagtttttgtttggtagaaggggttttttttttttatttgtataacggtggttttttagtataaagggtttaaagtgtttgggaagtttatatttaggaaggttgtgggttggtttggtatagtgggttggcgagttggtgtattgtttttggtatgtaggaaagatagagaggagagggagggaggtgcgaagttattgttgttgttgttagaagggttagagagagtttaggttggataggtaaaatttggtttcgttagatttttggagtttgtatagagtgtgtgtttgagaagttcggattttggtgttagattgattgtttagtgagaagtttggtatcgtcgggttaggttagtgtatttttttttgtttgttttttgtttttgagatagagttttgtttttgttttttaggttggattgtaatggtacgatttcggtttattgtaattttcgttttttgggtttaagtagtttttttgttttagtttttcgagtagttgggattataggtgttttttattaagttcggttaattttttgtatttttggtagagacggggttttattatgttggttagattggttttaaatttttgattttaggtgatttatttgtttgggttttttaaagtgttgggattataagcgtgagttatcgtattaggttaggttagtgtatttttgtgagtttgagtgttttttttgaaacggtgataataatatattaggttttttaagattatttatttaatatatattggagagtttattgtgttaggtattgttttaggatattgttaggatttagtggtatttagtaaggatttagtaaattttagttattgtttttattaggtcgttaatataaatgtttgatgagtgaatgaatgattttcgtttgggatttggttgtaaataaagtcgagttgtattttagggaggggtggagattttgtttttgtttgtgttttgaagttagtagggttttgttttaggatatttttatttatttttttgtttagtaagtggaggtgaggggcgtggtttggggtttttcgggaggttatggttattgggttattcggagtttgtgtttatatgaggtttggtagagggaggtttttggttatttatttttgtgttcgggtttattattattggtttttgcgttttttggattttgttttgtacgggtcgtatttttttcgtcggttttcgtttatgttttagttttagttttagttttaatagcggtttttttttgttttttttttgatattttttttgtcgtttaggttcgtagttcgagtgtcgtcgttatggtttcgtcgtagttttgtcgcgcgttggtgtcggcgtaatgggtggcggaggcgttgcgggtttcgcgcgttgggtagtttttgtagttgttggacgttttttggtatttgtcgaagttggggcgcgacgcgcgacgcgagttcgaggagcgttatatttcgggcgtcgtttttttcgatatcgattagtgtagcgatcgtatttcgttttacgattatatgttgttcggggtcgagtatttcgcggagtacgtaggtcgtttgggcgtgggcgcggttatttacgtcgtgatttacgacgttagcgattagggtttttatttcgtttcgcgcgtttggtggatgtttcgcgttttcggttattacgtcgtgttattgtttgatggcggttttcgttattggttgcgttagaatttttcgtttagtttcggtaagagttaatttgttttcgtcgagtttcgcgtttagttcgatttcgtttttattaagatttacgaggatattaaggagaatttggaatttcggcgtttttaggtggtggattttcgagttattggtaggtttcgcggtatcgagttcgagtttcgagacggtaacgcgggggaagggggtaggaggtcgtcgggggcgcggtttttacgttttgagtagtgttttggatttgattttttttttatttttttaatttattttgtttttattttttttttttttttttttttttttttttttttttttttttttttttttttttttttttttatttttgttttttttttatagggtttggttttatcgtttaggttggagtgtagtggtataattatggtttattgtagttttaattttttgggtttaggtgatttttttcgtttagtttgattttgtttttaaaggttattgtatgaggtggggaaggagatttgatttttatttgtttcggtgattttgtttgttaagtagaattataatattggtttttttttttttgtgttttgggtagtgattttttttagtttattgggaattttggttgtttaaatagtttttaatttaatattagaggtgtggggggttattgtggaatgttggggggtaggttttagtatgagagaaaaatttagagggatggttttgattagggttatttatgtttttgaggatggtggaatgaaggtagagtcgggggttgtataaaggaaagttttttttagggattaaagtttggagaattgagggtggaagggggattaaatagaagtgggtagggtagagttttttgtttgtgggttggatttttttaggtaagaagtttgtgggtaagttttgtataatgcgaggaggagtttttataaagtaggttggttagtggttacgttagtgtgagttttttaaatatttcgtgtaagtagatattgttattgtatagaggaggaaatggaatttggtttaaggttttaagaaataatttagtcgggatttagattcggtagtttgcgtatttaatagtcgtgagtaattaggaattttttagtttttttttttgtgtttttaagagtgtaagaaattgattattgtttttagagagttttttgaagagtatttttatggttatagattgggtttggagtcgtttgggtttattatgggttagtattgttttggatggtttgagggtaaggattgtttttgttttttatgtattttgaagattagtttagtatttggtatagagtcgatgttttagagaggtttggtgaatatagaaggtttttgttgtatggaattttgtaaagtaatgttggtgttatcggaattataggaaatagttgatatttaattatttttgaatttatataggtgttagttttatgtggtttagtttaatgagagtattattttaattttgttgggttttttattttagttttaggggaatgagtaatataggggagttagttggtggtgttagattggggtttagatttttgttatatttatatgggttttgtgatatacgacgggttatttaatgtttttgaattgtagtttttgtttatgtagaatgggagtagtaatatagagtataaagatatgataggggtaaggagagtaagtgtgtaaagtatttagtttcgggtttttatgtataagtgtgttgtatatttgtgtttgatatttatttagtcgtattagtttatttatagaatgggaggtgatatacgtttagtaggtttgttgttaaaataaattaagtttattgtagttggattagtgatgaatgttattgtcgttattatttttattttatagtttgaggtttggttaagtgtttttgtgatgtgttatattagtttagtaggtaggggaaatatgttttgtttggtgggatttaaggtgtagggatggttttttttttatagttattattttgggttgagagtttgttttttttttttgttttgggttggtttttatgtgatatttgattaagttcggtaattgtgtttgttaggtgggatgtatgatttattttagtttttttatagattcgggagtgttgtttttatgttagggtttgagaatagatatcgatatatgggttagtagtttttgtgggggtgttattttattgcggagggaaattaaggtagaagttggataagagtttgaatggtttagatttgaattattcgtttttggggggttttttgtttgtgtttgtttttgttgttgttgttgttattgttttgagacggagttttgtttttgttttttagttggagtatagtggcgtaatttcggtttattataattttcgtttttcgggtttaagtgatttttttgttttagtttttcgagtagttgggattataggtatgtgttattacgttcggttaatgtttgtattattagtagagacggggtttttttatgttggttaggttggtttcgaatttttaattttaggtaatttgtttttttcggttttttaaagtgttgggattataggcgtgagttatcgtgtttagtttaagcgttagttgtgaaggtttattttgttgtaaattttagttttgtatgaaaatgggaatgttagtaatttttgttttaaggtggggtagtgaaaataaaaaatattttgggagtttgtagaggtgtgggttttttttattttattttttttgttataattaaaatgatcgtttaaaaatggaaatttaggttgggtaaggtaatttttatttataatttttatattttggaaggttgaggtgggaggattttttgagtttaggagtttaagattattttggatatgatggtaagtttttttttaataaaaaaaattaaaagtaatagtaaaaaagtaaacgtagaagtttgagttttttttgtagttaggttaaagtttttaagttttattttaggtttgttaaggcgtttttattttttttagttttttttttgggtttttggttttttattgtttgggttttcgtgataatgatttttaattttttcgggtaataggtggttttttcgttttttagattttttttgtttgggatgttttaggtttttatttatttagatttttttatgtgattgaattttatttatttttcggggtatttttagagaaattttttttatttattgagtttttagttagtgtggcgtgaaggtgggaagtatagatttgtttgggtttatttttttttgttttttgttagtttgtataagttagtttttgtattttattttttttatttttataaaagagaggataataattttttttttagagaattttggggtggatttaaggagaaagtatagttgatcgtttttaaatagtgtttggtagaaagtaagtatttaataatattagttattggttaggtaaggtggtttatttttatatttttagtattttgggaagttgaggtagaaggattatttgaggttaggaatttaagattattttgagttatatattgagattttatgtttataaaaattaaattaggttaggcgtggtggtttatatttgtaattttagtattttgggaggttaaggtaggtggattatttgaggttaggagttcgagattattttggttaatatggtgaaatttcgtttttattaaaaatataaaaattagttaggtgtgatgggtgtttgtaattttagttatttaggaggttgaggtaggagaattatttgaatttaggaggtggaggttgtagtaagttaagattatgttattgtattttagtttgggtaataagagtaaaattttattttaaaaaaaaaaaaaagaataaaaaaaggaaattagttgagtatggtggtatgtgtttgtagtagttttagtttttcggggggaagttgaggtaggaggattgtttgagtttaggaggttgaggttgtagtgagttttgattatgttattgtattttagtttgggtaatagaatgagattttgttttagtaataataatattagttattgttgttattggcgttattttttttttatatgttttaggttatttagtagggtatttttggaatatttattatgtttgtaattatttagttgtttgtttgttttgttagattaaagttttttgtttgtaggtattgtacgttttagttaggtaggggttttgtttattgttttgttgtttttagggtgtatagttaggaaattttggggtttagtttttaggtttaaagtttagttagtaatttgttagatgtgttagttttaggtggtatttaattttagtattatcgtgtataaaatgggggtttttttaaatagtgtttaggttttatggttgtgagaattaaatgagatggtggatataaaggatttagtattatgtttgtatgggatgtttttaatatttcgagtattataaatacgaggtattatttatagtatttttttatttgtttttttttttttgtttttttgttgtagg

SEQ ID NO: 1850 - DNA, 10026 bp, Artificial Sequence
  chemically treated genomic DNA (Homo sapiens)
tttatagtaggggagtagggaggaggggataaatagaaggatgttatgaatggtatttcgtatttgtggtgttcgagatattgagagtattttatgtaagtatggtgttaaattttttatatttattattttatttaatttttataattataaaatttgagtattgtttagaggagtttttattttatatacggtgatgttgaggttaagtattatttgaggttaatatatttagtaaattgttgattgaattttgaatttaagaattgggttttaaggttttttgattatgtattttagggatagtaaagtaataaataagatttttgtttagttagaacgtgtagtatttgtaggtaaggagttttaatttggtagggtagataggtaattgaataattataagtataatgggtgttttaaaagtgttttattgggtggtttggggtatgtaaaaaaaaaataacgttagtaatagtaatagttgatattattattattgagatagggttttattttgttgtttaggttgaagtgtagtggtatgattaaggtttattgtagttttaattttttgggtttaagtaatttttttgttttagttttttttcgaggggttgggattattataggtatatgttattatgtttagttaattttttttttttgtttttttttttttttttgagatggagttttgtttttgttgtttaggttggagtgtagtggtatgattttggtttattgtaatttttattttttgggtttaagtgatttttttgttttagttttttgagtagttgggattataggtatttattatatttggttaatttttgtatttttagtagagacggggttttattatattggttagggtggtttcgaatttttgattttagatgatttatttgttttggttttttaaagtgttgggattataggtgtgaattattacgtttggtttaatttggtttttatagatatggggttttagtatgtggtttaggatggttttgaatttttggttttaagtaatttttttgttttagttttttaaagtgttgggaatataggagtaagttattttgtttggttaatagttgatgttattgaatgtttattttttgttaggtattgtttggagacggttagttatattttttttttgaatttattttaaaattttttgggaaagaaattattatttttttttttgtaaagatgaagagaatgaagtataaagattagtttgtgtaagttagtagagggtagggaggagtaaatttaggtaagtttatgttttttatttttacgttatattggttgggggtttagtgggtggaggaagtttttttgagaatgtttcgaaggatgagtaggatttagttatataaaggggtttgggtggatggaggtttagagtattttaggtagagggaatttgaaaggcgagggaattatttgttgttcggaggggttaaaggttattgttacgaaagtttagatagtgagaagttagaggtttaaaggggaagttgaaggggatgggaacgttttagtaggtttggagtaagatttgggggttttgatttgattgtagggggaatttaggtttttgcgtttatttttttattgttatttttaattttttttattgagaaggggtttgttattatgtttaggatggttttgaatttttgggtttaagggatttttttattttagttttttaaagtgtgaggattataggtaggagttattttgtttaatttagatttttatttttaaacgattattttgattgtagtagaaagaatgggatgggaaaggtttatatttttgtagatttttagggtgttttttgtttttattgttttattttgaggtaggggttattaatatttttatttttatgtaggattgggatttgtaataaaataaatttttataattaacgtttgggttgggtacggtggtttacgtttgtaattttagtattttgggaggtcgaggggggtagattatttgaggttgggagttcgagattagtttgattaatatggagaaatttcgtttttattaataatataaatattagtcgggcgtggtggtatatgtttgtaattttagttattcgggaggttaaggtaggagaattatttgaattcgggaggcggaggttgtggtgagtcgagattgcgttattgtattttagttgggaaataagagtaaaatttcgttttaaaataataataataataataatagaaataaatataaataaaaaattttttaaaaacgaatgatttaaatttgagttatttagatttttgtttagtttttgttttggttttttttcgtagtggagtgatatttttataggagttgttgatttatgtatcggtatttatttttagattttggtatagagatagtattttcgagtttgtggagaggttggaatgggttatgtattttatttaatagatatagttatcgggtttggttagatattatatagagattagtttagagtaaggaggaggaataaatttttaatttagggtggtgattgtaaagggagggttatttttatattttgaattttattaagtaaagtatgttttttttgtttgttggattggtgtggtatattataggagtatttggttaggttttaggttgtggagtgggaatgatgacgatagtgatatttattattgatttagttgtagtgagtttagtttgttttgataataagtttgttaggcgtgtattattttttattttatagatgagttagtgcgattgaataagtgttaggtataagtgtgtagtatatttgtgtatgaaaattcggagttgagtgttttatatatttgttttttttgtttttattatgtttttatgttttgtgttattgtttttattttatataggtagaagttgtagtttagagatattagatgattcgtcgtgtgttataaagtttatgtaaatgtggtagggatttgaattttagtttggtattattagttagtttttttgtgttgtttatttttttggggttgagatggagaatttaataggattaaggtggtgtttttattaggttgaattatatgaaattgatatttgtgtaggtttaaaaatggttggatattagttgttttttatggtttcggtaatattaatattgttttgtaggattttatgtaatagggattttttgtatttattaaatttttttggaatatcgattttgtgttaggtattgagttaatttttaggatgtatgaagagtagggatagtttttgtttttaggttatttaaaataatgttggtttatggtgagtttaagcggttttaaatttaatttgtagttatgggaatgttttttagagagttttttaggggtagtggttagttttttgtatttttgaaggtataagagaaagggttggggagtttttggttgtttacggttgttaagtgcgtaggttgtcgagtttgaatttcggttgggttgttttttgagattttgggttaggttttatttttttttttgtgtaatgatagtatttatttatacgggatgtttgaaagatttatattagcgtgattattgattagtttgttttgtggggattttttttcgtattatatagagtttatttataggttttttgtttgaggaaatttagtttataggtagaaggttttgttttatttatttttgtttaattttttttttatttttagttttttaagttttggtttttggaagagatttttttttatgtagttttcgattttgtttttattttattatttttaggggtatgggtagttttgattaggattatttttttgggttttttttttatattggggtttgttttttaatattttatagtgattttttatatttttagtgttggattgagagttgtttgggtaattagggtttttaatgagttagggagagttattgtttaaagtataggaggggaagggttagtattatggttttgtttaatagataaagttatcgaggtaagtggaagttaaatttttttttttattttatgtagtggtttttaaaggtaaggttaggttgagcggggagggttatttgagtttaggaggttgaggttgtagtgagttatgattgtgttattgtattttagtttgggcggtagagttagattttgtgaaaagaaggtaagggtagggaaaagggggaaaggagggaagggaaagggaaggaaaggaaagaaaaaaggaaaggaaatgaaagtaagataaattaaaaaaataaaagaaaggttaagtttagggtattgtttagggcgtagaggtcgcgttttcgacgattttttgtttttttttttcgcgttatcgtttcggggttcgggttcggtgtcgcggaatttgttagtggttcgggagtttattatttggaagcgtcgggattttaggttttttttgatgttttcgtaggttttgatgaaggcggggtcgagttgagcgcggaattcggcgggagtaggttggtttttgtcggagttgagcgggaggttttggcgtagttagtggcggaggtcgttattaagtagtgatacggcgtggtggtcgaaggcgcggaatatttattagacgcgcggggcggagtagaggttttggtcgttggcgtcgtagattacgacgtgggtggtcgcgtttacgtttaggcggtttgcgtatttcgcgaaatgttcggtttcgggtagtatgtggtcgtagggcgaggtgcggtcgttgtattggtcgatgtcgaagaaagcggcgttcgggatgtggcgtttttcgaattcgcgtcgcgcgtcgcgttttagtttcggtaggtattaggaggcgtttagtagttgtagaggttgtttagcgcgcggggttcgtagcgttttcgttatttattgcgtcgatattagcgcgcggtagagttgcggcgaagttatggcggcgatattcgggttgcgggtttgggcgatagggaggatgttagaagggaagtagggagaggtcgttgttggggttagggttggggttggagtatgggcgagggtcggcgggggaggtgcggttcgtgtagggtagagtttagggaacgtagaaattagtggtggtgaattcgggtataaaggtgggtagttaggggtttttttttgttaggttttatataaatataagtttcgagtgatttaatgattatgatttttcggagagttttaggttacgttttttatttttatttgttgggtaggagggtgggtggaggtattttagggtaaggttttgttggttttaaggtataaataggggtaaagtttttatttttttttaagatgtagttcggttttatttgtaattaagttttagacggaagttatttatttatttattaagtatttatattggcgatttaataggaatagtagttggaatttattgagtttttgttgggtattattgaattttaataatattttagaataatgtttgatatagtagattttttagtatgtgttgaatgagtgattttaagaggtttggtatattattgttatcgttttaaggaggatatttaggtttatagaagtgtattaatttggtttggtgcggtggtttacgtttgtaattttagtattttgggaggtttaggtaggtggattatttgaggttagaagtttgaaattagtttggttaatatggtgaaatttcgtttttattaaaaatataaaaaattagtcgggtttagtggagggtatttgtaattttagttattcgggaggttgaggtaggagaattgtttgaatttaggaggcggaggttgtagtgagtcgagatcgtgttattgtaatttagtttggggaataagagtaaaattttgttttaaaaataaaaaataaataagaaaaagtgtattagtttgattcggcggtgttaggttttttattaggtagttagtttggtattagaattcggattttttagatatatattttgtgtaggttttaggagtttggcgaggttaggttttgtttgtttagtttgggttttttttggtttttttagtagtagtaatagtgatttcgtattttttttttttttttttttattttttttgtatattagagatagtgtattagttcgttagtttattatgttaggttagtttatagtttttttgggtgtaaattttttaaatattttaagttttttgtgttgggaagttatcgttgtgtaggtgagaggaaagggttttttttgttaggtagaggttgagtttttattagggtatatggttgggtgtgtggagtatgggttgtagattagtttttatttattttttgtgtgaggtttaattttgatatttattgtatgtagttttgttagcgaaatgaagggggtaggtagagaataatatttgtggatcgagtgtttttgtgggttaggttatatgttaggtatcgtagttttgggcgggtattaggacgtttgttttatgaatgaggttattggtaattagaagaataagtgttttgttcgtggttataggaggtagttttaggatttgtagttagaatttgattttttaggttggattttttttgttttaggtgttatgatgattagggtttaatgagttttagggtgatattttgtgtttatttttatagtttggtcgtagttggtttttaggaatttattttatttatgcggttaggttttgtgtcggatatcgaggtatttttgtttttgttaagttttggggggaaacgttaggttgtaggtaagagagagtgaaattgaggatagtttagaatttagtgttgagtatagagggtttttatgtttgtttggggtggtagtagaagaggtgggaaggttttttggagtaggaggaagtttagattaatttgatttttttaggggtttaggaagttttagtacggtttttagggtagggaggttgttaaggggtgtttggttaaggggtgatttttattatttgcgttatagtatagttagggggcgttgtgttggtagatgttgtaggtttttttttgaggaattttattgtgggaattatagtagtttttgtgtatttttaaatattgttttttatttttgaggatttttgttttttttatttaattatttatttatagtagaaagagttttggtttaggagttagagagttttttaaattaatgtaaattttattttattgtttaattggttgtgtgatgtgggtgtgtagggtttttgggtggtttttgttttttataatggagttttttatttttattttttagagttaagattaaataataaatgtagaggggtaattattatgtattatatttggttggttttaataattattaaaaacggtttaggtcgggcgtggtggtttatatttgtaattttagtatttcgggaggttaaggcgggcggataacgaggttaagagtttaagattagtttgattaatatggtgaaattttatttttattaaaaatataaaaattagttgggtatggtggtatgagtttgtagttttagttattcgggaggttgaggtaggagaatcgtttgaatttgggaggtagaggttatagtgagtcgagatcgcgttattgtattttagtttgggtaatagagtgagattttattttaaaataataataataataataatattgtattattttttttattatttttattggtggttttggaattgttagtagtaaatttaaaattttagaattttagggtttggtgggattttagagatttgaggttattttgttttagtttttttgtttgattggtattttttataaaggtttgtgggttataaaggagggtgtgaaggtaggttgtgggtgttagggaggggtagaaattaggtgtttgtgtgatttagaagtcgggattattgtaggtgagggtgttttgggagtggaggattttaggacgtaatcgttttaggtttatgttagaaggatatatagttgtattgaagtaagcgtgagtcgtaggttggatttagggtattttttgaggagtagagtttgggagttttttttggatttttttagtttggttttttttgtttatttttttttttaattattagatattaggttttgaggattgttgtgagtattttagaataaaatttttttttaaaaagagggatgaggttagggatggtggtttatgtttgtaattttagtattttgggaggttgagatgggtagattatttgagtttaggagtttaagattagtttggataatatggtgaaattttatttttattaaaaatttaaaaattagtcgggaatggtggtatatgtttgtggttttatttatttgggaggttaaggtgggaggatcgtttgagtttgggaggcggaggttgtagtgagttgagatggcgttattgtattttagtttgggttatagaattatagtttgttttaaaaaataaaataaaataaaaggttagggttgggaaatagggaaagtttttaggttggtttttgtaaaagttagggaggggtaatggtgttttttagtttgtaagagtttatggcgagttttttaggaattttgttaattggttgttaaatatagttattattaaaaattgaattatattaatttatgattaaacgggttaagtttaaaataggtaattttttaaaaagtatgaatttttagggaagagttaggtaaataaaggtagttggtattacgtgggttttagattagggattaggttcggttttaattttgggtgtgttttttagtaattcgttttgtcgtttttttttgttttagtaagtttttggtttattttttagggttattgtgggaattaagttatattacgggagtatttagtaaagtgttatattaagtagggttggataatgttagttttttttatttattaataagttattggttagtgtttttttttggggtttttgggttagcggggtttcgtttttttgtttttttttttttttttcgttttttttggtgttattaggttatttatttttatttaaggttttttattcgttattcgttacgattttattcggtaggtcgttttaagcggatagttatttttagtgttaacgtagcggcgcgtttttttttttagattaagttttttttttcgtttaggtttcgcgcgggagtttcgcgtcgagtatttttaaagagttattttttttttttttagaaaggtaagtcgttacgtcgcggtagttattcgggtttcggattttcggttttttggtttcgttatggttttcgcggcgcggcgtttttttttcgcgttcgtagttgtttttttttttcgttattaatttgtagcggattaaagggaggagatttcggtatagtttatcgtcgcggttattcggagtcgttgttgttcgcgttttttattggtcgggtcgtgggggtacgttcgtttcgtttagtttaggttcgcgcggttttcgcgttattcggcgttttttttagattttcgcgggtttcggaggtttcgcgcgcgaggttggtaggtgtcgggcgcgaagcggtcgcgcgggggaggcgcgggatggcggcgggcggcgtagggtttttttttggcggtggcgcgatggtgcgcgtcgtttggggagttgcggtcgggggtttgaatcggttaatttttttagtcggtcggggcgagcgttagcgcggcgttcggggcgagtgagtgcggggcgggggtagcggtcgggcgtttgggtcgtcggtcgggttatttgttgttcggggaaggatagcgttgcgagagtgggacggggtgtttcgggaatttttgatttatttagggtagagggtagcgagttacgggtcggattcgggtattttggaggcgggcgagttcgggttgtttggggaggtcgtaggcgatggcg

SEQ ID NO: 1851 - DNA, 5378 bp, Artificial Sequence
  chemically treated genomic DNA (Homo sapiens)
tgtagtgagttgagattatgttattgattttagtttgggtaatcgaatgagattttattttaaaaaaaagaaagaaagaaagagagaaagaaagaaagagagagagagagagagagagagagaaagaaagaaagaaaggaagaaagaaagaaagagaaagaaattgtatagagagttgtttatttaattgagtaaatatgtagtgtataacgtttattgtagttaggtattttgataggaattaggatttatattttaatggaggagaaatgtagatatgtgaataaatgattaaaattttataaatattatgaaagaagaatgttttatgttaattttattgtgtataagaatgaatttattagtagaatatttgtatatgtatattgatgttaaatttttttaaatggtaataaaaataagagatgaattagtaaaaaaagtattgtttttttttttatagtttgagtgttattaaattagataataaagaataaaaattatagattagttattttttcgattttttgtttatatatttgagattattagtgtttaaatagtttatttttgatttagattttgttatatatgtttaagcggagggaataatttttatttatataaggaatagaatggttttgagatagaattttaaagaattaattacgtgaattttttttttttttatttaattttttggaaattgtataaagaattgagattattggataagtgatatattttttaattaatttttttatattgtaaagaaaataatgtttaaattttgttttttattttaaaaagatttgtatatgttattatagtttaatagtgtttgatatattttattattaaaattgtgaaagtattttgaatgagttatttattaatttttatgtttttttatgttatttaatttttatttttgttaaatatatttttgggttttgaaagaagtatttaaatatttaatttttttgttttttttgaaatatattttttttttttttttgttaaagaagtggagataagatgatgttgaggattatttttttttaggaaatatataataagtagataaaatgatttttgtattttggatattattttttttttagagaatattattgaagtaaaattgattaagtaaagtagaattgtggatggtaggttagaaaaatttgtggtcgttattgttatattataatttgtagtagttgtatttttaagttttttttttttacgttttttttagtttgttagtttagtaggaatgaatgggtttcgtagagtattgtgtgagtagtgttgtagattttgaaaatttgtttttgaaaattaaaaggaaaaattatttgtaaaaaataaatttttaattttagtggttaaatttatttatttttgaaattttattattaatatttagtggtacgaagtttagtgatttatttcggatcgttgttgagaatggaggttttttaaatattaagataattttattttaatttattttttaggggtgaaagtaaagtttttttgttttaagggataattgagtaattattagagtttttagttgaatagtaagggtgtgaggtcggttaaaatttttatagttagaagtttattcgtaggaggatatttattaaattgatataagaattatataaaaaggaaatgcgtttattgagttgatgttttatagttgtttgtggatggaggcgatattgtaaaattttttttatattatattattttttttttttttttaatttggtgtattggttattattattattttgtttgttattttttagataaaagtttaatttagatatgtaattgtatatatgtagtattaatttttgagtttaattatttttttttgtatttttttaattttttattaggaaagatgatttattttaaaggataatgtattatataaaatgtgttatatagattttttataaaagaatatttttagtaaattattataattattttacgtttatttgtttttgattattgttatgttagaattatttgttcgtttttttatttaatatggttattttttttattttttagttttgtttagttattcgggtgtgcgtgtgtttgtagaagaagttttgaaaataagttagttgaatttgagaaattatttggaatgatcgtatggttaaatttttttttaaattaaaaaaattatatatatttaggttatttcgagtattatgtcgatttttttttttattttacgtttaaagtaattagagatgttgaattttaataaaatgtagtcgagtttaatatattacgagggaggggttggtagttatttttttttaaatatttaatttaaatataaattgttattaagggtagggggaaaaaattttatatagataattttaattgtagtttgaggtttaagtaatagaaagttttttaattttagttttttttttttttttttcgtttttttttaatttcgttttataatggatgttcggtcgattgtttttgtacggtttttttgtttaaaggatgtaaatagtttacggatgttagagaaaaaggggtgggggagagattattttattttacgtcgtttgtattaattattagttttttgttatggtttttttgggtagattgggggtttggattaataggaaaaggtttcggtttatttttatggtgatcgagttgtatatagggagtcgtattcgtttatgtgtcgtaggtttttttatatcgatcgtttaagagtcgcgttgtaagaagtaataatttttttttttcgttttcgttattagttcggtagtcgcgaagtagtaattatggtgagaatcggtttcggttttttgtggtcgttgggtggagttagcgtttttaggttttatttggaaaatttttaagtttttttttttcgtaagttttttgggcgagggtggtggtatgttttgtgaggtttagtttagttttaaatttttaagtttcgtcgtcgtcgtagtgcgggtgtaggaatcgggttagtattgcgtttagggcgtagtagagcgttggggaggaataaaggcggcgtttaggcgtttgtgttattcgagagattttcgggggtcgcgggtagttcgtttgtcgcgatcgaggggtttggggcgtttcggttgggtttcgtgtttgtgcgtacggtttcgttgatgttgaggggttattttttgtttcgcgttgttttttggggatcgggagaggaggaggtatttaaaaagagcgggggcgttgggcgagttgggggacgtgggagggggaacgggaataaagcgtagtttagggttagcgtgggaagatttttcgcggtttttggcgttttggaaagatatttatatattttcgggaaaatatggtgagtttttgtcggagttttcggtagcgggtgttagggcggcgtaggggcggggttgtttgtttttggtttttatggcgttggagttattgggcggggttcgtttttattgaattttttttgttaggagttgattgaaaaaaaaataaaaaaattttttattattgcggaattgtaggttttaaaagggttttttttattattataagttagatgattttttttttttttgagtaaaattataatttattttataagttttttaatgtttggtttggggacgttttgttttgatcgattgaagtgtgtgtgtgtgtgtgtgtgtgtgtgtgtgtgtgtttgtgggacgttttgttttgatcgattgaagtgtgtgtgtgtgtgtgtgtgtgtttgtttgtttgtttggattgtacgtttagcgagggagaaagtttattttgtgagttttagggtattttgatggttaggatttagggaaacgttttttttcgtcgttttttcgtttcgtttttattatattagcgaatagataatgaaagtggtagttttaaagattatagagaagaaaatttttattggatgtaaagaatatgaatattatgtgatgggtagagaattttaggatgaaaatattattttgttgttttaaataaatattttattatttttttattgggtttttattttttggtatttttttatgtgatgtttgtttttaatttaggaatttttgtgtgtgtgtgtgttaagatacggataattttttagtttttatagtggagaagatttggaaaaatttttttttttaaaaaaaaaagtaatgaaattgttatagataaagaagaattatatttcgtatttcgttgttttttgttttagtgtattttaattaatttattttaatttaggtatatggtttcgggcggggttagaggaggaaaattggtaaaatagtataatgagattatgtaggtagttgttggaaatagagtttgttttgttaaataatgtagtagatagtataggttagtattaggtatagtaaatatagtaatgtagtaatgtagaaggtagattttgtttaaatttttagtattgatggattttgtagatagattgtagaagggtgtggttttttgttttagttgtagtatagatgttcggattataatattaagttttatttagaggaaatttttatttttatttaaaagggaagaaagtagtaaaattaattttaattaagttataattggatttattttattttataaaatttgtgttttgaatattgaatattttttaaatatgaaaaattttttatttaagtatggtagtaggtataatgggttggtattacgtgttgaatagggttaaggcgatattattatttagattatatttatatgtagtatttgtagtaggtgattttttttaatttttgtatcgggtttggggatatgatttttaataatttagaaaaatatttgtatattattagaaatatttttgaaattttttataagtttgaaatgttaatatattttaattttacgatttttttattttttttttttatagcgtgagtgtatttttatttacgttggttaggttggtgtttagattggtaatgtttgttgggagttttattgtttggaatacggtatttagttcgatggttagatgttaagtgataagattattgggggaggagatgatttttttaatattttttttagtgagacgggggttggtaagtatgtgtttcgggtagtgtttgtagatttggaatttatagttattggtgagttgattttagtaatttaagtgagattttagggtgttgggataggaggtttgttttggggggtttcgttggttatttatttatttttttttttcgtttttcgtttttttttttttttttttttgttttttttttattatgttttttaga

SEQ ID NO: 1852 - DNA, 5378 bp, Artificial Sequence
  chemically treated genomic DNA (Homo sapiens)
tttggagaatatgatgggggaggagtaggggggaggaggaggagggacgaggagcggggagggagagtgggtgagtgattagcggagttttttaggatagattttttgttttagtattttgggattttatttgggttattgaggttaatttattaatgattgtgggttttaagtttataaatattgttcggggtatatgtttgttagttttcgttttattgaagaaggtgttgaaggaattatttttttttttaatggttttgttatttggtatttggttatcgggttggatgtcgtgttttaggtagtagagtttttagtaggtattgttaatttggatattagtttggttaacgtggatggagatgtatttacgttgtggggaggaaaagtgaaaaaatcgtaaaattaaggtgtattagtattttaaatttataggaaattttaaaaatatttttaataatatatagatatttttttaaattattgagggttatatttttaggttcgatataaagattaaggaaaattatttgttataaatgttgtatatgggtgtggtttgaataatgatgtcgttttggttttgtttagtacgtggtattagtttattgtgtttattattatgtttgaatagaagattttttatatttaaaaagtatttagtatttaaagtataaattttgtaaaatgaagtaaatttaattatgatttaattgggattaattttattgttttttttttttttaaataaagatgaaagttttttttgaataggatttgatattataattcggatatttgtattgtagttgaggtaagaagttatatttttttgtagtttgtttgtagaatttattaatattaggagtttagataaggtttgttttttgtattgttgtattgttgtatttgttgtgtttggtgttagtttgtattgtttgttatattatttaatagagtaagttttatttttagtagttgtttatatgattttattgtgttgttttgttagttttttttttttgatttcgttcgggattatgtgtttgaattgaaatgaattaattaagatgtattggaataaaagataacgggatgcggagtataatttttttttgtttgtagtaattttattatttttttttttaaaaaaaaaggtttttttagattttttttattgtaaaagttgaaaaattattcgtattttaatatatatatatataaaagtttttaagttagaaataagtattatatgaaaaggtattaaagaataaaagtttagtggaaggataatgaaatatttatttaaaataataaaatagtatttttattttgagattttttatttattatataatatttatattttttgtatttaatagaggtttttttttttgtggtttttagggttattatttttattgtttattcgttgatgtggtgggggcggggcgggggggcggcggggaagggcgtttttttgggttttgattattagggtattttggggtttataaagtgggttttttttttcgttgaacgtgtagtttagatagatagatagatatatatatatatatatatatattttagtcggttagggtagggcgttttatagatatatatatatatatatatatatatatatatatattttagtcggttagggtagggcgtttttagattagatattaaagagtttgtgaagtgaattatgattttgtttaagaaaaaaaaaagttatttaatttataatagtgaagaaaatttttttggagtttatagtttcgtaatgatgaaaggtttttttgttttttttttagttagtttttgatagaagaggtttagtgagggcgaatttcgtttagtggttttaacgttatagaagttagaaataaataatttcgtttttgcgtcgttttgatattcgttgtcgggggtttcggtagaaatttattatgttttttcgggaatgtgtgggtatttttttaaaacgttaaagatcgcggagggtttttttacgttaattttaggttgcgttttgttttcgtttttttttttacgttttttagttcgtttaacgttttcgttttttttgggtgtttttttttttttcggtttttagagaataacgcgagatagaaagtggttttttagtattagcgaaatcgtgcgtatagatacggggtttagtcgggacgttttagatttttcggtcgcggtagacgggttgttcgcggttttcgaaagtttttcggataatataggcgtttaggcgtcgtttttgtttttttttagcgttttgttgcgttttgggcgtagtattggttcggtttttgtattcgtattgcggcggcggcggggtttgaggatttggggttaagttaaattttataaaatatattattattttcgtttagagagtttacgaaagaaaagagtttaaaggttttttaagtagagtttgggggcgttgattttatttaacggttataaagagtcgaagtcgatttttattatggttgttgtttcgcgattgtcgagttgatggcggagacgaagaggagaggttgttgttttttatagcgcgatttttaggcggtcgatgtaagagaatttgcggtatataggcggatgcggttttttatatataattcggttattatggggatgggtcggggtttttttttgttggtttagatttttaatttgtttagagaagttatgataggagattggtgattggtgtaagcgacgtgggatgaggtaattttttttttatttttttttttttagtattcgtagattgtttgtattttttagataaagagatcgtgtagaagtagtcggtcgagtatttattatggggcggggttggggaggggcggaaggagaagaaaggggattggggttagaagattttttgttgtttaaattttaaattgtagttaaaattatttatgtgaggttttttttttttatttttaataataatttatgtttagattaaatatttaaaggaaaatgattgttagtttttttttcgtagtatattaaattcgattatattttgttagggtttaatatttttaattgttttaaacgtaaagtgggagggaaaatcggtatgatgttcgaaatggtttgggtatatgtgatttttttaatttaaaaaaagatttagttatacggttattttaaatggttttttaggtttaattaatttatttttagagttttttttgtaggtatacgtatattcgaatagttaaataaaattggaagatggaaagaataattatattaaataaagaagcgaataaatagttttaatatggtaataattaagagtaagtgaacgtagagtagttataatggtttattagaggtatttttttatgagaagtttatgtaatatattttgtatggtatattgttttttggaatgaattattttttttgatagaaaattgggaaaatataaggagaaataattgagtttagaagttagtattatatgtgtgtagttatatatttgaattggatttttgtttggaaagtaataagtaaaataatagtaataattaatatattaaattaaaaagaagaagagaataatataatgtaaaaagaattttgtaatgtcgtttttatttatagataattgtgaaatattagtttaataaacgtattttttttttatgtagtttttatgttaatttggtaaatatttttttgcgagtgggtttttaattgtgggaattttagtcggttttatatttttgttgtttagttagagattttggtggttgtttagttgttttttgggataaaaaggttttgtttttatttttaggaaataaattggagtaaaattattttgatatttaggaagtttttatttttagtaacgattcggagtaagttattggatttcgtattattggatgttggtgatgaaattttagaggtaaataagtttggttattaaagttgaaaatttattttttataaataatttttttttttggtttttagagataaatttttagggtttgtagtattatttatatagtgttttgcggaatttatttatttttgttaggttggtaggttaagaagggcgtgggagggagggatttgagaatatagttgttgtaggttgtggtgtgataatggcgattatagatttttttagtttgttatttatagttttgttttatttgattaattttgttttagtaatattttttggaaaaaaaataatatttaaaatgtaaaaattattttatttatttattgtatattttttaggaaaaaataatttttaatattattttatttttatttttttagtaaaaaaaaaaaaaaagtatattttagaagagataggaggattaggtatttgaatgttttttttagaatttagaaatatatttaataaaaataagaattaaatggtataaggaagtataaggattaataagtagtttatttaaaatatttttataattttaataataaaatatattagatattattggattatagtaatatgtataagtttttttggaatgagaagtagagtttgaatattattttttttataatataaaaagattaattaagaaatatgttatttatttaatagttttagttttttatgtaatttttaaaggattaaataaaagagaggagggtttacgtggttgattttttgaaattttattttagagttattttgttttttatgtaaatgagggttatttttttcgtttgggtatatgtaataagatttaggttagaaatagattatttaggtattgataattttaaatatataaataagagatcggggaaataattaatttataatttttgttttttattatttgatttaatagtatttaaattgtggaaaggaaaataatattttttttattagtttattttttatttttattgttatttaaaaaaatttgatattaatatatatgtataagtattttgttaatggatttatttttgtatatagtaagattagtataaaatattttttttttataatatttgtagaattttaattatttatttatatgtttatattttttttttattaaaatgtaagttttaatttttgttaaagtgtttaattatagtagacgttatatattatatgtttgtttaattaaatgaatagttttttgtgtagttttttttttttttttttttttttttttttttttttttttttttttttttttttttttttttttttttttttttttttttttttttttttttttttttttttgagatggagttttattcggttgtttaggttggagttagtgatatgattttagtttattgta

SEQ ID NO: 1853 - DNA, 6120 bp, Artificial Sequence
  chemically treated genomic DNA (Homo sapiens)
ggagggagggagggagtggggggaggacgggattaattcgttataatagttaatatttatataatattgtggggtaggtggtattgtgagtgtttttatatatttatttagtttttattataattttaggaagcgggtattattattattgttattttatagatgaggtaattaaggtagagagaggttaagtaatttgtcgaggttatatagttaagaagtgatagtgaggatttgtatttagtttattaattttaggttttgtgttttttaatagttagggaacgcggtaggagggtattgagttttttaaacggttttagttatgggaagtagagatgagtttgttttgtagataattcggtatgttttggatattttagattatggggagaatgatagttgggagtaggttatatatttttgagaatttgtgagattatgtttaagttatagtagaagaagatatagtatttttttatttttaatgttgaaggtaaaaaaaaaaaagttataaaggaataaaaatatttaaatagtttatgaataggaaaaatataaaggaatataatatattaagtatttaaaaaaatttcgagaataggggatatatttgtgttttttagtattttttaagtgtttttaattttataattaggaaatatgtatataagatatatgtatatataattgttgtgtatattgtatgtatttaaaaaaaatttggggggttatagtttaatgagaatttgatattaagaataatatttttgagattagtttggttaatatggtgaaacgttgtttttattaaaaatataaaaattaattaggtatggtggtgtacgtttgtaattttaggtattcggtaggttaaagcgagaggatcgtttgagtttgggaggtagaggttgtaatgagcgaagattatgttattgtattttagtttagtcgagattttattttaaaaaaaaataaaaaatgatatttttagttttgaaaggttttagatcgatatttgtaatatgaatgttatattttggggtatggtttattttagaaagtggttaaaaattttttatatatttattttgtattattatagttatttgatgtaaaaaaaaaaaaaaattgtaaattttggtggggttgatattttaaaattaaatttaattggagtttagatttttattttaggtaattttttgaaaaggttatatttttttaaatgttttgaataaaatttttttatttttataaagagatgtttttatttaaaaaatagtagataggggttgtattggatgagttttatgggaaagagaagttggagcggagagtgtggttagttttttgagggtataaataggatgtaagattgtattatataaatttagataattgtattgttgggatggtttttgggtttttattattttgtagaggaaattagtgtttttgaagttttaggatttttttatttggattaattaaatttattttaattagattacgattgttatttttagagatggtattagtgaatagtaacgatattattataatattatatatttatagggtacgttttattagaatatttttattaggatttttttcgttgggttttttgaagtagtaggcgggaagggtaggtaaaagggtaagagtttatgtttttttgtgaaagatagatgtggtttagttttttatttggaatatattttttagtttgaattttgttattatatttgttttttttcgtttttcgttttttatttcgttaatgatgtttttagggtaggggtggtttagatattgcgagtggtattttgtttaaagtaggaagtgatttgaggttggaggaggttggtttttttttttttttttattttcggtttatttaatagtcggtggagttgtttttttttagatattgaaaaatatatgaaaggggagagattgttttttaaaaatttattttagggaaggggataattagtaggttttatttttttttgttattatttgtatcggtgttgtataaggtcgagttgtttagtgatagcgaggtggggttggggatatttatatttgtcgcgagggaggggagagtaggaatttacggttttagatgagttattttaggtagggtaggtattatttaaaatttcgcgtgtgagtttttttgattatatattaatatatattacgggcggtatcgagggaggagcgcgttagagagaagtaggttgggcgtgaattgttaggtaggagaaggtcgatttgggtagaatatttattgttagcgatttagagtagataattaggtatttggtttgcgttcgtgaatattgttatggatttattttttgtgcgtttattaatgtttagtttacgtatagtgttttttagttttttaacgtaagaaaaatttatttttagagaagtttagagaggtgtagtgatttgttggaggattgagttaggaatagtagagtgggtatatgttttataggtcgggaaacgtttagttgttaggggttttcgtgtttttagtgttgttttttttaggttttattttttgtttttatttggttttagattttacgttgaattaaaatataaaggttaagaagtaattatttttggaaaaatttttttagaattgtgtaatgagtgaaggtattttaaggagagttattttttggagaggatttggaaggtttcggttgtggtgaagagttaagatgtgagagttggggtgggggtggggagaaggtggaggttaagttttgggtatttgggagtagtattcgagggataggttgtttattgggggtttagtagtagggagaggggagagaggaggagaaattttaggaaatttgtttttattttgagaagaggtattaggtatttgtttatttatatttgggaggatgttgggcgttttttaaagttggggtgattaagatttaatttggtttaagaggttatttatagatatttggttttagtttttattttcgatatagattaattattgaggtggtaggtagggtgtatattaggaatgatagtattattttgggttttttgttgttgttttttattgagacgtagtttggttttgtcgtttgggttggagtgtagtggcgttatttcggtttattgtaagtttcgtttttcgggtttacgttatttttttgttttagtttttcgagtagttgggattatagatgtttgttattaggttcggttaatttttttgtatttttagtagagacggggttttatcgtgttagttaggatggtttcgattttttgatttcgtgatttattcgtttaagttttttaaagtgttgggattataggcgtgagttatcgcgtttagtttattattttgggttttattaaggtatttttattttataaatttaatgtgtttttatatatggttttttattttttattataaagttagttttaaggtatttgtaattattattattatatagttggaatgtgttgggaattaaaggtagtttttaagtttttgttatttagtttatcgtgtagggttatttttgtgaataattaagttaggtttttattatagtttatttaagtttttaaaatttatttgggttttttatttatataaaggttttagattttttttttttttagttttgtggttggttaggttttttaatttcgttttcggagttatgaaattggggtagtaataatgtttattagaagtcggtggtagttaataaaaatatgcgtaagtgagtagtaaatggaaattaagtatgtaattttatattttttaattttaaaataagttatttaatataatgtatttaaaatattattattttgatagattattaatatttaagaattagtaatgaaatattttatattattttaatttattgagtttataaaagttagtgtgttttttatatttaatagtttattttagtttagattatttacgttttaatgttcggtagttatcgtgtttagggtttatcgaattggttagtttagtttcgatagtttttgtgaggattaggcgatttaaggggtgtaaggggtagggttattagttgatatattaacgtggtagatatattttttttgttttttttttttgatatatatatatatatatatatatatatatatatatattcgtagaattttttatatttaaaaggtttttataaggacgtaggagtttaaagcggatatgtgataaatttagttttttgatagtttttttaattttcgttttcgattaagttattttttttttttgtaggggcgaaaggtcgtttatttcgttattttggtattttttttaggtagttgttcgtcggtttttcgcggttttttatttttttttacgttgtttattttatttttataaacggcgtttaggattttgtttaggatgcgggaaatttttgttattcgttggagagtttattgtaaatgggtttttaattttcggttttttattttaaagggtattcgacgttttttttcgtttttaggaggcgaggattttgtttcgaggtagtttttttttttggtttcggggttttcggtttttagtttttttcgggggtttagagtgggcggttcggggtggggatcgcggcgtgagcggaggatttagcgttaggggtcgttcgtgttcgtggatcgggtagggggttgcggttgggttcgaggttcgggtatcgtatttatcgtcggatcgcgaggtcggtcgtttattttagatttagcggtagtagtaatagggcgagcgtttttatatttcgtatcgcgtttcggttttttttcgcggtgtcgtagttttagtcgtatcgttttcgcggttatagtttcgttcgttatgacgttatcgggtagggcgggttttcgggtataaaagatcgagttgggggggcggcggtaggtttttgcgtagtttagttcgtcggtttacgtcgcgtatcgtttcgagggttagcgttattcgtttcgtagtcggtattatgcgcgagatcgtgtatatttaggcgggttagtgcggtaattagatcggcgttaaggtgggtttatcgttacggaggggttcggggttgggatcgagggtgcgggttggggtcggggcgggggttggaggtcgcggcggtttcgggttggtcgggtggtatatttcgcggcgaggtcgtcgggcggggttcgggaggttgtatgattcgttaggatgttcgtagcgtcgtagttgtgtgtgcgtttaatcgggggtttttcgatttttttgggatatagtttttttgcgggacgcggttggtatttttttgggtgtatttgttttagaaatttgggtcgggggtacggttatatttattgcgttagttttatgtgaatttaatttgtatatttttttttacggtttgaatgaaaatatgtagtgttattggattggtagatgtaatagaggcgtttttttgggtcgtataggtaagggtgttagataaatttttttgttcgggtattgttttgatatgatgatatataacgcgatagttttgttgttagttttcgaggcggtaggtgattgcgttgggtgggggttgtaattatcgatcgttgtgtgggaggtagtagcgggtttggtgtatgggtgggggcgggcgttagtataaggacgtggtttttttgagaatcgttatgttgtttatttagttttttcgtcgtaaatttataatgtagttagcgtttttacgatggttagttttttttattgtcgtttaggtgtttttttaggtttttgttgtttttcgtttagttttttcggtggttagtgttagtatgtagatcggtggtttaaatttgtattgttgtaggagtgtttgggatttgtgttaagagagtttgatttttggaggtagttatagagtgggtttttttgtttttggttttgttacgatttattaattatttcggatgtaatggtatttagttttgtttggggtgatatagtttttttgtattttttttttatttttttattttttttattttttttttagaagggtatttgtt

SEQ ID NO: 1854 - DNA, 6120 bp, Artificial Sequence
  chemically treated genomic DNA (Homo sapiens)
agtagatgtttttttagggagagggtggggagagtagagaagtggagaaggggtatagggaggttgtgttattttaggtagggttgaatgttattgtattcgggatgattgatgggtcgtggtaggattaaggatagggggatttattttgtggttgtttttagggattaagtttttttggtatagattttaggtatttttgtaatagtgtaggtttaagttatcgatttatatgttggtattgattatcggagggattgggcgaagggtagtaggagtttgggagggtatttgggcggtagtggaaggagttggttatcgtgagggcgttggttgtattgtgaatttgcggcggggaggttgggtgggtaatatggcggtttttaaagagattacgtttttgtattggcgttcgtttttatttatgtattagattcgttgttgttttttatatagcggtcggtaattgtagtttttatttagcgtagttatttgtcgtttcggggattggtagtaagattatcgcgttgtatgttattatgttaagatagtgttcgagtaagggaatttatttaatatttttgtttgtacgatttaaagggacgtttttgttatatttgttagtttagtgatattgtatgtttttatttaaatcgtagagaaaaatatataaattaaatttatatgaagttagcgtaataaatatgatcgtattttcgatttaagtttttgagataaatatatttaggggaatgttaatcgcgtttcgtagaagggttgtgttttagggaaatcgaaaggttttcgattaaacgtatatatagttgcggcgttgcgggtattttggcgggttatgtagtttttcggatttcgttcggcggtttcgtcgcggaatgtgttattcggttagttcggggtcgtcgcggtttttagttttcgtttcggttttagttcgtattttcggttttaatttcgggttttttcgtggcggtgagtttattttggcgtcgatttggttgtcgtattggttcgtttggatgtgtacgatttcgcgtatggtgtcggttgcggagcgggtggcgttggttttcggagcggtgcgcggcgtggatcggcgggttgggttgcgtagagatttgtcgtcgtttttttagttcggttttttatattcggggattcgttttgttcggtgacgttatgacgggcggggttgtggtcgcgggggcggtgcggttgggattgcggtatcgcgagggggagtcggggcgcggtgcgaggtgtgggggcgttcgttttattgttgttgtcgttgggtttagggtgggcggtcggtttcgcggttcggcggtgagtgcggtgttcgggtttcgggtttagtcgtagttttttgttcgatttacgggtacgggcgatttttggcgttgggtttttcgtttacgtcgcgatttttatttcgagtcgtttattttggattttcgaggggggttggggatcgggggtttcggaattagggggaggggttgtttcggaatagggttttcgttttttaaggacgggaagaggcgtcgagtattttttggagtagggggtcggaaattgaagatttatttgtagtgggttttttagcgggtggtaaaggtttttcgtattttgggtagggttttggacgtcgtttgtgggggtggggtgggtagcgtggagaggagtggggggtcgcggggagtcgacgggtagttgtttgaaaggaatgttaggatggcggggtgggcggtttttcgtttttgtaggggaggaagatggtttggtcgggggcgggggttgggggggttattaaagggttggatttgttatatgttcgttttgggtttttgcgtttttgtaaaggttttttaaatgtggaaaattttgcgggtgtgtgtgtgtgtgtgtgtgtgtgtgtgtgtgtgtgttagagaggaaagataggaggaatatatttgttacgttgatgtgttagttgatggttttgttttttatattttttaggtcgtttgatttttatagaagttgtcggagttaggttggttagttcggtagattttaggtacggtggttgtcgagtattgaaacgtaggtaatttgaattgagatgggttgttaagtgtgaagaatatattggtttttatgggtttagtaagttaaaataatgtgaaatattttattattgatttttaaatattgatggtttattaaaataatagtgttttggatatattgtgttaaatgatttgttttgaaattagaaaatgtaaaattatatatttggtttttatttgttgtttatttacgtatatttttgttgattattatcggtttttggtaagtattattattattttaattttatagtttcgaaagcgaggttgaaagatttgattagttataaagttaggaagggaaggaatttaaagtttttgtataaataaaaagtttaggtgagttttaaaggtttgggtgggttgtggtaaggatttgatttaattatttataaagatggttttgtacggtggattaggtaataggggtttggggattgtttttggtttttagtatattttaattatataatgatgataattataggtgttttggagttggttttgtggtaggagatgagaagttatatatgaaagtatattgagtttatggagtaaaaatgttttggtaaaatttaaggtgatgggttgggcgcggtggtttacgtttgtaattttagtattttgggaggtttaggcgggtggattacgaggttaggagatcgagattattttggttaatacggtgaaatttcgtttttattaaaaatataaaaaaattagtcgagtttggtggtaggtatttatagttttagttattcgggaggttgaggtaggagaatggcgtgaattcgggaggcggagtttgtagtgagtcgagatggcgttattgtattttagtttaggcgatagagttagattgcgttttaataaaaaataataataaaaaatttaagatgatgttgttatttttaatgtgtattttatttgttattttaatagttggtttgtatcggaggtggaaattaaagttagatgtttgtgagtagttttttaggttaagttaggttttaattattttagttttaggaagcgtttagtatttttttagatgtaggtaggtaggtgtttagtgtttttttttagggtggggatagattttttagaattttttttttttttttttttttttttgttgttgggtttttagtggataatttgtttttcggatgttatttttaggtatttagggtttgatttttattttttttttatttttattttaatttttatattttggttttttattatagtcggagttttttagattttttttagagaatggttttttttggggtatttttatttattatatagttttgaaaagatttttttagagataattgttttttggtttttgtgttttaatttagcgtgaaatttgaggttaaataggagtagaggatgagatttgaaagggatagtattagggatacggggatttttagtagttgggcgtttttcggtttgtggagtatgtgtttattttgttgtttttagtttagttttttagtaagttattgtatttttttgagtttttttggaaatgggttttttttacgttggggagttgggaggtattgtgcgtgaattggatattagtgagcgtatagaaaataaatttatggtagtgtttacgggcgtaggttaggtatttgattgtttgttttggatcgttggtagtgaatgttttgtttaagtcggtttttttttgtttggtagtttacgtttagtttatttttttttgacgcgtttttttttcggtgtcgttcgtgatgtgtgttagtatataattagagaaatttatacgcggagttttaaataatgtttgttttgtttaaggtgatttatttgaggtcgtgagtttttgtttttttttttttcgcggtaagtgtagatatttttaattttatttcgttgttattaagtaattcgattttgtatagtatcgatgtagataataataggaggaaatagagtttgttaattgtttttttttttagaataggtttttaaggagtaatttttttttttttatgtattttttagtgtttaaagaggagtagttttatcggttgttgggtgggtcggggatggggaaggggaagaggattaattttttttagttttaagttattttttgttttagataggatgttattcgtagtgtttgagttatttttattttgaaggtattattggcggggtgaggggcggggggcggggaagggtaggtgtaatgataaaatttagattagagaatgtgttttaggtaggaggttgagttatatttgttttttataaaaggatataagtttttatttttttgtttgtttttttcgtttgttgttttagagggtttaacgagaagggttttggtgagaatgttttagtgaaacgtattttgtgaatatgtggtgttatgatgatatcgttattgtttattgatgttatttttaagggtgatagtcgtgatttagttgaaatagatttagttggtttaagtaagagagttttggaattttaaaaatattagttttttttgtagaatgatgaaaatttaaggattattttagtaatataattgtttaaatttgtatggtatagttttgtattttgtttgtgtttttagagaattagttatatttttcgttttaattttttttttttatgaaatttatttagtgtagtttttgtttgttattttttaaataaaagtatttttttatgaagatggaagaattttgtttaaagtatttaaggggatgtaatttttttaaaaggttatttaaaataaaagtttgaattttaattaaatttaattttaaaatattaattttattaaagtttataatttttttttttttttgtattagatgattataataatatagagtaaatatatagaagatttttagttattttttggaatgggttatgttttagaatgtgatatttatattataagtgtcgatttggggttttttaaaattgaagatgttattttttgtttttttttgaaatggagtttcgattaggttggagtgtagtggtatgattttcgtttattgtaatttttgttttttaggtttaagcgattttttcgttttagtttgtcgagtatttgggattataggcgtgtattattatgtttgattaatttttgtatttttagtagaggtagcgttttattatgttggttaggttggttttaaagatgttatttttgatgttaaatttttattaagttataattttttaagttttttttaaatatatataatgtatatagtaattatatatatatatattttatatatatattttttgattataaaattagaaatatttagaaagtattaaagagtataagtgtattttttgttttcgagatttttttaaatgtttgatgtattatatttttttgtgttttttttatttatgggttgtttaggtgtttttgtttttttataatttttttttttttgtttttaatattaagagtgaagaaatattatatttttttttgttatgatttagatataattttataaatttttaaaaatatgtaatttatttttaattgttattttttttataatttgaggtgtttagagtatatcgaattatttatagagtaaatttatttttgttttttatgattaaggtcgtttagaggatttagtgtttttttgtcgcgttttttgattgttgaaaagtatagggtttagagttgatggattgggtgtaaatttttattgttattttttagttgtgtgatttcggtaagttatttaatttttttttgttttagttgttttatttgtaaagtgatagtaataatagtattcgttttttggggttgtgataaagattgaatgaatatgtgaaagtatttataatattatttgttttatagtgttatataaatattagttattataacgggttaatttcgttttttttttatttttttttttttttt

SEQ ID NO: 1855 - DNA, 6609 bp, Artificial Sequence
  chemically treated genomic DNA (Homo sapiens)
taataaaaatggtataaattaaatagatatttttaaatgatatttattaattgtgtgttatttttgttgttttgttagttttttttttttttgagtttttttttaaataaagttatttgggaaattgtgtttttttgtggtgattggtaaaaataatatgttttttgtagaaagaattaaattaaataatagtagtaggatataaggttttaggaaaatttatttgtgaaaaacggaaattttttttagtgaagaaaggtgaaagttatgagtaattagaaagagaaattgaattgaaaaaatatagaatgtaaattattttatttatatttaaattattggttatcggatgattaaaaagaagatatataatgttatgtagaaagattgagattatgataatagtttttatgaataattatttattttttgtatttttttattagttattttagtaattttttgatataagtgaagtgagtgtgttttttaataaggttaatgggtagttaagatattaattttttagtttgtataatttttgaaaaaaaaaatgaaaaaaaaaaatgttttttaagattttatatttttttatattttgattttgtattttttataggttagatttatgtttttttattttatttttaagttgagtttagaatgttagttattttaaagattaatatttatttgaaaattttatttgcggtattgttcgtattttaatttattgtgttttttattttttcgttttatttttggattgaaaattttatattttataattttagtttgttttttttatttttaaagatatttagatagaaaaatgtagaattagttgagtttatgaattaaattattatttaaagagaaagagaatgagtttttatatagggaaaggtgtttaaatattattaaggttattagggttatgaaagaagaataagtttttatatagttattgtgttgatatatatgattttatattttattttattaaaatttttttatttaaatagtagtttttttggagtgtttaaagtaagatgaaatttaagatatataattttatttgatatttatttaattgtagtttttttaatttttattttttttcgtgcgaatgtttttgtgtattatttatgtaatttagataaattattttttagaattcggagttaataaataggtgataggttatttaaggtttgaggagaaagaagagtaggaatagattgaggtatttattttttatgtaagtttaaattttagaatttattagttggttaattattttatagtgtgtgtttttttttcgtatttaaaagtatttataattggttgttgttaagagaatgttatagtatatttaaattgttaggatatttaatatttattgtatatgtttaatgtgagatttttaattttgttatttttaatagtattttttgttttaatttttaatatagtatatattttttaggtaggattgtaaatatgttaagtttgtagtttgaaaataaagatcgttttgaattatttaagtataaaagaaatttttttttttagttaaatttttttggggaggattttattttagaaggaggtaaaatgattgaattttagttaatttagtatttttaaagaaggtagtttttattgatatatttttagttaggttaattttagttttaaaagaaaatttttaagattgtttttatgattttaagattgggattttagaaagaagtttttaaatttaaattaaatattgtagaagttgtaattattgttgtatatataagagaatttagaattatatttgatttgttaataagtaaaaagggagttatttttgtaaatgtggaaaagaaaattgttaggtaaaatgttagataagaaagagttgtatatgagtagattggattcgttagttagggcgtgttgtagtttgtaaagtagggagtatttagttttagttattttttgagaggtattttttggattatttttgttttaaaagtaatatttaagttttatttaagaatttaaaagtcgttttattttttatttttcggaatagtttaagagttatttttttttagaattagttattaattgtgattgtggttgaaagagtttatgggtaggatggttttggttaggtgtttattttgaattttttttttagtattttggtattagagcgtcgtttgagttttgcggggatttttgtatttaatggttaggagttttttattagttagaagtttagtgtcgggaaaagggttgggtttatttgtttaagaattagtttttgagattgatgattttgtaagatggattggttaatgatttttggttgttgcgttgttgtggatttggttttttttttagtttgttcgttttttttttttttttaaattttttttggttaggtaagattttttttatattttatttatatttttttgttttatttattcgtggttataaaggaaagagtttaattattcgatttttttatttatttttgagaaaagagaaaaaaagaataaaataaaaataagatttatttttaaaaaaatagttgaagtggaaaaggtttcgagatttttgtagttacgttttaaataagaattgtagaatattgtaaatttagatttataaaaagaatatttggtggagagtggggtagaatttttgtcgtattttttaagcgtttttaagagataaaattttgtagcggaagatgtaaacgtaagggtgtaggggtgattgttttgagaattgttagagtgttattgaaattaagtggaggttaagtcgaatttgatttttagataattttatagtaaggtagcggtttattaaataggttagttgataagttgtagttattttttgagtatttttgtaaaaatggtaagggattaattttgtaatttgttttttttatgaaagtatagttttgtttatatttcgttggagaaataatattcgtttttattttttttaaaaagttgaattttttagtcggtttaagtagttttatattttgaggtttttaagattaaagttgcgagttttagtagggaatagttacgtggtttgtttgcgtttcgtttgggtttttgtttttagtttgagatatttgtagtcgcgaattttgttttagtttagaaaggggcgttttgtttaattaattgttttcgtcggcgagttcgtattgagaagtttatgagcggattttatgtgtagggtattttagcgcggtgtataaaattcgtcgtttttaaacgttgtttttattttaatattgtgtattgattttagttttttattttgttatgtaagggatggatttgaaacggttattttattttaatttattttaaaaaggaaataagtatggtattgtaaaagatgggttttttatttaaggcgattttttttttggtttattaattttgttgtttttagtttgttaggatttatattaatattttttttggggtttttcgttttaatttatagatagaaatgtttaaaatgttagcgtatttaagtatttggaattggggtttacgaagtttaattgtttattggatgttttagatagtgggggttggggcggggggggttttagagcgggtagtttttatgtttaggcgttattaaatttttattttatttttttataagttggttttttaaggttataatgcggagtttaatttgggggtggggatgaaatggttatagggttttttttttgggttggtattgttagttgttagggtcgtagtaaaggcgttgcgttgtttttttttggttttgttgttttttttatggattgggtttttttttatcgaagagtgaatttttgtttttttcgagtatttttcgaggcgtagttttttggatgttggggagcgttagattgggtcgttgtagaggggaaaggagggtttagaagggcgagagagtaggtcgggacgtaaatttttagttttcgcggcgcggttacgtttttagaaacgtttaggattttcgggttgggtcgtcgcggtttggtttttggaattttaaggggttcgtttatttgattattgggtgggtttcgcggttgatattttttttggtatgtttttttatttcgcgttatattatttttttagttttagtaattttaaatcggttttacggatttagagggtttttgggcgagatgagatattatttattgtgtagaagttgttgttattgttgttgttatagttatttcggatggggttgttatcgcggttaggatagtttttttcgatcgttttttgggttgcgttagggttcgggggcgttgttcgtacgtttcggcggggaaggaaatcgtttcgcgttcgtcggaggaaggcgacggggagggaagggggagggcggttaggaggcgggtggaggggtcggtcgttcgggttaggtcgtttttgaatggtttgggaggacgaattgttagatttcgaggaagggaggtgggacgggggagggggattggaaagcggaaatttttttataaaatttcgaaaagttttttttttttacgttaggttaatgatattgttgtttttaaatttttcgtttgtacggaggtataagagtttttaagtttgtagttttcgtttaatttttagatatttcgcgggttttgtagtatcggtatcgtttttaggaggtttggcggggtgtgcgtttagtcgttgggcgttttttttttggatttcggggttatttatatcgttttttttttttttcgttttttttttcgtttttttcgcgcgtttttttcgcggaggtttttttcgttcgtttttttgttttttttttcgcgggtcgtatcgttcgggtcggcgtcgcgcgcgggggaagttggcgggttgaggcgtttcgttttttttttttgtttcgggttcgcgaggttacgcgtcgtcgttcgagagatgatgtaggacgtgtttagttcgttagtttcgtcggtcgacgatagtttgagtaatagcgaggaagagttagatcggtagtagtcgtcgagcggtaagcgcgggggacgtaagcggcgtagtagtaggcgtagcgcgggcggcggcgcggggttcggcggagtcgcgggtgggggcgtcggaggcggcgacgagtcgggtagttcggtttagggtaagcgcggtaagaagtttgcgggttgtggcggcggcggcggcgcgggcggcggcggcggtagtagtagcggcggcgggagttcgtagttttacgaggagttgtagacgtagcgggttatggttaacgtgcgggagcgttagcgtatttagtcgttgaacgaggcgttcgtcgcgttgcggaagattatttttacgttgttttcggataagttgagtaagatttagatttttaagttggcggttaggtatatcgattttttttattaggttttttagagcgacgagttggattttaagatggtaagttgtagttatgtggtttacgagcggtttagttacgttttttcggtttggaggatggagggggtttggtttatgttcgcgttttattagtaggcggagttttttatttttttagtagggtcggagatttaggtaaggatcgcgtcgttgtattttttcgttttttaggtggtagacggtaggtcggttaggtcgcggtttttagtttatttcgattttttttttttttttatttttcgtttagtttttttattttatttggtatcgttgtttcgcgtttttagcgttttcggaaggtcggtttgatttcgttagggagagtagtttttagggggatgcgttttggtgaggggtgtgtgtgcgcgtgagtgtgcgtgataggaggggagatagagatatttagggttacgggtaaggatcgttttgttagcgttattttttttttcggtttttaatttttgttttttttaaaataaatgttttaaaataaattttattttttttttttttttatttatttatttttttttgtttttgggttgaaatttttttaggttgtttagtttaattttttagtggtggtgataagaatagtgtttattagttttagaaaatagtcgtagagatttaaataataatcgatttttttttttttttttgggtttttgtagatgttattgtttttagagaaggagaaaatggatagtttagagattttggagttggataattaaaaataaaaatatatgttaaagatttttttggaaattagaagagtaaaatttaaatttaaagaaatagggcgtggggcgtatttttaaaagagaaagcgagataggttcgtggatagtgatttttagacgggtagcggtattatttttatatttttgtattttgatagaagtttgaatagttgtttgtgttttttttttttttttttttgacgaagaatgtttttatttttattttttttatgtatgtatttttaagaggtcgtgttaattagttattgaaaggaaaggtattattatggattttttttattttaaaatggtaataattagaggaattataagaatatttttagaaa

SEQ ID NO: 1856 - DNA, 6609 bp, Artificial Sequence
  chemically treated genomic DNA (Homo sapiens)
tttttaaaggtgtttttatagtttttttgattgttattattttaaaatagagaaagtttatagtgatgtttttttttttagtggttgattggtacgattttttgagaatgtatgtatgaaaaaaataaaaataaaaatatttttcgttaaaaaaaaaaaaaaaaaaaatataaataattgtttagatttttattagaatgtagaggtgtgaggatggtgtcgttgttcgtttgggaattattgtttacgggtttgtttcgtttttttttttaaaagtgcgttttacgttttgtttttttgaatttggattttgtttttttaatttttaagaaaatttttggtatatatttttatttttagttatttagttttagagtttttagattgtttattttttttttttttggaaataatgatatttgtaaaaatttagaggggggggggggagtcggttattgtttaggtttttgcggttgttttttaagattagtgagtattgtttttattattattattgagaaattaagttgaataatttggaaggattttagtttaagggtaagaggaagtgggtgggtggaaaggaggaggaggtggaatttgttttaaaatatttgttttaaggagaataaaaattgaaagtcgaaagaaagggtggcgttgataaaacggtttttattcgtgattttgggtgtttttgtttttttttttgttacgtatatttacgcgtatatatattttttattagggcgtatttttttggagattgttttttttagcggggttagatcggtttttcggggacgttgggggcgcgaggtaacggtgttaagtgaggtgggaaggttgagcggagagtgggagaggggaggaaatcgaggtggattgggaatcgcggtttggtcggtttgtcgtttgttatttgagaggcgaaggggtgtagcggcgcggtttttatttaggttttcggttttgttgagggggtggggggtttcgtttgttagtgggacgcggatatggattaggttttttttattttttagatcgagaaggcgtagttgagtcgttcgtgagttatatagttgtagtttgttattttggagtttagttcgtcgttttggaggatttggtagaggaagtcgatgtatttggtcgttagtttgagggtttgaattttgtttagtttgttcgagggtagcgtggggatgatttttcgtagcgcggcgaacgtttcgtttagcgattgggtgcgttggcgttttcgtacgttggttatgattcgttgcgtttgtagtttttcgtaagattgcggattttcgtcgtcgttgttgttgtcgtcgtcgtcgttcgcgtcgtcgtcgtcgttatagttcgtagattttttgtcgcgtttgttttgggtcgggttgttcggttcgtcgtcgttttcgacgtttttattcgcggtttcgtcgggtttcgcgtcgtcgttcgcgttgcgtttgttgttgcgtcgtttgcgtttttcgcgtttgtcgttcggcggttgttgtcggtttggttttttttcgttgttgtttaggttgtcgtcggtcggcgagattggcgagttggatacgttttgtattatttttcgagcggcgacgcgtggtttcgcgggttcggggtagaggagaagagcggggcgttttagttcgttagtttttttcgcgcgcggcgtcggttcgggcgatgcggttcgcggaggagagagtaggaggacggacgggagggattttcgcggggagggcgcgcgggggaggcggggagggaggcgggagggggaggggacggtgtggatggtttcgaggtttaaaaagaaagcgtttaacggttggacgtatatttcgttaggttttttggaaacggtgtcggtgttgtagagttcgcgaggtgtttgggagttgggcgagagttgtagatttggaggtttttatattttcgtgtaggcggaaagtttgggggtagtagtgttattggtttgacgtgaggaggagggatttttcgaagttttataggaaagttttcgttttttagtttttttttttcgttttatttttttttttcggggtttaataattcgtttttttaaattatttaaaaacgatttggttcgggcggtcggtttttttattcgttttttagtcgttttttttttttttttttcgtcgttttttttcggcgggcgcggggcgattttttttttcgtcggagcgtgcgggtagcgttttcgaattttagcgtagtttaggaagcggtcggaggagattgttttggtcgcggtggtagttttattcggagtggttgtgatagtagtaatggtaatagtttttatatagtgggtgatgttttatttcgtttaagagttttttaggttcgtggggtcgatttgggattgttggggttgggggggtggtgtggcgcggggtgggggggtatgttaagaaaagtgttaatcgcggagtttatttaatggttaggtagacgaattttttggagttttaaaggttaaatcgcggcggtttagttcggaggttttgggcgtttttgaagacgtggtcgcgtcgcgggggttgaggatttgcgtttcggtttgttttttcgtttttttgggttttttttttttttttataacgatttagtttgacgttttttaatatttaaaggattacgtttcggaaggtgttcgaaagaggtagaagtttatttttcggtggaaggaaatttagtttatgggaaaggtagtagagttagaggggggtagcgtagcgtttttgttgcggttttaatagttggtaatgttaatttaagggagagattttgtggttattttatttttatttttaaattaggtttcgtattgtgattttgaaaggttagtttgtaagagagtgaagtgggaatttgatagcgtttagatataggggttgttcgttttgagatttttttcgttttagtttttattatttagggtatttagtggataattaggtttcgtgagttttaattttaaatgtttggatacgttaatattttaagtatttttgtttgtaagttaaaacgaagagttttaaagagggtgttaatgtagattttggtaaattggaagtagtaaagttggtgaattagaaaggaagtcgttttggataagaagtttattttttgtaatgttatatttgttttttttttgaaatgaattgaggtaaaataatcgttttaggtttattttttatatggtaaagtaaaaagttggagttagtatatagtgttggggtgggggtagcgtttgggggcgacgagttttgtgtatcgcgttggagtattttgtatataaggttcgtttatgggttttttagtacggattcgtcggcgggaataattaattgagtaaagcgtttttttttgggttggagtaaggttcgcggttgtagatattttaagttgaaggtaagagtttaggcgaggcgtaggtaggttacgtggttgttttttgttgagattcgtagttttggttttggaaattttagggtgtggagttgtttgggtcgattgaagggtttagttttttgggagaagtgagggcgagtgttatttttttagcgaggtgtaaataagattgtgtttttatgggagggataaattgtagagttgattttttattatttttatagaaatatttagaaagtgattatagtttgttaattggtttgtttagtgagtcgttgttttattgtaaaattgtttgaaaattagattcgatttgatttttatttaattttagtagtattttagtagtttttaaaatagttatttttgtatttttgcgtttgtatttttcgttataggattttattttttggaagcgtttagagaatgcggtagaaattttgttttattttttattaagtgttttttttgtaaatttgaatttatagtattttgtaatttttatttagaacgtggttgtagaaatttcgaaattttttttattttagttatttttttaaagataaattttatttttgttttgttttttttttttttttttttaaaaataaataaagagatcgaatgattggatttttttttttgtggttacggataagtaagataggaaagtgtgggtaaagtgtaaaggaaattttatttgattaaggggaatttgggaaggggaggggagcggataagttagaggagaaattaagtttatagtagcgtagtagttaggggttattagttagtttattttgtaaagttattagttttaaagattggtttttaaataagtgagtttagtttttttttcggtattaaatttttagttgatgaagagtttttggttattgggtatagggattttcgtaaggtttaggcgacgttttgatgttagaatattgagaggggaatttaaaatgaatatttaattagaattattttgtttatggatttttttagttatagttataattgatgattagttttaagaagaaatggtttttgaattgtttcggggagtggaggatgagacgatttttgagtttttaagtggggtttgaatgttatttttggagtaaaagtagtttaggaggtattttttaaaaaatggttggagttagatattttttgttttgtaaattgtaatacgttttggttgacgagtttagtttgtttatatatagtttttttttatttaatattttatttaataatttttttttttatatttgtaaggatggttttttttttatttgttgataggttaggtataattttggatttttttatatatgtaataataattgtaatttttgtaatgtttagtttaaatttgaaagtttttttttaaaattttaattttgagattatgaaaataattttagaaatttttttttgaggttgaagttagtttaattggaagtatgttagtggggattattttttttgggaatgttagattaattggaatttagttattttgtttttttttaaagtaaagttttttttaaaaaaatttaattgaaaaaaaaaattttttttgtatttggatagtttaaaacgatttttgtttttaaattgtaaatttggtatgtttgtaattttgtttgaggaatgtgtgttgtgttaaaaattgaaataaaaaatattgttaaaagtaatagagttagaaattttatattgaatatatataataagtattaagtattttggtagtttgaatatgttgtgatatttttttagtaataattaattataaatatttttagatacggaaaagaaatatatattatagaatggttagttaattggtaaattttggagtttgggtttgtataaaaggtgagtattttaatttgtttttatttttttttttttttagattttagatggtttattatttgtttgttggtttcgagttttgagaaataatttatttgaattgtataaatagtgtataggagtattcgtacggaagggagtgaaaattagaaaggttgtaattgagtgaatattagatgaggttgtatattttagattttattttgttttgaatattttagagggattgttgtttaaatgagagaattttagtaaggtggaatataaagttatgtatgttaatataataattgtgtaaaagtttattttttttttatgattttggtagttttaatgatgtttgaatatttttttttatataaaaatttattttttttttttttaaatgatgatttgatttataaatttaattgattttatatttttttatttgaatatttttaaaagtaaaaaaaataaattaaagttataaaatgtgaagtttttaatttagaaataaaacgaaaaagtaaaaaatataataaattagggtgcgaatagtatcgtaagtgaaatttttaaataaatgttaatttttaaaatagttgatattttgaatttagtttaaggatgggatgaggagatataggtttaatttgtagaaagtgtaggattagaatatggaaaagtatggagttttgaagagtattttttttttttatttttttttttaggggttgtgtaggttggagagttggtgttttagttgtttattaattttgttggaaaatatatttattttatttgtattaaagagttgttggaataattgatgaaagaatgtaagaaataaatagttatttataggaattattattatggttttagtttttttatatagtattatgtgttttttttttaattattcgatgattagtaatttaaatataaatggaatgatttatattttatgtttttttaatttaatttttttttttgattatttataatttttatttttttttattggaagggattttcgttttttataaatgggtttttttgaagttttatgttttgttgttattgtttggtttggttttttttgtagaaaatatgttgtttttgttagttattataagaggatataattttttagataattttgtttagaaagaagtttagagaagaggaaagttaataaaatagtaaaaataatatataattaatgaatattatttggagatgtttatttgatttatgttatttttatta

SEQ ID NO: 1857 - DNA, 10034 bp, Artificial Sequence
  chemically treated genomic DNA (Homo sapiens)
ttatttatttttaagtaatggtttttaaagagtagagatttttagtttttataatttattttatttatttttatttttttgagatgattttgttattagtggaagagatttaagttattttgaattattagcggcgatttgtatatatttgtagtaatttcgtttttgtttttttagaagaattcgattttattttaggattttataggtttattttttttttatgattttttttttagggtgggttgtttgtttagtgtttgtttttttatttttgggaattgagtatatatagcgtgtttaggaagttatatgtatgtttatttgagatttttttttttttttttggaagagtttgtttggaatgttttattttgttattttgttttttagtgtatatgtttaggtagttttttttttcgggtatttggatttatttaacgttttaatgttaatagttgtggattattaggaaatggtttttttttggtattttggttaggttgttatattatcgtttttagagtggtggtgtgataattgtttaattattatttgatatttttagtgggtgggtagagagtttttttttgttttatttatgtttatttaattatttataataatatttaatattaagtaaaatttatttattagaatatatatttttttataggggatgtaagattgttagttttttttatttttaaaaaattattttttaattgataagtgaaatttgtatatattgatggtgtataatatattttgatataggtatataatgtagaatggttaaattaagttaattaatatatgtattattttatatatttgtgtatgtgtgttgtgagaagttaaatttattaatttttttatttatagttagtgatttttgtgttttgtttaagaaatatttgtttattttaaggttgtaaagattatttttaatgtttttttttaggagttttttggtaaattttaagtaattttatggtatgttgtaaaggttaagttttttttttttttaaaaaaaaattttttttttttttttaaaaatttgggattttggaaggagaaagaatttggatgtagtaaagggaagtatttgttttatcgtttggttgtgatatatatggagtattgtatgttatgtaatgatatatattgagatgggtaaaattttcggttaaagtaaaaagaaatatttgggaatatagtggtgtttgttgaatttagatgattttatgttatatggtgaaagggtttaagcgggtagtaagggtgattattggattaaattaagggttataaggagtagtgatgtgtagggtaggttatttataggggttattatattatttgaaatttatattaaaatatttggtaattaaagtgtgatatagttatgcgtaaattagtttttataatttaaatagttaagatttgatgtgttgtaatatacggtatattagtataagggatgttagatattttttattggtgaaatgaggagtatttaatatatgtagatgggtttgagaattgtgttgatattttttattttttatggatagagtataagaattagtgaatattggatatgattaggtgatttttttgaattttaatttttttttttgtaaaataggaaaaataatgtttattttttaagggatattgagaggaatgataagatacgtttaattttaggtttggtatttaatgattgttttatttaggttaatttgttttttttttttttattattttttttattgtagtatttcgagtttttgattttatgttatttattatatttttttttgagtttttattttaatttttttgttagatatagttttgaagtttaattaatgttggtttttttttgaaggttttatggtaaagtttattaaattttagtgtatttaattatttgagatgttttttaaaaatgtagattataaagttttattttaaaagattgattttgtatgtttgtttgggtgtggtttaggaatgtgtagtattatcgagtatttttggttatgatgaattaggtggttaagaattatttagagatacgtgggatgtgagaaaaatttgttttagaaattttataattatattttttttaaattcgagttgagatttaaataaagatagttgatttagttttttagttttatgtggaggttggatttagttgatttaggtttgaagtaggtttattatttttgttatatgttttcgtttttttgggtgatataaaaatattatttttgttggttcggtagtaatttttttttttttggtaattttttggattttttttatttttagtgtaaagttttaagtaaggttaatttttttttttattatgaaagtgaaggttagttttttagatatttataagaataaggaagaggaatattttttttgtagagatattaaattagtaagaatttaagtttggagttgtttattttatttttatatagagtgtttatttgagaatgaaattaagagagatggtgttttttgatattattaggtttttggggtttttgttaatttgagttattaattttttttttgttttacgttagtttgagttagaatttttttttgtaattgaaaattttgattaatatatagagtttttatatttttttgtataaatgaacgttttttttttgggtagttttaaataatttttttgtattttattttttttaaagaacgttatttttttgttataaatgtagggaatttgttttttgggattaggtgtagtttattttttttttttttttgtagggaaaaaaaaggtttttttttttgaggtttatgttacggagtttattgtttattattattgtttttattatttaatttatttaagattgatatttgttttataatttttttttttattttagttttgttattattttagatggattttattatttatttaatagtttataattatagtttatgtagtatttattatatattaggtacggttttaagtattttatatatattttagtttatttaatttttataatagtataagttattattacgtttattttttatataaggaaattgaggtataaaaaggttatttagatttgtttagagttatttagttatgaagtggtagagtagggatgaggataacggagttaaattgtagagtttagattggttttttagttttttataattgtattattttttatatttattttgtattggtgttgtggaggtgggagagagggagtattttttttattgagttattggatatttggaaggtttttggagagaagttagttgaggatggtttgtattgtttttttttggaatttaatgatttgttgttattatttatgtaaatttattaataaatagataaaagttaggaagttgggatgtagttgaattgaaaatttagtagtagaaaagtaggttatagattttgttttgggtgttttatatagtttttttttttttgttttaataatttttttttttttgggaatattgttgtatttagggtagtttgttttttttttttatgggttgtttttagaatgtgttttttgtttatatttatatttatgtttcgtgttttttagttttttagaaattttgtataatagatttaaaatttttggttttttttttttttttgtttgaaagagtgaaagaaggaagttagggattttagggggtagttaggtagtagtattattatttttaggtaattatatttagttgtagttttatcgggaatagtttagttttgaaaatatagatttgggatttttttttttagttttttagttttcgtttttgtgagtagttttttaatttttatttttagtcgttgataggtttttttggttttataaggttagttaatatatttattttttataatttttagttttgttagatataatttgtaataggtatttttggattaatgtaaatttcgatttttgttttaggagtttgtttttgttagaagaattttatataagtgtgcgtgttgtgttattgtaaatgttgtataaggtggttaggtttaattagtttttgtaagatatcgaatagtaagaattatttatggagtgtttattatgtgttaagtatcgttttttgtaagtattattaatttttaaaatattattatcgtgagattgagattattatgattttcgttttatagaaggaaatattgagattttaggaggttaggatttttttagggttataattgcgtaattaagttgtagagtttaatttagtggtatttttattttatacgtagttgtttgatggttaagagtttaattagtttttcggtcgtttttatcgtattaaatcgttgtgttaagttggagtagcgggtttagtagtgaaaatgaaagaatagaaggaggttatagagaagagaacggttacggtaaatttcggagaggaggtaaggacgtatatatcgagatatttttcggttatcgttatttagtattttgtggggtttacgtggttgggggggtcggggcgtggcggtttttttcgaggaatttagttttgtttgggcggtttttatttcgagcgtgggcgtgttcgatttaggttcggcggacgtatttttaggtgattcgggagggattttgtgtttttgggggtgattgttcgttttttcgttttttatcgttacgcgtagtgttgatttttatttttagttggagtgcgagttgggtttggggttataggagtcgaagttttggagtttcgttttacgtttgcgttagtttcgtttcgatttcggttcgtaggttttaggggcggggcgtggtcggggcgtagcgacgggcgcggaggttcggtcgggcgcgcgcgttttcgttatacgtacgtcgggcgtgttagtttataaagggagagagtaagtagcgagttttgaagttttgtttggtgttttggatttatttttatcggtttttatagtcgttcgttagattttagtagttaagatggtgaagtagatcgagagtaaggtacgcgttatcggggaaggttagggtgtcggcgtcgcgcgcggtttttgtaattggggaaggcggtggcgggaggtggggaaggcggtggcgggaggtgcggaggtcgttttttcgtatcgttaggggaaagggacgcggcgtttcggtttgggattgcgggaagtagcggtttgggcgcgttcgaggcggtggagtttgttttggaggaagggaggagaaggacgagggttttttggagggcggagtggcggtgtttagcgtttttcgtattttgtttttcgggggattgtacgtacgcggggagcgttcgggggatgtgagagcgtagatagcgtgaggagtttttacgttgcgttttttgtattttttcgttcgggtagtttcgattggaggaagatgagggaatggaaggggttcgtttttggttttttatttgtatttagatttaggttttaggtaaggatagggagggtttttgtagaaggtacgggtcggtggtcgtcgttgttttttcgtatgtgaagtgatttattcgtagcgggggtagtgatttttttttgggagcgggtttaggtcggagattttcgtttgtttttatttatgttcgattttaaaggtgacgcgtgttgtattcgtattaagggggcggattgcggttggagattttttggtacgtgtaggtttgtttaggaggttcgagggttttaggtgatcgcgaggaagtgaggttcgggtcgcgtttacgggatttttgtggcgtagggcgcgttttcggtagtagtggttttggaatgattgagtttttaaggttgggttcgggggtttcggttgttttgttcgtttatgatttatttttagtcggtgggttttgttggagttagggttttttttgggagtagtcgcgttttgttgtttgttcgtcgatttatcggtatttcgatcgttgttttgtttttttaaaaatgtttaaggcgaaatagtttttttatgtttgaaagttattgtaagtttaaaattttgtagattgggaaatttagagtttaacgcgtagtgtttagtttaatgtagttattttagaaatatttgttaaatgtagcgttagaaaagtgagtggaggaaattgatattgttcgaacggtagaagatttttcgttagcgtttattttgcgattatttttttttatttgcgggaagtagaggagggcgggttttcgttcgtttcgggtgttttgatttgtttggtgtcgggtgggtttcggaaatagaagtgtgtttgtaatgtgttttcgatttttttgtttttttgattattattgatttttagtgttttttttttatatgttgattgttattgttattttttattttttttttaattagtttttttttagtgggatttttattttagtagtttttatgtgttgaaaagatttttagtagtgaattgttttttatatattttttttttaagtatttattgtgtgataaattattaatttatttttggggaagggagtggggttgggattttgttttttagggtttggtaattttagtataatttaattgttaagaattttttttattgagttagaagatttttgagtggtttatgttagttgttttaaaatttagatattataaataaagttgattaggatttttggagtatatagtttagtttttttagttgttagagtatgttagagtattttttttttttattagtgataaaggtgtataagggtgataggaattttaaaaaaagtattatagtttggggtttaaaggttttgataattaattaatttttaaaataataatttaaagttattgatcgaaagttatattaatttgattgttatttgtttgttagtttgtttttcgagatggagttttgtttttgttgttttggttggagtatagtggcgcgatttcggtttattgtaatttttattttttgagtttaagcgatttttttgttttagttttttgtatagttgggattataggtatgcgttgttaaaatgtttagtaattttgtatttttagtagagatggggttttattatgttggttaggtttgtttcgaatttttgattttaggtgatttattaattttaggtttttaaagtgttaggattataggcgtgaattattacgtttagtttgttatttgtaaatgttgaatatatgttatatttttattttaatgggttaaatttgtattatttgttatttagaataattttgtttttgaggtattttgttggtgttttagggttaattgggatttattttagagaggaatggaataattgattgtaaatgtgatgaggaagaaataaatatttttaaaaaaaatgatatttattatttattgaatttttatttataaggtatttggttaagtattttagaaattatttatatttattatttttagagtaggtatgttgaggtaacgagattttagatttttgtttttatttattttaattatattgttttgttttttttagattattggtgttagtgatggagatatttattaattttgttagtttttgggagttagaaattgtgatttttttttagtaatataattttgaataatttttaagttgatattcgtttagaagtattagaagagaatttgtatatgaagtttgtatatacgtggggtgtaatttatgtttagttaggttaaaagttattgttgcgtgtttttttttagaattttaggtatttgtgtttaaatttgatttagaattgttttggaaaagttttgagtatgtttgaaatatttttttttttgaaagtaattttaagtttttaataagggttaattatgttaaaaaaataaaaatgtttatttaattagatattggtattttttgatttttttttttgttttatttggattttgtaataaaggatgtttggtttaatttttttgaaaattatattagggaaggttttgaatgaaattgatttggaataataagtgatgatttggaaaaataattgttatatttttatgtattttgttgtagttttttttatgtttttatttttagaggtggggtttagggatttgtataattaaaaaatttatgaaagtgttgttttattttttttaggaatattatttgtgaattatttttttaaaaacgaggtagaaattagaaatttagagaagtaattattagtatatgaggttatattagtgtttttttgttgggtttttttttgtttatttggttttttattttatggttttttatttatttgatttttttttttacgagattttttgtggcggtggggggcggggaatgtttatttttttttaaatttatttgattagtattgtttttttgaagaaaatttagattttagatatagatgtttatgttttgatttattttaattgttttggtttggtttttgggtttggttagtattaacgtattaatgtggttaaaatgagttttttgttttgggaggttaaggcgggtggattattttaggttaggagtttaagattagtttggttaatatggcgaaattttgtttttattaaaaatataaaaattagttgggattggtggtagaggtttgtaattttagttatttaggaggttgaggtaagagaattatttgaatttcggaggtaaaggttattgtgagtcgagattaggtttttgtattttagtttgggtaataagtgaaatttcgttttaaaaataaaataaaataaaaatgagtttttggtaattagaatattcggtttttagggttatagtatttagatagtaaataatttagggaagttagtggtaagagattttttgattatttttattgagaattttatttaataagtattttttatgaaaaataatatttatgaaaaattttttttatgaggaacgaaaatttttatttaatgaatgataagggtatagttttaaaataaagggtaaaaattaaaggttggtaaacgtgtgattttagttttggaaattttattatgtttatgttaacggtgatgtttgagtgttgaggtttgggaaaggtgagtttttttgattttttaaaaaattttagattttcgtatggtttattatagataaatgagtttaattaaaagttatagtttttttttttttttttttttttgcgatagagttttcgtttattgtttaggatggagtgtagtggtataattttggtttattgtaattttcgttttttgagtttaagttatttttttgttttagttttttgagtggttgggattataggtatatgttattacgtttagttagtttttgtatttttagtagagatagtattttattatattggttaggttggtttcgaatttttgatttagtgattcgtttatttcggttttttaaagtgttgagattataggtgtgagttattatgtttagttaatttttatttttaagtaatttgtgatgttttaattgtaaaattttatgtttttgtgattttaagtgattttttttataatttataagtgtttaatgaatgtttattatatatttagttttgatatggaaatatttttaatataaatgtttatttttattttttttttgtttggtgtagagaaaaaatagttagtttataatattttataaaatagttatgaagagaatgttagtatattttatatatattttgttttattttattaagtaatattattaataatgtatagaatttttttaaattgagttttatttggtttgtttggggatttttttttttttttttttttttttttggttaaaaagtaggttttgaaaggaggatttttagaatgtgttttgtgttattgtgtcgagttttttttttgaaggtttaatatttaattatttatttaatataagttttttttttgttgttaga

SEQ ID NO: 1858 - DNA, 10034 bp, Artificial Sequence
  chemically treated genomic DNA (Homo sapiens)
tttaatagtaaaagaaaagtttatattaaataaatagttaaatattaaatttttaaaagaaagattcgatataatgatataaagtatattttggaggttttttttttaggatttattttttagttaaaaaaaaaaaaaaaaaaaaaaaaaaatttttaaataagttaaataaaatttagtttgaagaaattttatatattgttggtagtgttatttgataagatgaaataagatatgtgtagagtatattgatattttttttataattattttataaaatattgtgaattggttattttttttttatattaaataaaaggaaaataaaaatagatatttgtattaaaaatgtttttatgttaaggttaggtatatggtagatatttattaaatatttatggattatgaaaggggttatttgaagttataaaggtataggattttgtaattgaaatattataagttatttaaagataaaagttggttgggtatggtggtttatatttgtaattttagtattttgggaggtcgaggtgggcggattattaggttaggagttcgagattagtttggttaatatggtgaaatgttgtttttattaaaaatatagaaattagttgggcgtggtggtatatgtttgtagttttagttatttaggaggttgaggtaggagaatagtttgaatttaggaggcggaggttgtagtgagttaaaattgtgttattgtattttattttgggtaatagacggagattttgtcgtaaaaaaaaaaaaaaaaaaaaaagttatgatttttgattaaatttatttgtttatggtggattatacgaaaatttaaaattttttgaaaagttaaggaaatttattttttttaaattttaatatttagatattatcgttgatataagtataatggggtttttagagttgagattatacgtttattaatttttgatttttgttttttattttaaaattatatttttgttatttattaaatgaaagttttcgttttttatgaaggaaattttttatagatattattttttataaggaatgtttgttaaataaaatttttagtagaaatgattaagaaattttttattattaatttttttgaattatttattatttagatattgtaattttgggaatcgaatattttagttattaaggatttatttttgttttgttttgtttttgagacggagttttatttgttgtttaggttggagtgtaaaggtttgatttcggtttatagtaatttttgttttcggggtttaagtgatttttttgttttagttttttgagtagttgggattataagtttttgttattagttttagttaatttttgtatttttagtagagatagagtttcgttatgttgattaggttggttttgaatttttgatttgaagtgatttattcgttttggttttttaaaataaaggatttattttaattatattagtacgttagtgttgattaaatttaaaaattaaattagagtaattaagataaattaaaatataaatatttgtatttgaaatttaggttttttttaaggaaataatgttggttaaataggtttaaaaaaaaatgaatatttttcgttttttatcgttataagaggtttcgtaaagaaagaaattaaataaataaaaaattataagataaaaaattaaataaataaaaaaaaatttaataagaaaatattaatatgattttatgtattaatagttatttttttagatttttaatttttatttcgtttttgggaaaataatttataaatggtgtttttgagaaaggtaggataatatttttataaattttttagttatgtaaatttttgaattttatttttagaggtggagatatggggagagttgtagtagggtatatagaagtatagtaattgtttttttaaattattatttattgttttagattaattttatttaaagttttttttaatgtgatttttaagaaagttaaattaggtattttttattgtaagatttaggtaagataggaaaaaaggttaagaaatgttaatgtttggttgaatagatatttttgtttttttaatatgattaatttttattaaaaatttgagattatttttaagagggaaggtattttaaatatatttaaggtttttttaaaatagttttgaattaaatttaagtataagtatttaaaattttgaaaagaggtacgtaataataatttttagtttaattgaatatgagttatattttacgtatgtgtaggttttatgtataaatttttttttgatatttttaaacgggtattagtttgaaaattatttaagattgtattattaagaagaaattataatttttagtttttagaaattaataggattaataaatgtttttattattgatattaataatttgggggaagtagaatagtgtagttggggtaaataggagtaagagtttaagatttcgttgttttaatatatttattttgagggtaataagtgtgagtggtttttgaagtatttagttaagtgttttgtagatgggagtttaataaatggtaggtgttattttttttaaaagtgtttattttttttttattatatttatagttaattattttatttttttttgaaatagattttagttggttttaaagtattaatagagtattttagaaatagaattgttttgaatggtaaatggtgtaaatttagtttattaggatgaaaatgtaatatgtatttaatatttataaataataggttgggcgtggtggtttacgtttgtaattttagtattttgggagtttgaggttggtggattatttgaagttaggagttcgagataaatttgattaatatggtgaaattttatttttattaaaaatataaaattattgggtattttggtagcgtatgtttgtaattttagttgtgtaggaggttgaggtaagagaatcgtttgaatttaggaggtggaggttgtagtgggtcgagatcgcgttattgtattttagttagggtaataagggtaaaattttatttcgaaaaataaattaatagataaataataattaaattagtgtaattttcgattaatgattttggattgttattttgaggattaattgattattagggtttttgggttttaggttgtagtgttttttttaaagtttttgttatttttgtatatttttgttattggtagaggaggaaggtgttttgatatgttttgataattgggaggattaaattgtgtgttttagaaattttaattaattttgtttgtagtgtttggattttgggataattaatatagattatttaaaggttttttggtttagtggagggggtttttagtagttgggttatattgaggttgttagattttggagaatagaattttagttttatttttttttttaggaatggattaataatttgttatataataggtgtttggaaaaaaagtatatgaaagataatttattattaaggatttttttaatatatgagggttgttaaaatgagaattttattaagaaaaaattgattgagaggaagataaaagatgatagtggtaattaatatatgaggaaaaaatattgagagttaataataattaaaggaataaaaggatcggggatatattgtagatatatttttgttttcgaagtttattcggtattaaataggttagggtattcgaggcgggcgaggattcgtttttttttgtttttcgtaggtagggaggggtaatcgtagggtaggcgttggcgaggggttttttatcgttcgagtagtattaattttttttatttatttttttgacgttgtatttaataaatatttttggagtggttatattggattagatattgcgcgttaggttttgggttttttagtttataaggttttaggtttgtaataatttttaaatatgggaaggttgtttcgttttgggtatttttaagaggataaaataacgatcgggatatcgataggtcggcgagtaggtagtagggcgcggttgtttttaggaggaattttggttttagtaaaatttatcgattgagggtgaattatggacgggtagggtagtcgaggttttcgggtttaattttggggatttagttattttaaagttattgttgtcggaaacgcgttttgcgttataggagtttcgtgggcgcggttcggattttattttttcgcggttatttggggttttcgggttttttggatagatttgtacgtgttagggggtttttagtcgtaattcgtttttttagtgcggatatagtacgcgttatttttggggtcgggtatgggtggaggtaggcgggggttttcggtttagattcgtttttaaagggagattattattttcgttgcgggtggattattttatatacggaaaggtagcggcggttatcgattcgtgttttttgtaagggttttttttatttttgtttggggtttgaatttggatatagatggggggttaagggcggattttttttatttttttatttttttttagtcggggttgttcggacgggagggtgtaggaggcgtagcgtggggattttttacgttgtttgcgtttttatatttttcggacgtttttcgcgtgcgtgtaatttttcgaggaatagggtgcgagaaacgttgggtatcgttatttcgttttttaggggattttcgttttttttttttttttttttagggtaggttttatcgtttcgggcgcgtttaggtcgttgtttttcgtagttttaggtcgagacgtcgcgttttttttttttggcgatgcggaggggcggttttcgtatttttcgttatcgttttttttatttttcgttatcgttttttttagttatagaggtcgcgcgcggcgtcggtattttggtttttttcggtagcgcgtattttgttttcgatttgttttattattttggttgttggagtttgacgagcggttgtaaggatcgatggaaatggatttaaagtattaaatagagttttaagattcgttgtttgttttttttttttataaattggtacgttcggcgtgcgtgtggcgggggcgcgcgcgttcggtcggattttcgcgttcgtcgttgcgtttcggttacgtttcgtttttggagtttgcgagtcgggatcggggcggggttggcgtaagcgtggggcggagttttagggtttcggtttttgtaattttaagtttagttcgtattttagttggaagtggggattagtattgcgcgtgacggtgggaggcggggagacggatagttatttttagagatataaggtttttttcgggttatttggggatgcgttcgtcgggtttgaatcgaatacgtttacgttcgagatggggatcgtttaggtagggttggatttttcgaaaagggtcgttacgtttcggtttttttagttacgtgaattttataaagtgttgagtaacggtgatcgggaagtatttcggtgtgtacgtttttgtttttttttcggaatttatcgtgatcgtttttttttttgtaatttttttttgtttttttatttttattgttgagttcgttgttttagtttgatatagcggtttagtgcggtagaaacgatcgggggattggttgggtttttgattattagatagttgcgtgtgagatggaagtgttattgggttgagttttgtaatttagttacgtagttgtgattttggaaaggttttgattttttgaagttttagtgtttttttttgtagaacgggaattatgatggttttaattttacggtggtggtattttgagggttaatagtgtttgtaaaggacggtgtttggtatatagtaaatattttatagatagtttttattgttcggtgttttgtagggattgattgggtttggttattttatatagtatttataatggtatagtacgtatatttgtgtgagatttttttaatagaggtagatttttggaatagaagtcggagtttgtattgatttaggaatgtttgttgtaggttatgtttggtagggttggggattgtggaaggtgggtatgttagttggttttgtggagttaggagggtttgttagcggttggaagtggaggttgaaaagttgtttataggaacgagagttagaaggttgggagggagagttttaggtttgtgtttttagagttgagttgttttcgatgaagttgtaattaggtgtgattgtttaggggtggtgatattgttgtttggttgttttttgaaatttttggttttttttttttatttttttagatagaggaagggaggaaattagaggttttgaatttattgtgtaaagtttttagggggttgaggagtacggagtatgaatatggatataggtaagggatatattttaaagatagtttatagggagggaagatagattgttttgaatgtagtaatgtttttaaagagagggaggttattggggtagagaggaaggagttgtatggagtatttagagtagaatttataatttgtttttttgttgttgggtttttagtttagttgtattttagttttttgatttttatttgtttgttggtgaatttgtatgggtgataataataaattattgagttttaggaaggggtaatgtaggttatttttagttgatttttttttaaagattttttaaatgtttagtgatttagtgaaggaggtatttttttttttttatttttatagtattaatgtagagtagatgtggaggatggtatagttataaggaattgggaggttagtttggattttgtaatttgatttcgttgtttttatttttattttattattttatgattgggtaattttaggtaagtttaaatagtttttttgtgttttagtttttttatgtgagaagtgggcgtaataatagtttgtgttattataagggttgagtgaattaaaatatatgtaaaatgtttagaatcgtgtttggtgtgtagtgaatgttatatgaattatgattataggttattaaatgaatgatgagatttatttggaatgatggtagagttagggtggaaggagagattataaaataggtgttagttttaaatgaattaagtaatgaagatagtagtaatgaatagtgagtttcgtaatataagttttaaaggaaaaggttttttttttttttgtaaggaagaaagaaaagtgggttgtatttggttttaaggagtaggttttttgtatttgtggtaaggaggtgacgttttttgaggagagtgaggtataggggaattatttgggattgtttagagaggaagcgtttatttgtgtagagaaatgtagaggttttgtgtgttagttagaatttttagttgtaaggagaaattttagtttaaattgacgtaaagtaaaaagagaattagtaatttagattagtaagaattttaggggtttaatgatgttaaagggtattattttttttagttttatttttaagtaggtattttatgtaagagtggagtaggtagttttagatttaggtttttattagtttagtatttttataggaagagtgttttttttttttgtttttataaatgtttgagaggttgatttttatttttatggtggggaaagggattagttttgtttgaagttttgtattaagagtagggaaaatttagggggttattagaaaaggggagattgttgtcggattagtaaaaatgatatttttatgttatttagaagggcggaaatatgtaataagggtgatgggtttgttttaggtttgggttagttgagtttagtttttatatgggattggagaattgggttagttgtttttgtttgggttttaattcgaatttgaagaaaatgtaattgtaggatttttgaaataagttttttttatattttacgtgtttttgagtggtttttgattatttaatttattatagttaaaggtgttcgatgatattgtatatttttggattatatttagatagatatatagaattagttttttgaggtaaggttttgtaatttgtatttttaaaaagtattttaggtgattgggtatattaagatttgatgagttttgttatgggatttttagagggaggttagtattagttaagttttaagattgtgtttagtaagagagttgagatgggaatttaaaagagaatgtggtaagtgatataaaattaggagttcgaagtattatagtaaaaaaagtggtagaaggaaaaggaataaattaatttgggtgggatagttattaaatgttaagtttagagttgggcgtgttttattattttttttaatattttttagaagatagatattattttttttattttatagagaaagaaattgagatttaaagaggttatttagttatatttaatgtttattaatttttatattttgtttatgaagggtgggaagtattagtatagtttttaagtttatttgtatatattaagtattttttattttattagtgaaaaatatttgatattttttatgttaatgtgtcgtatattataatatattaaattttaattatttagattgtaaaaattaatttacgtataattatattatattttaattgttaagtattttaatgtaaattttagataatataataatttttgtgagtaatttattttgtatattattgttttttatagtttttaatttggtttagtggttatttttgttgttcgtttgagtttttttattatgtagtatggaattatttggatttagtaagtattattgtatttttagatgtttttttttgttttaatcgaaagttttgtttattttagtgtatattattgtatgatatataatgttttatgtatgttatagttaggcggtaaggtaagtgtttttttttgttgtatttagattttttttttttttaaaattttagatttttagaaagaaaaaaaaaatttttttttgaaagaaaaaggaatttgatttttatagtatgttataaaattatttagaatttattaaggaatttttggaagaagatattagagataatttttgtaattttgaggtaggtaaatattttttaggtagaatatagaaattattagttataaatgaaaaagttaataaatttggttttttataatatatatatataaatatgtgaggtgatgtatatgttaattagtttgatttagttattttatattgtatatttatattaaaatatgttgtatattattaatgtatataagttttatttgttaattaaaaaataattttttaaaaatgggggaagttagtagttttgtattttttgtgaagggatgtatgttttagtgggtggattttatttgatattaagtattgttataagtagttagataggtatgagtgaggtaggagagggttttttatttatttattaggaatgttaggtgatggttggataattattatattattattttaaaaacgataatgtggtagtttaattagggtgttagggagaggttattttttggtgatttatagttgttaatattaaagcgttaaatgaatttagatgttcgggagaagaaattgtttgggtatgtgtattaagagataaaatggtaaaataagatattttaggtaggtttttttagaaaaagggaagaaagttttagataggtatgtatatgattttttaaatacgttgtgtgtgtttaatttttaagggtaagggggtaggtattaggtaggtagtttattttgagggaagaattatgggaaagaggtaagtttataaaattttgagatgaagtcgaatttttttgaggaggtaaggacgaagttgttgtagatgtgtatagatcgtcgttaataatttagggtaatttggattttttttattggtaatagaattattttaagaaaataaaaataaatagaataaattataaaaattaaaaatttttgttttttgaaaattattgtttaaaaataaatga

SEQ ID NO: 1859 - DNA, 8205 bp, Artificial Sequence
  chemically treated genomic DNA (Homo sapiens)
atatattttaaaatatatatattttgtattattataaaattataaaatgtagataagatagagtattatatttgtttttttataatatgaattagtacgtgtgaattaaaatattttatgtaattttttattttataataatttttttttttgatttagatgattaaggtaaaagaagtaaatttttagaaattttattttttttatcgtaattttgttgatagattgttttggttttttataaaatattttaatggttattatttgtttagtatttttatgtttatattttatgattgtttcgtaattttttttttttatttttttaagggttttatatatttttatttttaagttgggtttttattattttatagaaataaagaaagaaaatggaaaatgttaaacgtttatatttttatttattaaaattagataatgtatatttataataaatttatagttttaaatatagagatattaaaaaaaaaaaaggaattttttttattgagtttttttgtttttgggaattaaagatagtttgagtaaggtgtttttttgaggttttattttttattagaatttaggggtatttttgttgtttcggttatgtttattaatattgagattattatattataagttattatttattaagtatggggtttttatattttttgttatgtttttgttaaataataggttttcgtattattgtagtcgtttatttattaggtttaaggttttaaaaaaagtttggtttcgttcgtaatttaaattatacgttttaggatgtcggatcggcgttacgttttacgtttcgttgttgattttatttaaatagtcgtcgtcgttttagtttattttgtggtttcgttggtttggttttgcgtagttttagtggagttatcgaatattgatattattttgttgtttagtttcgtaaggaatcggttatttgttattatggaaacgtcggcggagttgttgcgttttagattcgtgcgtaagatcggaatatgggtagggtttcgattcggaaggggaagtgggaagaaacggaaatttattttgggtaggcgtaaggtggaagagtgttgtgtttgggaatgggggaggggagtatagattgttgtcgtagttgagtttttttataaggttgtttttgaatgtggataggaaggatttgtatttttttttttttttttttttttttgagatagtttagttttgtcgtttaggttggattgtagtgtcgttgattttggtttattgtaattttttttttttaggtttaagtgatttttttgttttagtttttcgagtagttgggattataggcgtgtgttattacgttcggataattttgtatttttagtagagacggggtttttattatgttggttaggttggtttcgaatttttaatattaggtgattcgtttgtttcggttttttaaagtgttgggattataggcgtaagttatcgttttcggttaagatggtttttaaattaaaaattttttttgaatatttgttatatgttttttaattttttttaattgttagtaattttttttaaagaaaaaaaattttttttattatatgttaaattttaggaaagtaagtaattcgaagagttttattatatacgaaatgatgtataagagtacggaaataaagaggttagtgtttaattgtttaagtagatatagagtttaattggaatgatagtttttaatgaataattattatattattagattaagtgtttagggagtgttttttttattgaatagggttttttttgtttttttttataaaatgagttaaatgtaaaaaagcgaaatttcgttatgttttcgttaaataagaggaaaggtattatttaataaatttagtttggtgggttttatttagtatgtatatttaaattatatttggagagtttttagaaagtattttaatttttatttttatatttttgttttaatgttagagtatttgatttaattgggatagcgtaaataaattagtatttttgaagttttttaagttttttttatgttgttagggtttatattgagagaaaggagaagtggttatcgtttttattgattatttaaaatatttagaattgttttttttttgaaggttatttagacgggcgtagtggttaacgtttgtaattttagtattttgggaggtttaggcgggcggattacgaggttaggagatcgagattattttggttaatacggtgaaattttatttttattaaaaaatagaaaaaattagttgggcgtggtggcgggcgtttgtagttttagttattcgggaggcggaggtaggagaatggcgtgaattcgggaggcggagtttgtagtgagcggagatcgtattattatattttagtttgggtggtagagcgagattttattttaaaaaaaaaaaaaaaaaaaaaagaaagttatttaattataatataaaatattttttataaataagaatgttatagtaaattttatagtgggtttaaatttggtgtaagtatattatttgttgtgggttaaatatttgtaaggaggttgcgtatagtggtttatatttgtaattttagggaggttaaggtgggtagattatttgagtttaggagttttagattagtttgggtaagagggtaaaattttatttttataaaaaattagtcgggtatggtggtgtatatttgtggttttagttatttgggcgtttgaaggagaattattggagtttagaaggttaaggttgtagtgagttttgtttatattattgtattttaatttgggtgatagagtaaaattttgttttaaaaaataaaaaaatttgtttaggataaagatgaattaaattgagtttttgtttttaatgaatttataatttagagttatagaattgataatagtatatagttaatagttttaaaattattttttttataagtaggttatggtaggtttggttaataaggatagttagtgatttttgttaatatatagttgtaagattttatgatgtatatttattgaattagttaaaagtgttatattattttggaaaataataaattgtttttaaaataattataaatttttgtagtttttgaattttttatttttattgtttttagtttttatttttaggatttcgttggtgggttaggaggattttgagtatttttgtatttattcgttagtttaatagggaaagagggggtaggaggaggattttagtattgttttaattttgtttatagttttatggaattagaaagggttaattttttttattttttttgtatttttttttttttaaattttgaattttgtttttgtttttagtgattgttttgattgataaattataagggtttttttggttgttgcgggattttttgaggtagggttttagtggtatgatgatggtttattgtagttttaattttttcgttttaagcgatttttttgttttagttttttgagttgttgggattattggtgtgcgttattatgtttggttaattttattttttgtagagataggattttttatgttgtttaggttggtttttaatttttggttttttaaagtattaggattataggtatgagttaatgttttagtttatgagggatatttttaagatatagtttttttttattatttttttttatgtaattttatttgtgtgttttttttttttgttattggaagggttaggattgtaatggtagaaaggtaaaaaaattaagaatatttagtttttaatttaaaaaatatattgcgaatgtttaataggatttattaagagttaggtttggttaatttgattattaaggtagttattggaagtagagagggaatttagggtttgaagaaagaggtataaggaaagttagaaaagttaattttgtttttatggaattaggggtaaggttgaggtaatgttaaggtttttattttattttttttttatttgttgaattgaatagttttttaaatggatataaaagtatttagagtttttagtataataaagttttgaaggtaggaattggaagtaatagagggaaggacggtgattatagaaaatatttaaggtttttgggaggttaatatttttgaattttttggtggtggggggtttttttggtttatttgtattttttttgttagtgtagaaaatttgaagttattttaggttagatatataatttttatttatgtttgtcggagtttttttttagaatatgaattatatttgtaggtttttttgataattaattatttattgatatgtttggaagattgtatttttatattttttaaaaatataatggtatttttttattataggtaagttttcggattttgatatatatttttaattgaaagtagatttagaaaggaaaaattgtataatatattattttttaatatttgtttagaatttttaatattagaaattttattgtaaagtagaaagattatttggtagttttaaggaattattttaggagattgttgtgtgggttttagtatttaaggttgttttagaagatcgtgcgatttttttattttttttgttttaagtattagagttaataagttattgaattaattagaggggaattatttttggtttcggtttaaagaaaataaaataagttgttgattttgttatgattttttgggtaatgttgtttttatatttgtgataaatagaaaataattaataaaggtttatttcgtttttatttttttaaattcgttttatagatttggttgaaatttatatttaggcgaggcgtttacgtgattcgttttaaacgcgttatagggatacgtggttttagatattttttttttttttatttaggggtggattgttgataaggtcgcgggtagttacgtgattttatattattttattttttttttttgaaatttttggttcggatgcgtttttttttttttatttcgtcgagtttaaattagtgacggggagggagacgggatagtgtttttgtttcgtggtttttgaatttataatttttagtttgaatatagagaatataaatttgtttattattttaggaagtttagggggaatcgcgtttcgttgaagggttcggggaaggcgcgttttcgcgtttcgttttttttttttttagtatttatattgtggtagcggcggagggcggagggattcggaggcggcggagggagacgttattgtagggttgtttgttagtttcggcggcggcggcggcggcggcggcggcggcgatttatagtgattcggtcgtcgcgtcggggggtgggggggttgcgcgggatttttttttttttagattgatcgcggggtagttgcggagtatgtcgatttcggttcggaggaggtttatgcgggattttaagcggtaagggtttttattttcgtttagatgacggttttttaaagttgcggggttgtagggcgtggattttagatatttttttttttgtgatttttagagggtcggttgtgggtttagcgggattggcggaagtcgggttttagtttcggttttatttttataagttttgtcgttcgttttggcgttcgaagaaattttgatattgttttttttttttataaaaagtaaaacggtgtcgatcgattggtttagggttttttgttgtttatttcggttagttgttcggcgtttcgtttaggcgattagatattattcgttcgtttttgtattttgcggcgttttttttttgtttttttaaagtgagtttttgcgggagtttgttttttttcggtagtattagttagttttgttttacggtttcgtcgtttttttcgaggagtcgtgttggggcgaatttttttttcgatttttgttaattttttttatttgtgttttgagggtggggtttagtgcgtgaggttcggaggttaatttatttttcgaaattcgattttgttttcgttcgtttgaaaggattttgggaattgatttagagatttgggattttagagttggttatttcggttgttagtgttttttggaatttagttttggttggtgaagaaagtttttatttatagtttttcgagtttggaaaaatgtttttttttagattggcgttaatttgatattttttgggttttttttggtaaataaaatagggttttgttaggaggtattggggttgtgagatagaaaatgattatttcgttgtttattttttattggatatttagagatatagaaaaaataagtgagaaaatattattttgatattttgtatattttttttaatattttttttggggatatttgttttaattgaataaaatatttagtataaaaatttagatttgtcgtttaggaagttattttttagttattataaagtttatgtgaggtatttggatttggttaatttatttaatttattcgtagttttttttagttatttaaaggtaggcgttaagtagtgtagtttttttaaggtttttgttcgtggtggtttaatttgtttgagattgattaaaaattatttttttaatgtggattagttgtaaattatgatgttttatgaaaaataattgtatatgtatttgtgtgtgtatataatgtagtatttttaattgaggttatagtttttgaaaggagatgttttttttggtgtaaaagttatttttttaaagtttgaaattagcgtatttgattagtatttatgataaatttagatagtaaattagtttatgttattgtcgttttggttttttattgtaatgttttgtttaattttgagttgaatgtatggtattttttgtagtttttagagatttgtaggttataagaatttgattatgacgaatgttggaaagttttgtgttgagttttttgatttgagaggtggatttggtgttagtgtagagtttttaaaatagggattggtagaaaatttattaattattttttaaagttattgttgtttgaagtaaaaggaatagagtaaatttgttgtttaatattagttttttagttaaatttaatgtgtttttagttattttgtgtttatattgaggtttgtttttttttttttttttgtagttattttgtagaagtagtttggttaggatatatagtttttgtatgtttagagtagtaaaattaatggttttgtaaaaatattatttgtttttgaggttttaaattttttttggtataagaggatagtttatatatattaattttttttttttaaatatattttaattatattttaagttttagggtatatgtgtataacgtgtaggtttgttatatatgtatatatatgtgttatgttggtgtgttgtatttattaattcgttatttgtattaggtatattttttaatggtatttttttttttttttttcgttttataataggtttttgtgtgtgatgtttttttttttgtgtttaagtgtttttattgtttaatttttatttatgagtgagaatacgtggtgtttggttttttgtttttgcggtagtttgttgagaatgatggtttttagttttatttatgtttttataaaggatatgaatttatttttttttatggttgtatagtattttatggtgtatatgtgttatatttttttaggttagtttattattgttggatatttgggttggttttaagtttttgttattgtgagtagtgtcgtaataaatatacgtgtgtatgtgtttttatagtagtatgatttatatttttttgggtatatatttagtaatgggatggttgggttaaatggtatttttagttttagatttttgaggaatcgttatattgttttttataatggttgaattagtttatagttttattaatagtgtaaaagtgtttttatgtattaatttttgaagagataatattgaaagagggatgatttttaagtttttttaatttttagataatttggagaggtatttaataagtatatatatttggttaatatatttaagttatatggtttattttagtttataataataaggaaatggagttagtttgtgttttaaaatagatggtatagtgtttgtaggtgtttacgtggtttttttagtggttttaatgtttaattttttaaattattacgttggatttttagg

SEQ ID NO: 1860 - DNA, 8205 bp, Artificial Sequence
  chemically treated genomic DNA (Homo sapiens)
tttggaaatttagcgtggtaatttaaaaagttgaatattaaggttattaaggaggttacgtaaatatttatagatattatattatttattttgagatatagattaattttatttttttgttattgtgaattaaaatgaattatatgatttaaatatattaattaggtatatatatttattaaatatttttttaaattatttaaaaattgaaagggtttgagaattattttttttttaatattatttttttaagaattgatgtataggaatatttttatattgttggtgggattgtaaattagtttaattattgtggaagatagtatggcgattttttagggatttagaattagaaatattatttgatttagttattttattattgggtatatatttaaaggaatataaattatgttgttataaagatatatgtatacgtatgtttattgcggtattatttataatagtaaagatttggaattaatttaaatgtttaataatgatagattagtttaagaaaatgtggtatatatatattatggaatattatgtagttataaaaaaggatgagtttatgttttttgtagggatatggatgaagttggaaattattatttttagtaaattatcgtaaggataaaaaattaaatattacgtgtttttatttataggtgggaattgaataatgagaatatttggatataggaaagggaatattatatataggggtttgttgtggggcgggaggagaaaggagggatattattaggagatatatttaatgtaagtgacgagttaatgggtgtagtatattaatatggtatatgtgtatatatatgtaataaatttgtacgttgtgtatatgtattttagaatttaaagtataattaaaatatatttaaaaaaaaagaattgatgtatatagattgtttttttatattaaaaaaagtttaaaattttaaaagtaagtaatatttttatagaattattgattttgttgttttaaatatgtaaagattgtgtattttaattaggttatttttgtaaaatggttataagaaaaaaaaaaaaagtaaattttagtgtaaatataaaatgattgaaaatatattaaatttaattaggaaattagtattaggtagtagatttattttattttttttgttttaaatagtaatggttttaaaaagtaattagtaggttttttgttagtttttattttaaaggttttgtattaatattaaatttattttttagattaggagatttaatataaggttttttaatattcgttatagttaaatttttgtaatttgtagatttttggaaattataaaaggtgttatgtatttaatttagaattaagtagagtattatagtaaggagttagggcgataatgatatgaattagtttattatttgaatttgttatgagtgttaattaaatacgttgattttaagttttagaaagatgatttttgtattaaaaagggtatttttttttagagattgtaattttaattaaaaatgttatattatatatatatataaatatatatgtagttgttttttatggggtattataatttgtaattagtttatattaaaaaaatggtttttagttaattttaagtaaattaggttattacgaatagaagttttagaagaattgtattgtttgacgtttatttttaaatggttaagagaagttacgaatgaattaaataagttggttaaatttaagtgttttatataggttttataatagttgagaggtgattttttgagcgataaatttaagtttttatgttagatattttgtttaattagggtaggtgtttttagaaaaaatgttaagaaaaatgtgtagagtattaaaatgatgtttttttatttattttttttatgtttttaagtatttaataaaaggtaaataacggaataattattttttattttataattttaatattttttaataaaattttattttatttattaaaggaggtttagggagtattagattagcgttagtttaagggaaggtatttttttagattcgggaggttatagataggggttttttttattagttagagttgagttttagaaagtattggtagtcggggtggttagttttaaggttttagatttttaagttagtttttaaggtttttttaggcgggcggggatagagtcgggtttcgggggatgggttaattttcgggttttacgtattggattttatttttagggtataaatggaaaggattggtaggagtcgggagaggggttcgttttaatacggtttttcggagaagacggcggggtcgtgaaataaagttgattggtgttgtcggagaggaataagttttcgtaggagtttattttgaggggataagaagggggcgtcgtagggtgtaggggcgggcggataatgtttgatcgtttgggcgagacgtcgggtagttggtcgaaatgggtagtagggaattttagattagtcgatcgatatcgttttattttttgtggggaggggaagtagtattaaaattttttcgggcgttagaacgagcggtaaagtttatgggagtagggtcgaggttaggattcggttttcgttagtttcgttgggtttatagtcggttttttgagggttataaaggggaaggtgtttgggatttacgttttgtagtttcgtagttttgaggggtcgttatttaggcgaaggtgaaggtttttatcgtttgaaatttcgtatgagtttttttcgggtcggggtcgatatgtttcgtagttgtttcgcggttagtttgaaaaaaaaaaagtttcgcgtagtttttttatttttcggcgcggcggtcgaattattgtggatcgtcgtcgtcgtcgtcgtcgtcgtcgtcgtcgagattgataaataattttgtaatgacgttttttttcgtcgttttcggattttttcgtttttcgtcgttattatagtgtgagtgttgggggaggagggggcgggacgcgggagcgcgtttttttcgagttttttagcggggcgcggttttttttgggttttttgaagtaatagataaatttgtgttttttgtgtttagattagaggttgtggatttaaagattacgaaatagaaatattatttcgttttttttttcgttattagtttaggttcggcggggtggagaaagagggacgtattcgggttagagattttagggaaaggaggtgggatgatgtaagattacgtgattgttcgcggttttgttaataatttatttttgagtgggagggggagaagtatttagaattacgtgtttttatgacgcgtttagaacgggttacgtgagcgtttcgtttggatgtgagttttagttaggtttgtgaagcgggtttaagagggtgagggcgggataaatttttattagttgttttttgtttattataggtatagagataatattatttaagaggttatggtagaattaatagtttgttttgttttttttaaatcgggattaaaaataatttttttttggttggtttagtggtttattaattttggtatttggggtaagaagagtgagaggatcgtacgattttttaaggtagttttgaatattgaggtttatataataattttttgaaatggttttttgaagttattagatagtttttttgttttgtagtggggtttttagtattggaaattttgggtaaatattaaaggatggtgtattatgtagttttttttttttgggtttgtttttaattgaagatatgtgttagagttcggggatttgtttatggtgggggagtattattgtatttttaaggaatgtgggggtgtagttttttaagtatattaatgagtggttggttgttaaagaaatttataaatatgatttatattttgggggagagtttcggtagatatgagtgagggttatatatttagtttgagataattttaggttttttatattagtaagaaaggtgtaaatgggttagaagggttttttattattagggggtttagaggtgttgattttttaaagattttgaatattttttgtggttatcgtttttttttttattgtttttaatttttatttttaggattttgttatattaaggattttgagtatttttgtatttatttggggaattgtttagtttaataggtaaagggagggtggaatgaggattttaatattgttttagttttgtttttgattttatggaagtagagttaatttttttgattttttttgtatttttttttttaaattttgaattttttttttgtttttagtgattgttttggtgattaggttagttaggtttaatttttgataggttttgttagatattcgtaatgtgttttttaagttaaaagttgaatatttttaatttttttgtttttttgttattgtagttttaatttttttaatagtaaaggaggaagatatataggtagggttatatggagaaaaatggtaaagagaaattatattttaaaaatattttttatgagttggggtattagtttatgtttgtaattttaatattttgggaggttaggagttgaagattagtttgggtaatataggagattttgtttttataaaaagtaaaattagttaggtatggtggcgtatattaatagttttagtaatttaggaggttgaggtagaagaatcgtttgagacgaggaagttgaagttgtagtgagttattattatgttattgagattttgttttaaaaaatttcgtaataattaaaaaaatttttgtaatttattagttaaggtagttattgaaagtagagatagaatttagggtttgaagaaagggaggtataaggaaagtgggaaaagttaattttttttggttttatggaattatgggtaagattagggtaatgttgaggttttttttttattttttttttttttgttgagttgacgaatggatataaaagtgtttagagtttttttgatttattaacgaagttttgaagatgggaattggaggtaatagaggtaaggaatttagagattatagggatttataattgttttggaaatagtttattattttttaaaatgatataatatttttaattgatttagtgaatgtgtattataaagttttatagttgtgtattagtaagaattattggttgtttttgttaattaggtttgttataatttatttgtagaaggaataattttaaagttattaattgtatgttgttattagttttgtagttttggattatgagtttattgagggtagggatttagtttggtttatttttgttttgggtaaatttttttattttttgagatagagttttgttttgttatttaggttggagtgtagtggtgtgaatagggtttattgtagttttgattttttgggttttagtaatttttttttagacgtttaagtagttgggattataggtgtgtattattatgttcggttaattttttgtagagatggagttttgtttttttgtttaggttggtttggaatttttgggtttaagtgatttgtttattttggtttttttgggattataggtgtgagttattgtgcgtagtttttttgtaaatatttagtttataataaataatatgtttatattaagtttgagtttattataagatttattatgatatttttatttatagaaggtattttatattgtggttgaataatttttttttttttttttttttttttttgagatggagtttcgttttgttatttaggttggaatgtagtggtgcgattttcgtttattgtaagtttcgtttttcggatttacgttatttttttgttttcgtttttcgagtagttgggattataggcgttcgttattacgtttagttaattttttttattttttagtagaaatggggttttatcgtgttagttaggatggtttcgattttttgatttcgtgattcgttcgtttgggttttttaaagtgttgggattataggcgttagttattgcgttcgtttgaataatttttaaagaaaagataattttgaatattttaggtgattaatgaaaacgatgattatttttttttttttttaatataaattttagtagtatagaaaaaatttgagaagttttaaaaatattaatttatttacgttattttaattaaattaggtgttttggtattggggtaggggtgtggaggtgggggttgggatgttttttaaaagttttttaggtgtgatttaaatatgtatgttgggtgggatttattagattagatttattaaataatgtttttttttttatttagcggaagtatagcgagatttcgtttttttatatttaatttattttatagaagaaagtaaagaaagttttatttaataaagaaagtattttttaggtatttggtttagtgatatggtggttatttattagggattgttattttagttgaattttatgtttatttaagtagttagatattggtttttttattttcgtgtttttgtatattatttcgtatatggtggaatttttcgaattatttgtttttttagagtttgatatgtggtgagggaggttttttttttttaaaaaagattattagtagttggaaaaaattaaaaggtatatggtaagtgtttaagaaaagtttttgatttaagaattattttgatcgggggcggtggtttacgtttgtaattttagtattttgggaggtcgaggtaggcggattatttgatgttgggagttcgagattagtttggttaatatggtagaaatttcgtttttattaaaaatataaaattattcgggcgtggtggtatacgtttgtaattttagttattcgggaggttgaggtaggaaaattatttaaatttggaaggaggaggttgtagtgagttaagattagcgatattgtagtttagtttgggcgatagagttagattattttaaaaaaaaaaaaaaaaaaaaaaagatgtagattttttttatttatatttaaaagtaattttgtgaggaggtttagttgcgatagtaatttgtattttttttttttatttttaagtatagtatttttttattttgcgtttatttagagtaggttttcgtttttttttattttttttttcgggtcgggattttgtttatgtttcggttttgcgtacgagtttagaacgtagtaatttcgtcggcgtttttatggtggtaagtggtcggttttttgcggggttgagtaataaagtagtattagtgttcggtggttttattggaattacgtagagttagattagcgggattatagaatgggttgaggcggcggcggttgtttggataaagttaatagcgggacgtggggcgtgacgtcggttcggtattttaagacgtgtggtttgagttgcgggcgagattaggttttttttaggattttgggtttgataagtgggcgattgtagtagtgcgggaatttattatttgataggaatatgataggaagtgtagggattttatgtttgatggatggtgatttatagtgtggtagttttagtgttgatgggtatgatcgagatagtaggagtatttttaagttttggtgagaggtggagttttagaaggatattttatttaagttgtttttagtttttaaagataaaaaggtttagtggaaaagattttttttttttttttaatgtttttatatttgagattgtgggtttattgtggatatgtattatttagttttaataaataaaagtataaacgtttaatattttttattttttttttttatttttataaagtagtaaaagtttagtttgaaaatggagatgtatgaaatttttggaaaagtgggagagggaagttacggaatagttatgaaatgtaaatataagaatattgggtagatagtggttattaagatattttatgagagattagaataatttgttaataaaattgcgatgagagaaataaagtttttaaaggtttgttttttttgttttaattatttaagttaaaagaaaaaattgttatggaataaaaaattgtataaaatattttagtttatacgtattgatttatattatggagaaataagtgtaatattttattttatttatattttgtaattttatagtgatataagatatatgtgttttggggtatgt

SEQ ID NO: 1861 - DNA, 2724 bp, Artificial Sequence
  chemically treated genomic DNA (Homo sapiens)
gatttgtgttgtgattatattgtaatagattggtcgttttttttagaaggttagtaggagggggtgtagggggaggggtttggtttttgtttgggatacggtgggtgtgtatttgtggttttttgttttggcggtgtagtgtttgtgagattatttcgtggtgttgagtgttttggggtaggggatatagtagtagtagttaggttttggtaggaggtttcgtaggattattttttacgattttttatatttgagatagtaatagttaggtgttgggacgggggtttttaggcggttttgtttagtttttagtaggagggttgtttgtggtagggttttaggttcgtttggtttttttgtggtttggttttgtttggttgtgaggatagttttgtttatggttttttagtgtttggagtattggtttgaggttttagagatttgtttgatgtttggtttcgtttagatttcgggtatttgggaggtcgtgtttttttgaaatggttattcgttaggttgttttgtatcgtatcgggtataggttgcggttatttaggaagtttattttggggttggggaagcgagagttgtgagtttttaagtcgtagttgggttgttttacgtgggagtggagggtggaggaacgtgtggagtttcggagtttagtttagtgcggagatagttttgaaatcgtggttggcgggcgttttatttcgttttgggttcgaattttgtttgattatagttgtgttttttattttttttttgtttggtttttggtttttttttttttatttagaggagggtacggggaagggtaaacggtttagagggcgggcggtttgcgggtttttttgtattatgtgaggagggcgtggggaaggatatttcggtggggttcggtttggggttgtttttagttcgggttgtttgttttggatttagtcgtggatttggaggttagtgttcggttggtttttgttattttttcgttgtgacgttagcgtttgttgattggaggatttaggttttttcgtttgtttttttttaggttgttttgaggatttgtgtttggtgaaaaggagttaaatttatttgtagggtaggcggttttagtagttttagaagtttggtgttttggcgatattggatttgttttggtttttttgattttaattttattttcgatttttgttttgttgattggggaagttatcgtgttatttagaatttgagtgcgggttttttagagttttttcgttcgtgggtttgtcggggattgggttttgtttttttaacgagtgttaggtgaggttgcggcggtttcgacgtaggtggagttgttgatttggtttttttttgcggttgcgaggtgtgtgaggttcgtgggtttttataggtgtgggagttatttaggtttttagggtttttgtggttattttaggatagtttaagtcgtagtagggacggttttttatagtttagaagatttggtttagttttttagttttgtagaggtggtttttgtttggtgttgagatattagatttgggggtagtagttttagtgtttttatggattttgaaaattagtatatatttaggtttgaatttttgggtaagttttgtattttgagcgttgtttttcgtgggtaaaggtggttattagtagggtgatagttgagggtggtattgaggttgttggttttgtttgtttggtgtttttagtgatagtgttggtcgataggttttcgtcgagaacgtaaaggcgaaggtgttaagttttcgaggtttcgtgtagatgtgtggagttggaatttggcgtgtgtgtcgttgtttttgattagggatttggttttttattttatgtttttgttttgttttgtaggattcgtttgttttttgaagttatagggacgtggtagtggttgtacggtttgggaagggtgttttcgtggagggttttttttttagtgaggttgagtttttgttttgtggtatttgttttgttttgtttttaatatggtgaaattttatttttattaaaaatataaaaattagttgggcgtggtggtatacgtttgtagttttagttattcgggaggttgaggtaggagaattgtttgaatttaggaggcggaggttgtagtgagtcgagatcgtgttattgtattttagtttgagtaatagaatgagattttgttttaaaaaaaaaaaaaaaaaaaaaaaaaagaataataggtgttttttggtttagtttgagttttagttttgagcgtttgatattaaggtagggatttagtattttatatttatttggggttttagttttgtttagtttttatttgatggtatggtgaggattttgttatgttagttattatagggtggtagttattttttagtcgtagcggtttagtttttgaatatttgtttttttattttcgagtagaggtcgtagtatgtgtcgtagattagggttgggttggggttatggggaggggttttatttgttttcgtttttcggtgatttgggcgtcgtttataaggttttttttggtagattttcggggtcggacgacggtttgtaagaagagagtttttgttgggttaggttatcgtatgttaggagtaagtttgtttgttgcgggttacgtgcgcgtgttggggtggtaggagttcgttcgttttttttgatttcgtgttttgttttttgtgttttagg

SEQ ID NO: 1862 - DNA, 2724 bp, Artificial Sequence
  chemically treated genomic DNA (Homo sapiens)
tttggaatataggaggtagagtacggggttaggagaggcgagcgggtttttgttattttagtacgcgtacgtggttcgtagtaggtaggtttgtttttaatatacggtggtttggtttagtagggattttttttttgtaagtcgtcgttcgatttcgggggtttattaggggaggttttgtgagcggcgtttagattatcgggaggcgggggtaggtaggatttttttttatggttttaatttagttttggtttgcgatatatgttgcggtttttgttcgaaggtgaggagatagatgtttagaggttgggtcgttgcggttggggggtagttgttattttgtggtggttgatatggtagggtttttattatattattaggtggggattaggtagggttggggttttagatggatgtggggtgttgggtttttgttttagtattaggcgtttagaattgagatttaggttgggttaggggatatttgttatttttttttttttttttttttttttttttgagatagagttttattttattgtttaggttggaatgtagtggtacgatttcggtttattgtaattttcgttttttgagtttaagtaatttttttgttttagtttttcgagtagttgagattataggcgtgtgttattacgtttagttaatttttgtatttttagtagagatagggttttattatgttgaagatagagtagaataagtattatagggtagaggtttagttttattgagagaggagttttttacggggatattttttttagatcgtgtagttattattacgtttttgtggttttaggggatagacgggttttgtagggtagggtaggagtatggggtaggggattaggtttttgattagaggtagcggtatatacgttagattttagttttatatatttgtacgggatttcgggggtttggtattttcgtttttgcgttttcggcgggagtttgtcggttagtattgttattggggatattaggtagatagggttagtagttttaatgttatttttaattgttattttattggtggttatttttatttacgaaaaatagcgtttaagatataaaatttgtttaagaatttaaatttaagtgtgtgttggtttttaaagtttatgggaatattgaagttattatttttaagtttgatattttaatattaaataagagttatttttataaagttgggggattgagttaggttttttaagttgtggggggtcgtttttattacggtttgggttgttttagaatagttataagggttttggggatttggatggtttttatatttgtggaggtttacgaattttatatatttcgtagtcgtagaaaggggttaggttagtagttttatttgcgtcggagtcgtcgtagttttatttggtattcgttagggagataaggtttagttttcggtagatttacggacgaaggagttttgagaggttcgtatttaggttttgggtggtacgatgatttttttagttagtagagtagaaatcgggggtggggttgggattaaagaagttaaggtaggtttagtgtcgttagggtattaggtttttgaagttgttagagtcgtttgttttgtaggtgaatttggtttttttttattaaatatagatttttagggtagtttgagaaaaagtaggcgaaggaatttgggttttttagttagtaggcgttggcgttatagcgagagggtgataggggttagtcgggtattggtttttaggtttacgattaagtttaagataggtagttcgggttggaggtagttttagatcgggttttatcgggatgtttttttttacgttttttttatatgatgtagaggagttcgtaggtcgttcgttttttggatcgtttgttttttttcgtgtttttttttaagtgagggggggggagttaggggttagatagggagaaagtggggggtatagttatggttaggtagggttcgagtttagagcggagtggagcgttcgttaattacggttttaaggttgttttcgtattgggttggatttcgaaattttatacgtttttttattttttatttttacgtggagtagtttagttgcgatttgaggatttatagttttcgtttttttagttttaggatgggttttttgagtggtcgtagtttgtgttcggtgcggtgtaaagtagtttggcgagtggttattttaaggaggtacgattttttaggtgttcggggtttgagcgaggttaggtattaggtaagtttttgaagttttaggttagtgttttagatattgaaggattatgggtaaggttatttttatagttaggtaaggttaggttatagagaggttagacgggtttgggattttgttataggtagtttttttgttgaggattggatagagtcgtttagaggttttcgttttagtatttagttattgttgttttaggtgtgagaagtcgtgaggggtggttttgcgagattttttgttaagatttggttgttgttgttgtgttttttgttttaaagtatttagtattacggggtggttttataggtattgtatcgttagggtaaggagttataggtgtatatttatcgtgttttagatagaagttaggtttttttttttgtatttttttttattggttttttggagaaagcggttaatttgttataatgtaattataatatagatt

SEQ ID NO: 1863 - DNA, 6078 bp, Artificial Sequence
  chemically treated genomic DNA (Homo sapiens)
ataagtaagggtttggtgtggttgtttatatttgtaattttagtattttgggaggtcgaggtaggcgaattatttgagtttaggagttcgagattagtttggttaaaatggtaaaattttatttttattaaaaatataaaagttagttaggtatggtggggggtatttgtaattttagttatttaggaggttgaggtaggagaattgtttgaatttaggaggtagaggttatagtgagtcgatattgtgttattgtattttagtttgggtaatagagcgagatttcgttttaaaaaaaaaaaaaaaattaaaaaataaaatttatagaatgtttaatattaagagtgaattttgggtgataatgatgtattagtataggtttattaattgtaataatttatattattttggtgtgggatattgatagtgtgggatgtatgtgtgatatgggtattgtattttttgttaaattttgtcgtgaatttaaaattgttttgaaattaaagtttgtttagaaggaaaaatagttgagtatattatgtgtagaatattttaagatttggaatgggatatttaagggtagatttttgagattaagaatgaaatagaattggtatgaattgaagtttagttttgagaattttggtaggtagaaaattttagtttttaaaattggattaaggtgattttgggtttttagtgttttaggataaaatttttttttgaaggaagaaaatattgttattatagattattttagtaaagttttaaatatagtgtttagtacgtaattaaagataatgaggagataatgtgaatgagaattaaaaaaagtaagtgtttttaggggttttagaatgattagaaataggatttaaaataattatgttaattattgttaaggtatatagagaatgttaattgagaatttgaattgttaataaggatatagtaaatttgaaaaagattaatagaaattgtaggattgaaaaattataatatagattaagaattatatgggtcgggcgtggtggtttaagtttgtaattttaggattttgggaggtcgaggcgggtggattacgaggttaggagtttaagattagtttggttaatatggtgaaatttcgtttttattaaaaatataaaaaaataattagttaggtgtggtggtacgtgtttgtagttttagttatttagggaggttgaggtagagaattgtttgaatttgggaggtggaggttgtagtgagtcgagattgtgtcgttgtattttagttagggcgatagagcgagaatttgttttaaaaaaaaaaaaaaaagaattattgttgttttagtttattttagtttatttttcgatttttaatttagatgttatttatgtatttattttggaagttttttttgattaatttgtttggatgtaggtttttttaataattttttttatttattattagtagttttttttaaggttattgtatttttttttaatgtaatggttttattgagataattagtttatattgtttatttttttaaaatatataatttttagtatatttatatagttgtgtaattattattaattaattttagagtatttttattatttttaaaaggaattttgtatttattagtagttattttttattttttttttaattttttagttttagtaggaggttggagtagtagtttattaatgttgttttgaatattagtgtatatgtttttgttatatgttttatttttatttttagaaatagagtgtattagtttgtttttatattgttgtaaagagttgttttagattgggtaatttatgaagaaaagaggtttaattgatttataggtttgtaggtttaatcggaagtatgattggaagtttttaggaaatttataattatggattaaggtaaaggggaagttattattttttttatacgagagtaggagaaaaagattgtgaagcggaaagtattacgtatttttaagtaattagatttcgtgagaagttatttattatattgagaatagtaaggggaaaatttgtttttattatttatttattttttaagttttttttttaatattgggaataataattggatatgagatttgagtggggatatagagttaaattatattatagggttttattatgttgtttaggttagaatgtaattatagtttattgtaattttgaatttttggttttaaggtatttttttgttttggttttttaaagtgttgggattataggtatgtgttattgagtttggaatggatatatgtttttaattttttcgggtatatatttaggagtgaaatttttgggttttatggtgattttatgttttataattttgggaattgatagatagttttttaaaattttttttttttgagatagggttttgttgtgttgtttaggttatatagtgtattggtttataggtttgattatagtatagtatattgaggtttttatttcgtggttttaagggatttttttgttttagttttttaagtagttaggattataggttagtgttattatgtttagtttaaagtattttatatttttattaatagggtataagggttttaatttttttatagttttgttaatatttgttattttttgtttttttgaatatagtttttttagtgggtataaagtggtatttttttgttttttttttttttttttttttgagattgagtttcgttttgttatttagtaataagttggagtgtaatggtgtgattttagtttattgtagtttttttcgttttttaggtttaagcgatttttttgttttagtttttcgagtaattgggattataggtttgagttattaagtttggttagtttttgtatttttagtagagatggggttttattatattggttagtttggtttttaatttttgattttaagtgatttgttcgttttggttttttaaagtgttgggattataggtgtgaagtattacgtttgattgttttttttttttgagataaggttttattttgttgtttaggttggagtggagtgggatgattttggtatattgtaatatgttgtttaggttggttttgaatttttgggtttaagagatttgtttatttgggttttttaaagtgttgggattataggtgtgagttacggtgttcggtttttttgtgtgtgtgttttttggtttttttttttgagatggtgattaaaaaaatataataataaataataaataaaaaataaaacgaagttatttttttgtatgtgaatgtttagtagtggtagtattaattgttgaaaagattgtttttttattattgatttgttttggtgtttttgttgatgtaaatgtgagggttattgatttattttaggatttttaattttatttgtttatatttttattttttatgagtatgttcgtagggttattgtgtatgttagtagggttattgtgttttatagaagaaatttaagaagaattatttttttttttttttttattaaaagttatgtttattaatttagtattataattcgttttagaattttttatgtagttggaaagggaatatgggaagaggtgagtatgttggaaatgtagggtagtttttaaattgaggttttattttgtttgttttaaagttaaaaatatagggtttagtaaagaggagtttagaggttggagatgaaaataaaagtttttggtttagatggtaaaggaggtttttaagagtagtagaattagtatatttcgaaggtagtgttggaggtatttttatgaagtagggggtttttttttggtatttaagttttttttaatttttttaagttttttagttaggtttggtatgttatagttttgagttagatatattttaattacgttgtttaatgtaaatttaagtaggaattggagtatgatgttggtggggagggcgaggagggcgtaaagggttgttgtagttttgtaggtcggttagagtttgtttttttatgcgaggggagcggaatcgtttttttcgttatttttttttttttgagagggagttttatttttgtcgtttaggttgtagtgtaatggcgcggatttcggtttattgtaattttcgtttttcgggtttaagcgattttttagttttagtttttttagtagttgggattataggcgttagttattacgttcggttaatttttgttatttttagtagagacgtggttttatcgtgttggttaggttggtttcgaatttttgattttaggtgattcgttcgtttcggttttttaaagtgttgggattataggcgtgagttatagcgttttgttaagaagaattattttttaattttaatttaaagtaattaatttaagggttggaattatttattttttatttagaatttttagtagcggtttttagtattagtagtcgttaagattgtgttgggtcgttgtttttttgttgttttaaattacggttatgtgtttggtaagggtgttggttaatcgaaaatgttggttttagagttagaagtattggtatttaaataaatatatttgggggttgggggttgatgagtaaggttgggaggagataaaagaagtatttcggtttagtcgttagagacgcgtaaggtgtaacggagagagtaatttaggttgtgagagtggttttaaatattgagatatggagttaggatttttgtttttgggggatggttttagtattgatgcgtaggatttggtttttgaaggagttgataaaattgtcgtttattcgcgcgattatcggtaaagtagttttatagtttgtttttttttttggttgtttttttatttatttttcgttttgttttttttttttttttttttttttttttttttgcgcgaagcggaagtgacgcgaggcgtagcggaagttattgtagtcgcggtgttgtgttgtggggaagggagaaggatttgtaaatttcggagcgaggttttgtttattcgaggtcgttgttgtgcggagattttcgggtgaagttatcgttattatgtttgattaggtatcgggttgggagttatttaacggcggtggttagcggtttttttgtaggtttgtttgtcgttatggggttcggggatggaggcgcgggggaggggattcggaatgggggagggggcggtcggtggggattaggtaggcgacgtatacgatcgattacgtcggtagtgtcggggtttgttgcggggttttcgagcgttcgttttttttcgggttcgtttattattttcgtattttatcgtttttggtggcgttttttttatgtcgttttatttttttttttcgggtcgattaggtgtagagcgtcgtttttatttttttgggagggtttttggagaattcgttcgtttttttttagaggattaatcgtagaagtagggttttaggttttagttatgtaacgggagagaatttttgattgggaggtttcgtggttttgagaagcggttggattttttattttttgttttttcgtcgggagggcgtggggcggcgagggagggagacgttcgatgttgttgggaattttgttttcgttcggattggagttagggtaaggatgtcgttgtttttttttgagttttttttcgtgtgggggtgtagagttgtcgtttttttattgtattttttcgttttttattcgggattggtttattttagttttttagttgtaagagagtatttataataattaagaaagaaaatagaattaaattgttagagtaataaaaagtattttatttgggtattaatttgaggaagttttatatttttgaggaaaagtataggaaaattttgtgtatgtagagtcgttgtagaatatttgtagaaagttgtttggtaaggtaaagtgttttagtttattgttagtattaataatttatttgggatttgtatttaattaggagtgatcgattttttttttttttttttattttgttttaattaaataattttatggttagtttttaatttataaagtttttgtttggttttttgtt

SEQ ID NO: 1864 - DNA, 6078 bp, Artificial Sequence
  chemically treated genomic DNA (Homo sapiens)
aataaaagattagataaaaattttatgaattaaaaattagttataaagttgtttaattagaataggatgaggaagaaaaggggaaatcgattatttttgattaagtgtaaattttaagtaaattattgatattaatagtgagttggagtattttgttttattaggtaattttttgtaaatattttgtaacgattttatatatataaagtttttttatgtttttttttaaaaatatgagatttttttaggttaatgtttaggtgagatgttttttgttgttttagtagtttagttttatttttttttttggttattatgaatgtttttttataattggagagttaggatgaattaatttcgagtaagaaacgggaaagtatagtaaagaggcgatagttttgtatttttatacggaaaaagatttagaggagagtagcggtatttttgttttagttttaattcgaacggaggtaggatttttaataatatcggacgtttttttttttcgtcgttttacgttttttcgacgaagaagtaaaaagtggagagtttagtcgttttttagggttacggagttttttagttagggattttttttcgttatataattaaggtttagggttttgtttttgcgattagttttttggaaggagacggacgggttttttagagatttttttagggaggtggaagcggcgttttgtatttagtcgattcgggagaaagaagtgggacgatatgagggaggcgttattaaaggcggtggggtacgggggtgatgagcgagttcggagaggggcgggcgttcgggagtttcgtagtaggtttcggtattgtcggcgtagtcggtcgtgtgcgtcgtttgtttagtttttatcggtcgtttttttttttatttcgggttttttttttcgcgtttttattttcgagttttatagcggtaggtagatttgtagggaagtcgttggttatcgtcgttggatggtttttagttcggtatttggttagatatgatgacggtggttttattcgggggttttcgtatagtagcggtttcgggtaagtagaatttcgtttcggggtttataaattttttttttttttttatagtataatatcgcggttgtagtaattttcgttacgtttcgcgttattttcgtttcgcgtagggaggagggagagagagaagagaggaaagataaggcgggaaatgggtgggggagtagttaaggggaggggtaggttgtggagttgttttgtcggtggtcgcgcgggtgaacggtagttttgttagtttttttaaggattaggttttgcgtattagtattagggttattttttaggagtaaaggttttggttttatgttttaatgtttggagttatttttataatttagattgtttttttcgttatattttgcgcgtttttgacgattgagtcgagatattttttttgtttttttttagttttgtttattaatttttaatttttaaatatgtttatttgaatgttagtatttttagttttagaattaatattttcggttaattagtatttttgttaaatatatgatcgtgatttaaaataataagaaagtaacgatttaatataattttgacggttattgatgttaaagatcgttgttgaaagttttaaatggggagtgagtaattttaatttttgaattggttgttttgagttaaggttaaagaatgattttttttggtagggcgttgtggtttacgtttataattttagtattttgggaggtcgaggcgggcggattatttgagattaggagttcgagattagtttggttaatacggtgaaattacgtttttattaaaaataataaaaattagtcgggcgtggtggttggcgtttataattttagttattagggaggttgaggttggagaatcgtttgaattcgggaggcggaggttgtagtgagtcgagattcgcgttattgtattgtagtttgggcgataagagtgaaatttttttttaaaaaaaaaaaggtggcggggggggcgatttcgtttttttcgtatggggaagtaggttttgatcggtttgtagagttgtagtagttttttgcgtttttttcgttttttttattaatattatgttttaatttttgtttggatttatattgggtaacgtggttggaatgtatttggtttagaattatgatatattaaatttggttaaaaaatttgaagaaattaaaaaggatttggatgttaagaagaaattttttattttatgagaatgtttttagtattgttttcgggatatattgattttattgtttttgagggttttttttattatttgaattaaaagtttttgtttttatttttagtttttgggtttttttttgttagattttgtgtttttggttttagagtaagtaaaatggggttttaatttgagaattattttatatttttaatatatttatttttttttatattttttttttaattgtatgggaggttttaagacgaattgtggtgttagattagtaaatatgatttttaatggaaaaaaaaaaaagaatgattttttttagattttttttgtaaaatataatggttttattggtatatatagtggttttacgggtatatttatggaggataagaatataaataaatagaattgagaattttgaaataaattaataatttttatatttatattaataaaaatattaagataaattaatggtgaaagaatagtttttttaatagttggtattattattgttggatatttatatgtaaaagaatgatttcgttttgttttttgtttgttgtttgttgttgtgtttttttggttattattttaaaaaaaaaaattaaaaaatatatatataaggaggtcgggtatcgtggtttatatttgtaattttagtattttgggaggtttaggtgggtagattttttgagtttaggagtttaagattagtttgggtaatatgttgtagtgtgttaagattattttattttattttagtttgggtaatagagtaagattttgttttaaaaaaaaaaaataattaggcgtggtgttttatatttgtaattttagtattttgggaggttaagacgggtagattatttgagattaggagttggagattaggttggttaatatggtgaaattttatttttattaaaaatgtaaaagttagttaggtttggtggtttaggtttgtaattttagttattcgggagattgaggtaggagaatcgtttgaatttgggaagcggaggaggttgtagtgagttgagattatattattgtattttagtttgttattgggtgatagagcgagatttagttttaaaaaaaaaaaaaaaaaaaaaataaggagatattattttatatttattagaagggttatgtttaaaaagatagaaaataataagtgttgataaggttatggagaaattagaatttttatattttgttagtaggaatataaaatgttttaggttaggtatggtggtattggtttatagttttagttatttgggaggttgaggtagaaggattttttgaggttacgaggtggaagttttagtgtgttatgttatgattaagtttgtgagttaatgtattatatagtttggataatatagtaagattttgttttaaaaaaaaaaagttttgaaaaattgtttgttagtttttaaaattgtaaaatataaagttattataagatttagaaattttatttttaggtatatattcgagagaattgaaaatatatatttattttagatttagtggtatatgtttataattttagtattttgggaggttaaggtaggaggatattttgaggttaagagtttaagattatagtgagttatgattgtattttagtttgggtagtatagtgagattttgtgatatggtttggttttgtgtttttatttaaattttatgtttagttgttatttttagtgttgggggagggatttgggaggtgagtgaataatggggatagattttttttttgttgtttttaatatagtgagtgattttttacgagatttggttgtttaaaagtgcgtagtatttttcgttttatagttttttttttttgttttcgtgtgaagaaggtgatagttttttttttgttttggtttatgattgtaagttttttgagggtttttagttatgttttcggttaggtttgtagatttatgagttaattaaattttttttttttatgaattatttagtttaaggtagttttttatagtaatgtgagaatagattaatatattttgtttttaaaaataaaaataaaatatataataaaaatatgtatattaatgtttaaagtaatattagtgagttattgttttagttttttattagggttgagggattagggagaaaatggagagtgattgttgatgggtatagagttttttttggaagtgatgaaaatgttttaaaattgattggtgatggttgtatagttatatgaatatattaaaaattatatattttaaagaggtgagtagtataagttaattattttagtaaaattattatattaaaaaaaaatataatggttttgaaaagagttgttagtaataggtgaagaggattattaagggagtttatatttaagtaagttagttaggaaaagtttttaaaataaatatataaataatatttaaattgaaggtcggagagtaagttgaaataagttagagtagtagtagtttttttttttttttttttgagataaattttcgttttgtcgttttggttggagtgtagcggtataatttcggtttattgtaatttttattttttaagtttaagtaattttttgttttagtttttttgagtagttgggattataggtacgtgttattatatttggttaattatttttttgtatttttagtagaggcggggttttattatgttggttaggttggttttgaatttttgatttcgtgatttattcgtttcggttttttaaagttttgggattataggtttgagttattacgttcggtttatataatttttaatttgtattatagttttttagttttataatttttattggttttttttaaatttgttatgtttttgttaataatttaaatttttagttgatattttttatatattttaataataattaatatggttattttagattttgtttttgattattttagagtttttggaggtatttgttttttttgatttttatttatattatttttttattatttttgattacgtgttgggtattgtgtttgaaattttgttgaaataatttgtaataataatattttttttttttagagaggagttttgttttagggtattaggaatttagagttattttaatttaattttagggattgagattttttatttgttagaatttttaaagttgggttttaatttatgttagttttgttttatttttagttttaagagtttatttttagatgttttattttaaattttggggtgttttatatatgatatatttaattgtttttttttttaaatagattttgattttagagtagttttaggtttacgataaaatttagtaggaagtatagtgtttatattatatatgtattttatattattaatgttttatattagaataatataaattattataattgataaatttatgttgatgtattattattatttaaagtttatttttggtgttagatattttatgggttttattttttaattttttttttttttttgagacggagtttcgttttgttgtttaggttggagtgtagtggtataatgtcggtttattgtaatttttgttttttgggtttaagtaatttttttgttttagttttttgagtagttgggattataggtgttttttattatgtttggttaatttttgtatttttagtagagatagggttttattattttggttaggttggtttcgaatttttgggtttaagtgattcgtttgtttcggttttttaaagtgttgggattataggtgtgagtaattatattaggtttttatttat

SEQ ID NO: 1865 - DNA, 5283 bp, Artificial Sequence
  chemically treated genomic DNA (Homo sapiens)
tcgataacgcggcggttgtaattaatcgatagcgaggtcggtcgcgaggttttagtttcgttttgtaggagttagtcgcgcgttcgttcgtaggagggtgggtagtttgtttagcgtagggggttgggtttataaaagaggaagtgtatttaagatacggtttagtggacgttgttagaaatcgttttggttgggaaggtaagaggtgtgtgattggataagatttgtttttggcggttagttttgttatttttatagaggttggcggttcgagagagtgtgaggtagaggcggggagtggtaagggagtgattatttcggggaacgaaggagtaaacgcggtgatgggacgtacggaaacgggagtggagaaagttatggagagaattttaggcggggcggttttcgcggaaaggcggttgttttagggttttcgtatttaagtaggagttggtaggttcggtttcgtttcgtaggttttatttcgggtttcgttttcgaggtttaagtcgcgtcgtcgtttgcgcggagttttattgcgaagtttagttgcgcgcgttttgggattgattgtttacgttcgttcggttcgttcgacgcgtttttcgttagtcgatagatatagtcgtacgtattgtcgtgttttttttgcggttcggtgagtttggttttagttttgcgttttttgcgttttttacgtttgttatgcgtgcgttgttcgtttttttatttatttttttttttatttaagtttgtatttttttttttttttcggttttattttttgtttttgtttgtttgtttgagataggttttcgttttgttttttaggttggagtgtagtggcgcgatttcggtttattgtagtttttattttttaggtttaagcgattcgtttgtcgagtagttgggattataggcgttcgttattacgtttggttaatttttgtgttttgtagagatggggtttcgttatgttggttaggttggtttcgaattgtttagtttaagtaattcgttcgtttcggttttataaagttttagaattttaggtatgagttttcgggttcggtttgtgttaattttttttgtttttggttttttatttttttttttttttttttttagttttttttgttttttttttttttcgtttagttggttgtcgtttgagtttttatttttttatttttttttttttattacgatgtcgagttttgttttggatggggattattagcgatgattataatgattttttttttattaggtagttttaggtagtgtttttgtatcgttttttttagggtttgggggttttttttagtgggttttgagttgtttaatttggtttttgtagggtcggtttttagtttttttaatttttttatagttcgatttgggatttagttaattttcggagagtttttgttttatcgtgatttttttataatttttttatttattaaagtttgatgattgtgttagggggtgtttatatagagtattgagtgttataaaagtagaagtttggatgagaattaatttgtgatattaagtaggtggggtgggggtggggagtgtatttaggtttatttttcgttttgttttttttttttttagtgtgtgtatttaattagtttttgggttttgttttttatttttttttaaggtatggattgggtgggtttgtgtgttttggggtaggtggttttttttaaattttttgtttttgtttatttataggatatatagtatgattattaggtgtttcgttttttatttattttttatggaaaattaaggggatcgggttatgatagttattggtagttttgaagaacgggatatttttagagaagtttgattttggaggttttatcgtgagattttataaagtcgggtaagagtttagtttaaggaagaggttttttgttgttttttaattttgtggtttaggggtaggagttagtagggtattaataaaaataattattatttttattttcgatagtgaagtggttttttttagtttatagagtatttttatattttttcgtttttattttggttttttagttgattcggataagttaaggattttggtttttattttataaaggagaaaattgaggtttacgtgtaatagtgattggttttaagttatttcgggagttagtagaagagttaggataggaatttattgttttaattttatattgatgttagtttttgattatttttgaaatcgagattggtaattagttcggttttgaaattggttatttgttggggattgtaaaataggattaattatttttagttttgtattttaattgttgttagtagggttattttatttattttttgaaggatttgatttggtaagtttaaggtaatatttagaatatggtagttgaatttttgtgtatttgtttttgggtagtagttgggttttatttttttttggtttttataatattttgtaatttagtttaaggttaggaatgtgatagatttatgttattatatttttgatgtttagagaagggatattatttgtttgagtttttttagtattgtttaattagtttgtgagaattttttttgtgaaaggttttgtttgtgtttggggttgataaaatagtaagaacgaattgaggagttgggtagtagtgtaaagtaaatattattagttttggtgtttgtaagtgtggtttttatttattttatatggaaataagggtagttattttgtagggttgttttgaggattgagttaatatagtgttttgggcgttggggtggggaaagttgtggagtattttttgggggaagggggtgttagagtagggaatttggggagttcgagggtatttttattaatttaatttgttatttgagtattagtttttattgagtttcgtgggtaagttggagggaaataggaataaggttaggttttgttttataggttttagtgtagttgttatggtgagtatttttatttttttgtttgttttagttatttggagtgagaagtttaagagtaagttgggtgagttgtttgtttttatgggtttttgtgtttataaataattttttttattaattagtttttttatttgagttttagtaataaagatagttaggcggggtttaaagtagttgttttaatgaagttaaagaaataagtttaggggaagaagtaggttatttttttttattagggtgttgggtttatttttttttggggtagtggaggagggtgtggttttaatttagaataaaatggggtttttggtttattttattattttttatagttttgatttggattttttatttttgtttgttttgtggtgtaagtgcggatttttttaagttggaggaaaggaaattggtttaaataaaaaggagagtagttttttttgtattatatggtaggttaggaggagtttaatgttttagagtttatttttagtttttaaaattatttagttaaatgttattttatttaagaagtttttaggttttttggggttttttttttttttttttgagataaggttttatttttttatttagattggagtatagtggtataattatagtttattgtagttttaattttttgggtttaagtaatcgttttaagtagttgggattataggtttgtattattatgtttagttaatttatttttatttatattttttagatagggttttattatgttgttttggttggttttgaatttttgggtttaagtagtttttttatttttgttttttaaagtgttaggtttttttttgtttgtttgtttgttttttgaaatagagttttgttttgtcgtttaggttggagtgtagtggtacgattttagttattgtaatttttattttttgggtttaagtgatttttttgttttagttttttaagtagttgggaatataggcgtgtgttaatatatttagtttatttttgtatttttagcggagatggggttttgttatgttggttaagttggttttaaatttttgattttaggtgattcgttcgttttagttttttaaagtgttgggtttataggcgtgagttattatatttagtttaagaagttttttttgattatttattttttttttttttttaatggtattagttgtttttttttttgtattttgagagtatgttttgtaagttttaaatgtagtttgaattatttgtttatttattttttgtgtttaatagtaagttttttttagagtagatattattttttgtattttagtgaattattgtttagtaaagtagttttgttaaaataatgattttagagattttaagttgtgtgagagttggaggagagaattagattgatggtttgggaagggattgaattagttattttgtattttttttttttgatttaagttttagatttgtagtaattatttttgtttagatatttagaatataagtttatgggtttgtgtttgttgggttttagtttgggtgaaatttttttttatttttgttagttttttagatgaattatagaagtaggaatgtgggtattattagtgaaatttttgtatatagtagataaagggttggtttagtggttgtttatgaggtagcgttaggagagttttgatttagattttttttgtagtgaaagggagggagttttttatgaagtattgattgtttgagtaggaattgttttattagtatttaattgagtgtttttcgagtttatatcggtttttttttatgaggttatttggagttttgttgagggatttggttttattagggaaggtgagtttggggatggtgagtagggagggtttggggatattgtggttaatggggtttttttttttttggtttagatttcggtagagtttttttatttcgttttgttgttgattaaaggtgtttttgtttttagtttttttttattttttgggacgtagtaggaaattagtattatggttgggtttaaggttatagatgtgttttttattgttattgtgaagttttttggggttggtatagttgtttgtatcgtagattttattattttttttttggatattgttaaagttcggttataggtgaggggatgaagtttgggagttttgatggtgtttattttgttttttttttaaagatatagattttttaagggttagtgtttggagtatcgagatgattggaggtgggaagggtaatatgtttatttttgtagttattttgttttggttttgtaga

SEQ ID NO: 1866 - DNA, 5283 bp, Artificial Sequence
  chemically treated genomic DNA (Homo sapiens)
tttgtaaggttaagatagggtagttatagggataagtatgttgttttttttatttttagttatttcgatgttttaaatattggtttttgaggggtttgtgtttttggggagggaatagagtagatattattaagatttttaggttttatttttttatttgtaatcggattttagtagtatttagaggaaaggtgatgagatttgcgatgtaggtagttgtgttagttttaagaaattttatagtggtagtagggggtatatttgtggttttgaatttaattatgatgttgattttttgttacgttttaggagatggagaaaaattggagataggggtatttttaattagtaataagacgagatagaggaattttgtcggaatttaagttaagaggagaaaagttttattagttataatgtttttaggttttttttgtttattatttttaaatttattttttttaatagaattaagttttttagtaagattttaagtggttttatgagggaaaatcgatgtgagttcgagaggtatttagttaggtgttggtgaagtaatttttgtttaagtagttaatattttatgaagggtttttttttttttattgtagggagagtttggattagagtttttttagcgttgttttataaatagttattggattagttttttgtttgttgtatgtagagattttattgatgatgtttatatttttgtttttgtggtttatttggagagttgatagaagtagagaaaagttttatttagattaagatttaataggtatagatttataggtttatgttttggatgtttaagtaggaatggttgttataggtttggaatttaagttaagaagaaaaggtataagatgattaatttaatttttttttagattattagtttaatttttttttttagtttttatatagtttaggatttttagagttattgttttagtaagattgttttgttgggtagtggtttattgagatgtaggagatagtatttattttagaggaggtttattgttgggtatagggggtggatgggtagatgatttaagttgtatttggggtttataggatatatttttaaaatgtaaaggagggaataattaatgttattgggagagaaggaagagtgggtgattagaaaagattttttgggttgggtgtggtggtttacgtttgtaaatttagtattttgggaggttgaggcgggcgaattatttgaggttaggagtttgagattagtttggttaatatggtaaaattttattttcgttaaaaatataaaaatgagttgggtgtgttggtatacgtttgtatttttaattatttaggaggttgaggtaggagaattatttgaatttaggaggtggaggttgtagtagttgagatcgtgttattgtattttagtttaggcgatagagtaagattttgttttaaaaaatagataaataaataaaaaaaaatttagtattttgggaggtagaggtgggaggattgtttgaatttaggagtttaagattagttagggtaatataatgagattttgtttaaaaaatataaataaaaataaattagttggatatggtggtgtaggtttatagttttagttatttgggacgattgtttgagtttaggaggttgaggttgtagtgagttgtgattgtgttattgtgttttagtttgggtgagagagtgagattttgttttaaaaaaaaaaaaaaaaaattttaaaaaatttaaggattttttagataaggtaatatttagttaggtgattttgggggttgagagtaaattttggggtattagattttttttggtttattatgtgatgtagagaaaattgtttttttttttgtttgggttagtttttttttttttaatttagggggattcgtatttatattataagataggtagggatgaggggtttaggttagagttgtgaagagtgataaagtaaattaaaagttttattttgttttgagttggaattatatttttttttattgttttaggaggaagtgagtttagtattttagtgggggagggtgatttgtttttttttttgagtttatttttttgattttattggagtagttgttttgagtttcgtttgattgtttttgttgttggggtttaggtgaaagggttggttggtgaagggagttatttgtgaatatagagatttatggaaataaatagtttatttaatttatttttgggttttttattttaggtggttggggtaagtagggaaatgaagatatttattatagtaattatattgggatttatagaatagggtttgattttatttttgtttttttttagtttgtttacgaggtttagtgaagattggtgtttaaatgatagattgggttgatgaaggtgttttcggattttttagattttttgttttgatattttttttttttaggaggtgttttataattttttttattttaacgtttagggtattgtattagtttaatttttagagtagttttgtaaggtggttgtttttatttttatgtgagatgagtaagagttatatttataggtattaaagttggtagtatttgttttgtattgttgtttagttttttagttcgtttttgttgttttattagttttaggtatagatagggttttttataaggaaagtttttataggttgattaaatagtattgagaaggtttaggtaaatggtattttttttttgggtattagagatatgatgatatgagtttgttatatttttgattttgagttgggttgtaggatgttgtgaaggttagagaagaataagatttagttgttgtttaaagataagtgtatagaggtttagttgttatattttgaatgttgttttgggtttgttaagttaggttttttagagggtgggtaagatggttttattaatagtaattaaaatgtaggattagaaatagttaattttattttatagtttttagtaaataattagttttagagtcgggttgattattaatttcggttttagggatagttaaaagttagtattaatatgaagttagaataataggtttttgttttagtttttttgttggttttcgggatgatttggggttaattattgttatacgtgggttttagtttttttttttataaaatggggattaagatttttggtttgttcgagttagttgaagggttagaatgagagcggggaggtgtgagagtgttttgtgaattggaaagagttattttattgtcgggggtggggatggtaattatttttgttaatgttttgttgatttttgtttttagattatagggttaggaggtagtaagagattttttttttggattggatttttattcggttttgtaaggttttacggtgaggtttttaagattaagtttttttaaaggtgtttcgttttttaaagttgttagtggttattatggttcgatttttttggttttttatagaaaatgggtgggagacgaaatatttaatggttatattatgtgttttgtgggtgagtaaaggtagagagtttagaaagggttatttgttttaagatatataagtttatttaatttatgttttggagggggatggggaatagggtttagggattggttaagtgtatatattggaaaggggaaaagtagggcggaaaatgaatttaggtatattttttatttttattttatttgtttaatattataaattggtttttatttagatttttgtttttgtaatatttagtattttatataagtattttttagtatagttattagattttggtgagtgggagagttgtgagggggttacgatgggatagagatttttcgggaattggttaggttttaggtcgggttgtgaggaggttggaagggttgggagtcggttttgtagaggttagattgagtagtttaaagtttattagaaaaagtttttaagttttgggaaaggcggtgtaggaatattgtttggagttgtttggtaagggagaggttattgtggttatcgttgatggtttttatttaaggtagggttcggtatcgtggtggaaaggagggagtgaaaaggtggaggtttaaacgatagttaattgaacgggagagggaaagaataaaagggattaagaaaaagagagaagagaaataaagaattaaggatagaaaggattagtataggtcggattcggaggtttatgtttaaaattttaggattttgtgaggtcgaggcgggcggattgtttgagttgagtagttcgaggttagtttggttaatatggcgaaattttatttttataaaatataaaaattagttaggcgtggtggcgggcgtttgtaattttagttattcggtaggcggatcgtttgaatttgggaggtggaggttgtagtgagtcgagatcgcgttattgtattttagtttgggagatagagcgaaagtttgttttaaataaataaataaaaataaaaaataaaatcgagagaaagaaaagagtataaatttgggtgggagagaaggtaaatggaagagcgggtagcgtacgtataataagcgtggggggcgtaaagggcgtagggttggggttaggtttatcgagtcgtagggagaatacggtagtgcgtgcggttgtgtttgtcggttggcggagggcgcgtcggacgagtcgggcgagcgtggatagttaattttaaggcgcgcgtagttgggtttcgtagtggggtttcgcgtaggcggcggcgcggtttaagtttcgggggcggggttcggggtggggtttgcggggcggggtcgggtttgttagtttttatttgggtgcggagattttggagtagtcgttttttcgcggggatcgtttcgtttagggttttttttatgattttttttattttcgttttcgtgcgttttattatcgcgtttattttttcgtttttcgagatggttatttttttgttatttttcgtttttgttttatattttttcgggtcgttaatttttgtgaggatggtaagattgatcgttagaaataagttttgtttagttatatattttttgtttttttagttaggacggtttttaatagcgtttattgggtcgtgttttaagtgtatttttttttttatgggtttagttttttacgttgggtaaattatttatttttttgcgagcgagcgcgcggttggtttttgtagggcgggattggggtttcgcgatcggtttcgttgtcgattggttatagtcgtcgcgttgtcgg

SEQ ID NO: 1867 - DNA, 6899 bp, Artificial Sequence
  chemically treated genomic DNA (Homo sapiens)
tagtaggtaggtgttttatgttatttggtaattttaggagttttaaagggttaaatagagagtgtattatttatcgttatttttttgagagttggatatgtttttagtattatatatgggattaaatttagaggataaatgatttgtttaaagttatgtaataggagaagggatgaggatttaaatttattttggaggtgacgttgtttttttttttagaggtatagaaagagttagggttggggtttacgttttagttttgttatttagagttgtgggattttgagtttattttatttgaatgtagtttttttatttacgatatggggagaatgatatattttttatatggggttgaggtaagggttaagtaagataaggtacgtaaagcgttttgtaaattaggtagttttatataaatattaattaaaggattaaaagatgagagaaattagcgttatttattggtggtgttatatttttagtggtaatttagttgatttttttttttttaggataagagcgaagttattaggggagtttttttttaaaggttttgtcgttttagatttaattcgtttttttttaatttgtttgaggaagaaatttttaggattgtacggatattttttttttagtatttttagaaagattgacgtagtttgaggggttggggggaaggagatatttgtttatttttcgttagttttgtttagtttgtaggaggtattaggtttggtttttttagggttgttatagttttgaaattattatttgtttaggttacggatgttttaagagattcggttagtttagattggaggagtgttttaaattagtttagtgtttatttgttagaattttagttttttttttttgtggtgaggtaaaggttagaaataaaatggaattcgcgtttaagtgggatttaagtaggtatttttcggtggagaaacgttttttagtgtttttgatatagttgattgttggtatgagtttattttttgtttgaagatgtaggattatttttgttttaaaagttggggaggagggatatgtagattgtgtgtattgtgtatagttaaggaaattttagggttatttttagtttatttgtgtgggaataaggatattttatagatataaattatttttatgttgtgttgaattaattaattaggagaggaaggggaaattattttttttaaattttttatttgattgtttaaaattttaattatgtttttaatttattatttttatttagttttgaaggttattgtttttgtttgtgtttgaataaaattatattggtgtttgtaatttgtgtataagtgtttcgttggagtggggatgttaggaattcgtgtgtgttttaattgttagagagaaagattaataattatatattttacgtagacgaagattaattattatgagatttttggtttttttagaattaggttggtttagatgatagtgatatttagtattttttttgttgatgtttgaaatttattagataaagtttcgtggggaggataagaaaagggttatggatgggtgtagtggtttatatttgtaatttaaatattttgggaagtcgaggtaggtagattatttgaggttaggagtttgagattattttggttaatttggtaaaatttcgtttttattaaaaaaaaaaaaaatataaaaattagttgggcgtggtgtacgtttgtagttttagttatttaggaggttgaggtaggagaattatttgaatttaagaggtggaggttgtagtgaatcgagattacgttattgtattttagtttggataatagagtaagatttcgtattataaaaaaaaaaaaaaaaaatggggtcgcgggagttaaatgtgtagagtgagtagtgtggttgggtaataggtttttatttttaagtatatgttattttatttagtttttaaaatagttttttaattttagatattatgatatttagagtttttgtaagtttagtgttttgtttttgtttgtgtagttaggaagtgattaattatataagaaattttagaggtattgtaaggttattgtttttagtaattaaaataaggtatagttaataagtgttttgaatttagggattttatggagaaagattatgtgggttggggtagttagggaaggttttttagaagagataggttttggggtgagtatagagaattggtttaggttgtggatagttatagagagagagttaggaaagtttgtgagtagtgtgtagttggagatagagattagttttattgcgtttgagtttttgtggtttcgtttgtaaaatagagataattattttagttttatggggttgtgaggaagattaaatgagatgatatttgtgaaagttgtcgtttatttttggtatatggtggaagtttaggaaatgttagttttatttatttttttgattttcgggagtaaattagtagagaggtaagtatgtagttattggggtaggtagagtatttttgggttttagagggtgtaaaatgatgcgggaattttaaggaaggagtgggtgttgtttttttggtgataagttttttcgtttttatttatttttgtttcgacgtttgttagtttatttttttttagtattatagaggttagttttttttttaagttattagtatagagtatttaatgtttaggttttattttttttggggtttaggggatttaaagaggggtagttagggtttaggtttgagggggaaagttttaggtaaagaatatttttttaaattttattttacgtttcgtagataatttgatcggggttaggaggatatatttttattttaggttgagagtagtttttgataatataaaaggattttgagggtggagattttttatttttattttaaaatagtgtgttatttattaatattttattttcggaagttgaatttattttttagtgttaatttcgagataaatgatttgattaggcgtgtggtatggattaaggtatgagataggtgtttttattattagaacgagttagtggttgttttttttttttttgagttttttttttatagagatttgtgaataggtgtttttgatttttaggttggttgtattttaatttagagtaggtagttttcggatttttagtatgggttggttttaggatatggagttaaagtaggtagatttggttttgtttttaagtttttaagttaaagagagtttggtttttttttttattaggtttttttagagtttgttgttttttggtttgggtttttattttattttttttttatagattttttgtaatttattgtattatttttagattagtaattatagatggagtttagaatttattttttgagtttttttaattttagtagttttgatagttattttttttttaatattaatgtagttgtttattttgttgatattaaggttagggtttggtttaaggaagaggataggtatagtttaagttttgtatttgaatatttatgtttttgattatttgttttgtgacgttggttttgtgttttagtttagaaaagatttttgtttattttttttttgttttatttagttaatttttttttttttttttttttttgttttttatttttttttttttttttttttttttttttttttttttttattatttggggttcgatttagttggtttagtttttattttgagtgtttatagatgagtttttagtagtttttgtgggtatttttttattaggttttagtttttttggttttagtagtgtttatgttaaagtttttaagtgttatgttggagagaatggtggttatagtagataagtttaaaatgttttatagtttataggttggagttaggtttcgttacgtgttggttatatgatttttttgagattttattttttttttagtaaaataagtggtaagattttaggatttttagtattaaaaagaaacgaaatattgatataggttttaatatggatgaattttgaaagtattattatattaagtgaaagaagttagttataaataagtatatattggatgattttatttttaggaagtgtttagaataggtaaatttatagagatagaaagtagattgattagtggttgtttgaggttggggagcgggggaagggaggtgattattaatgtgtatggagtttttttagggtgagagggtgatgaaaatgttttaaaatagattgtgttgatggttgtgttatttagaatatattaaaaattatttgaattgtgtatttgaaatagatgaattgtacggtatgtgaattttatattaataaatttgtaatttaaaaaaaaaaaattaggtcgggtgtagtggtttatatttataattttagtattttgttagattgaggtaggaggattatttaagtttaggagtttaagattagtttggggaatatagtaagatttcgtttttattaaaaaattttaaattataaaaaaaaaaagtaaaaaaaatagaattttaatagtatttattttataggattgtggaaaatagtagtaatgtatgtaaaatatttagtatatagtaggtataaagaaatgatattattattaagagatttgggagagttgtgtttagtttatcgtgggaggttttgatttttggatttaaaagtggtagtaggtttatttttttatatatttttgttattaaggaagcgtttatagtttaaaggagttatattaaagtattttaagttaagaggattgaattagatttggaatttatttatttttttttttattttattgtttttattagttagttttttgttaagtgattaggttgttaattaatttttttaggataaggttttaggttagttcgtgtgtataagattagtgttaagttagaagtagtagagataatagtgaatgataaggaggggttatttaatttttgttgttattttttgggatggagttttagggagtttttgtgttgtttttgtcgtggtaggatttataggtaagatttttttttttttttttattttttttttttttttttttttttttttttgtttttttttttattggaggtttttagagagtagtttcgagtagttagggtttattagttgtagtttgttagatttgatagagatttagtttagtcgttattttatgaaaagggagttgtggttttgatgagggtattgtggtagggttggggtttgaatttaatattcgtgttatttatttaagatttatattttttttgttttgttggttgtttttggtgggattttgtaaatttttatagataggaagtggtttttttttttgtttgttttagaatttttgcgatttttttagagtataaatttttttttttttatgaggattttggggttttttttttgagtagggatgataggggtatttttgatttgaggcgtggtttaggttatttgttgggagttttatagagtttatggtttttgtttagacggtttttttagtgggttgttgtgaaggttttgtcgggagggtgggttggagttggggaggtaattggtgttgggtaggatgttttaaaatggggttttttttttttgttttagagttattatagggagtttttttaatgtagatttttaggttttattttagatttaaattaggatttttggggttgagagttgagaatttgttttgtaaataagtagtttaagggatttttggttttttttgaagtttgagattttttgggtagtgaaataggcgtagttttagatgttagataaacgtgggtattaattttagttttagtattttagttgtatgattagtaaaagttttggaagttttaggtttttggtttacgaaatgagaataataatagtaattatttgtagttttatgaagggattaaattagttagtgtttgtaaagtttttagtacggtatttggtgtaagaagtaattagtaaatattaatggattatgttgattagaatattttattttttaggagttttagtagagttatagtaatgagggttttatttttgatttttttttttattggttagtggtaaaaggttgtcggttgttaggggtttaggagagtttggagtgaattgggaagaagattggggagtgttggttttaaggtattttttatttgtgtttattattgtggtttttttttttttcgtagtttgattattgaaagttttagagttttaaggtgggtttttgatttgagtttgtgtttatttattttattttttatgagtggttaagaattgttttttttgttaagtgattacgttgaggttaagagtttaagattagaataggtaatatagagagatttttatttttataaaaaataaaaaattagttgggtatggtgatgtatatttgtagttttagttattcgggaggttgaaggtgggagggttatttgagtttaagaggttaaggttgtagtgagtttggattgtattattgtattttagtttaggtaatagagtgagattttgttttaaaaaaaaaaaggaggtagtttgatattggggagaatagatgtttgagtttcggtttttttatgtatatagtgtaggtattattattagttttgtttatttttggtaaggaggggagggagagggttaggaggaggattgtaaaatttaagggataggaacgtgatttgtttttataggttaaatttatgtagtttaagtatggtattatttaggtttttttttttttaaagttttttttgggtaaggaagagtttttgggagttaggttagatattattttattagttttttttggtttgttttttgtagt

SEQ ID NO: 1868 - DNA, 6899 bp, Artificial Sequence
  chemically treated genomic DNA (Homo sapiens)
gttgtaggagataggttagagaaggttgatggagtgatgtttggtttggtttttaggaatttttttttatttaggaggggttttagaaagggagaagtttgggtggtgttatatttaagttgtatgaatttggtttataaaaataggttacgtttttattttttgaattttgtaattttttttttgatttttttttttttttttttattaggggtaggtagagttgatagtggtatttgtattgtatatatgaggaaatcgaggtttaggtatttgttttttttaatattaaattgttttttttttttttttgagatagggttttattttgttatttgggttggagtgtagtggtgtaatttaggtttattgtagttttgattttttggatttaagtgatttttttatttttagtttttcgagtagttgggattataggtgtgtattattatatttagttaattttttattttttgtagagatgggggtttttttatgttgtttattttggttttgaatttttggttttagcgtgattatttgataagaggggtagtttttagttatttatggaaaatggaatggatggatatagatttaggttaaaagtttattttggggttttagaatttttagtagttaagttgcgggaggagggaaagttatagtggtgggtataggtaggaggtgttttgaggttagtattttttaattttttttttaatttattttagatttttttagatttttagtagtcggtagttttttgttattggttagtggaggaagaagttaaaagtggaatttttattattgtagttttgttggggtttttgagggatgggatgttttagttagtatggtttattaatgtttgttggttgttttttgtattagatatcgtgttgagggttttatagatattgattgatttgatttttttataaggttataagtagttgttattattatttttatttcgtaaattagggatttgaggtttttagggtttttgttagttatatagttgaagtgttggagttgagattggtgtttacgtttgtttgatatttgaagttgcgtttgttttattgtttagagagttttagattttagggagagttaaggattttttgagttgtttgtttatagagtagatttttagtttttagttttagagattttgatttaggtttggggtggggtttaggaatttgtattaggaaaattttttgtggtagttttgaagtaggggaagaggattttattttgagatattttatttaatattagttgtttttttaattttaatttattttttcggtaaagtttttatagtagtttattgaagaagtcgtttgggtagagattatgggttttgtaaagtttttagtaaatgatttggattacgttttaggttagaagtgtttttgttatttttatttaggaagagggttttagggtttttatggaaagagagggatttatgttttggaggaatcgtagagattttggggtaggtaaagaagaaagttattttttgtttatggggatttgtaaaattttattagaggtagttagtaaggtaaagggggtgtgagttttgagtgagtgatacgggtgttgggtttaagttttagttttgttatagtatttttattaaggttatagttttttttttataaggtggcggttggattgaatttttattaggtttgataagttgtagttagtgagttttgattgttcggggttgttttttgaaagtttttaatgaaagggagaataaggagaagggagagggagaggggaagggatgagggaggagaaaggggttttatttgtgagttttgttacggtaggggtagtataggggttttttagggttttattttaggaggtggtagtagggattggatggtttttttttgttatttattgttgtttttgttgtttttggtttggtattggttttatatatacgggttgatttgaaattttattttagagaagttggttgatagtttgattatttgataagaggttggttggtgagggtagtgaggtgagaggggaggtgagtgagttttagatttggtttagtttttttgatttggggtgttttaatatagtttttttaagttgtggacgtttttttggtgataagggtgtatgggggggtggatttgttgttatttttgagtttaaaggttaaggttttttacgataggttgggtatagtttttttaggttttttaataataatgttatttttttgtgtttattatgtgttaaatattttatatatattattattattttttataattttatgagataggtattattaggattttattttttttattttttttttttgtaatttaaaattttttagtagagacgaggttttgttgtgttttttaggttggttttgaatttttgggtttaagtgatttttttgttttagtttggtaaagtgttgggattataggtgtgagttattgtattcgatttaattttttttttttaaattatagatttattgatatagaatttatatatcgtataatttatttgttttaagtgtataatttaaatggtttttagtatattttgagtggtataattattaatataatttattttagaatatttttattatttttttattttggaaaaattttatatatattggtagttattttttttttttcgttttttagttttaggtaattattaattaatttattttttgtttttataaatttgtttgttttgaatattttttagaaatggaattatttaatatgtgtttgtttgtgattggttttttttatttagtatagtaatgtttttaaaatttatttatgttggagtttgtattagtatttcgtttttttttagtgttggggattttaaaattttattatttattttattgaggaggaaatggaattttagggaagttatgtagttagtacgtggcgaggtttgattttagtttgtaaattgtaaggtattttgggtttatttattgtgattattattttttttaatatgatatttggaggttttagtatggatattgttggagttaagggagttgggatttggtggaagggtgtttatagaagttattggaggtttatttgtgggtatttagagtaagggttgggttagttgaatcgggttttaggtgatgggggaaggggagaagaagaagagaagggaggggaggagtgagaagtagaagggagggaaggaaagggagttaattgggtagggtagaggaggagtaggtagaagttttttttggattggggtatagagttagcgttatagggtaggtggttagaagtatggatgtttaagtgtaaagtttgggttgtatttgtttttttttttggattaggttttgattttaatgttagtagaataagtagttgtattagtgttaagagggaagtggttgttagggttgttgagattaggaaggtttaggaagtaggttttgagttttatttgtaattgttagtttagaggtgatgtagtaaattgtagggagtttgtgggggaagaatagagtagaagtttaaattaggaggtagtaggttttggagaaatttagtgggagggagggttaggttttttttagtttgggagtttgagggtagggttaggtttgtttgttttggttttatgttttgaggttagtttatgttagaagttcgaaggttgtttgttttgggttgggatgtaattagtttagggattagaaatatttatttataggtttttgtggagggagggtttaaagggaagagaggtagttattggttcgttttggtggtgggaatatttattttatgttttaatttatgttatacgtttggttaagttatttatttcggagttggtattgggagatagatttaattttcggggataagatattgataaataatatattgttttgaagtggaggtgggaggtttttatttttagggtttttttgtgttattagaggttgtttttagtttggggtaggagtgtgtttttttgatttcgattaggttgtttgcgggacgtggagtgggatttggaggaatattttttatttggggtttttttttttaggtttgggttttgattgtttttttttaggttttttgggttttaagggaagtggggtttgggtattgaatgttttgtgttggtgatttgagagggaggttggtttttgtggtgttggggaggggtgggttggtaggcgtcggagtagagataaatagaagcgggagggtttgttattaagaaggtagtatttattttttttttgaggttttcgtattattttgtattttttgaggtttaggagtgttttgtttgttttagtggttgtatgtttgtttttttattggtttgttttcgaaagttaggagagtgggtggggttgatattttttaagtttttattatgtgttaaaagtaggcgatagtttttataaatgttattttatttgattttttttataattttatgaagttggggtgattatttttgttttatagacgaggttatagaggtttagacgtagtgagattggtttttatttttagttgtatattgtttataggtttttttggttttttttttatagttgtttatagtttgggttaattttttgtgtttattttaagatttgttttttttaggaagttttttttgattgttttagtttatatggtttttttttatgaagtttttaaatttagagtatttattggttgtattttgttttgattattgaaagtagtagttttgtaatatttttgggattttttgtgtggttaattattttttaattatataaatagaggtaaaatattgaatttatagaaattttagatattataatatttagagttagagagttgttttgaggattgagtgaagtgatatgtatttgggggtgaaagtttgttgtttagttatattgtttattttgtatatttggttttcgcgattttattttttttttttttttttgtgatacggagttttgttttgttgtttaggttggagtgtagtggcgtggtttcggtttattgtaatttttattttttgggtttaagtgatttttttgttttagttttttgagtagttaggattataggcgtgtattacgtttagttaatttttgtattttttttttttttagtagagacggggttttgttaggttggttagggtagttttaaatttttgattttaggtgatttgtttgtttcggttttttaaagtgtttggattataggtgtgagttattgtatttatttatggttttttttttgttttttttacggggttttgtttgatggattttaagtattagtaaaggaaatattgggtgttattgttatttggattaatttgattttggaggagttagaagttttatggtgattgattttcgtttgcgtggggtgtatggttgttaatttttttttttggtagttagggtatatacgaatttttagtatttttattttagcgaaatatttgtgtatagattataaatattaatatgattttatttaaatataggtaagaataatgatttttagagttgggtaaaaataataagttaaaagtatggttagaattttagataattagataaaaagtttgaaggaagtgatttttttttttttttttaattgattaatttaatatagtataaaaataatttgtatttataaaatatttttgtttttatataaatgaattggaggtggttttaggatttttttgattatgtataatgtatataatttatatgttttttttttttaatttttaaggtaaaaatggttttgtatttttaggtagagggtgggtttatgttagtagttagttgtgttaaggatattggggggcgtttttttatcgaaagatgtttgtttgggttttatttgggcgcggattttattttatttttagtttttgttttattatagaaaaaaggagttgaaattttggtaagtggatattggattggtttggggtatttttttagtttgggttgatcgggttttttgaggtattcgtggtttaggtaagtggtggttttaggattgtgatagttttgaaggagttagatttggtgttttttgtaagttggataaagttgacggagggtgggtaggtgtttttttttttttagttttttaggttgcgttagtttttttgggagtattgagaagaaaatattcgtgtaattttgagagttttttttttaggtaggttgagggggagcgagttaggtttggggcgataaggtttttgggagagagtttttttggtggtttcgtttttgttttggagaggaagaagttagttaggttattattgaggatatggtattattaatggatgacgttggttttttttattttttggttttttggttaatatttatgtagagttgtttggtttataaagcgttttacgtattttattttgtttgatttttattttaattttatatggggggtatattattttttttatgtcgtggataaggaaattatatttaggtggaataaatttaaggttttatagttttgagtagtagagttgggacgtgaattttagttttgattttttttgtgtttttggagaaggaggtagcgttatttttaggataggtttgaatttttatttttttttttgttgtatggttttagataagttatttgttttttgggtttagttttatgtgtgatgttgggaatatatttaatttttagggagatggcggtgaataatatattttttgtttggttttttggagtttttggagttgttaggtgatataaagtatttatttattg

SEQ ID NO: 1869 - DNA, 8143 bp, Artificial Sequence
  chemically treated genomic DNA (Homo sapiens)
ttcggaatagtttgtttttgtacggtgattaggtaggtaattgattatatgtggttagaaatagtaggttttagttttttttatatgttaagttaggtttgagggttttggtttggaatttatagtgtatagagtttaaggatttgaggagtaggtgttagagtttaagaagttttgagttttggttaggtatggtgatttacgtttataattttagtatttgcggaggttaaggcgggagaattatttgaggttagaatttggagattagtttggttaatatggtgaaattttatttttattaataatacgaaaattaatagggcgtggtgacgtacgtttataatattagttatttgggaggttgaggtaggagaatcgtttgaattcgggaggtggaggttgtagtgagtcgttgagatcgtgttattgtattttagtttacgtaataaaagcgaaatttcgtttttagaaaaaaaaaaaaaaaagttttgagttttaagttttgattaatatattttttgttttattattttaagtagagggttagaagagtaggggttttgtagggttttgaggtaggggagagaaatatttatcgttattaagtaggattttttaagggttagatggtagagtttatttgggatatttggtggtggtagtcgaggtattttttagaattagagtaaatttttaatttcgtatttgaaaggttagtgttttcggtgtttttagatttttattgtatttgtgtgtttatttgttttatgtatgtcggattatggttaggtttttttttgagtttgggttttttttatgtggttttttttttttggtatatttttcgttttattttaattattagtattatttatttattagaggttagtttaaatgttagttttttacgtgtttttttttttttgtttagttattttttttggggtagttttttttttttttttttttttttttttttttttttttttttgagacggagtttcgtttttgttgtttaggttggagtgtagtgacgtgatttcggtttatcgtaatttttgttttttaggtttaagcgatttttttgttttagttttttaagtagttgggattataggtaagtattattataagtttagttaattttgtatttttagtatagatagggtttttttatgttgtttaggttggtttcgaatttttaattttaggtgattcgtttgttttggttttttaaagtgttgggattataggtatgagttattacgtttagtttgggggtagtttttttttaattttcggagtattatttttttttttgattttttttatttttttatagagtatttttattagttgtatttatttttgtttttttttttagttgttaagttttttaaagatttaggagttagttattttgtttttaggattttgtattatgaaggtggaaagtagagagtagagtttgaggttatgggtgatgtgatttttgtttaagatttttgtagttattatagttgtttcggttagattagttattgtttatagagggatttattagtggcggtattggatgggttttaggtgtttttagtggtttagtttattttttttgtttattttagttttattggttatagtttttttttgtttgtttgtttgtttgtttgtttgtttatttatttatttttgagatggagtttcgtttttgttgtttaggttggagtgtaatggtgtgatttcggtttattgtaatttttattttttgggtttaagtgatttttttgttttagttttttaagtagttgggattataagtatttgttattacgttcggttaatttttgtatttttagtagagagggggtttcgttatgttggttaggttggttttaaattttcgacgattttagttgatttgttttttttagttttttaaagtgttggggttataggtaggttatattttttaatagtttttaagaggggagggatgtagatatttgaaatttttaagatgggttaattttaagagtttagatgatgggatatagaaggaaatttaaaagaaagaaggtatttttgagatgttttatgtaaatataagtaaatgtatatgtggattttttttgtttttttttgagacggagttatgttttgttattaggttggaggtgtagtggtatgatttcggtttattgtaatttttgttttttgggtttaagtgattttcgtgttttagtttttcgagtagttgggattataggtaagcgttattatatttagttttttgtatttttttagtagagacggggttttattatgttggttaggatggttttaatttgattttgtgatttattcgttttagttttttaaagtgttgggattataggcgtgagttatcgcgtttagttttttttttgtttttttttgttttatttatgttttgtttttttttttttgtagtttgttttggagattattttattattagtttagaagattttttttttttgtttttagttatatagcgttttattgtaaggatatattataacgtatttgataagtttttgttggttgttagtttagaacgtgtgtttttatcggtgttaaggcgtttcggagtgggacggtttcggggttattatagtttttaattgttatatggtataaaggttttatgtatggatttattttagggatttttgtttagtaagcgttgcgtattttggtttatagcggttttagttttaaaggaggttagttaagtaaaggagttatataagaaaataagaattgtaaagttaaaatattgtataatgggttttgtaagtagagggggaagagaggtttatggggagagttattatttattagaattatttgtcggggaaggttttattttttatttttatttttaattttattttttttaagttttttttgtgttaggaaataatattttatttttttagttgtttaagttagggttagtttattaggaaagggatattagattatgttattttttgattaaaatttttaagagttttttattttgagtgtaaaggttttagaacgaggttttgtgtgttttggtttttgaatgttttttttgtaggtatagtaattttttcgaagtttttaggtataatggggttttttttttttttttttttttttttgagacggagttttgtttttgttgtttaggttggagtgtaatgggcgtgattttagtttatcgtaatttatgatttttagatttaagtaatttttttgttttagttttttaagtagttgggattataggtgtttattattatatttagttaatttttgtatttttagtagagacggggttttattatgttagttaggttggttttaaatttttgattttaggtgatttatttgttttagttttttaaagttttgggattataggtatgagttattttgtttggttttttatttgtttatttatttttatttatttatttatttttgaggagtttttgaagtgttacgtaatgtttttttatgtttatttattttagttttcgatttttagtattatatttggtatattataggtggttagtatttattggatgaatgaatggattaatatttgattgagttttgaagtacgaatagaatttggcgaagtggataaggtaggaaatgtgtatttaggtatgaggtttagtttgtgtataggtagaaaggtatgaaaaaatatggaatattttcgaatttataaatagtaagagagggttaagtcgttgtgtgggggagaggagaaatgaagtttaaatggtaggtaaaggttagtgggtaagggttttgtaaattgtatttgaattttattttttaggtaaaaggaagagtttaagggttttaagaagaaggatacgattagtgggttttaggaagattattttgatggttttttagaggatggttgaggagagttagtagggaggtagggaggttaagttaggggattttgattaggttaggttaggtgttatgaggttcgggttttggagaagaattaggaaatggtaattggaggtaagaaaggggagaaggttaaagtttgggaattattaatatttaagaatagtaaagaataaatatttaaagagaataagaaggaatggttagaagaaggaaaataggaaagaattgaggcgtgggagcgtaagagagagaatggttcgagaaggaagtagttataggtgttaaggttattgggaggttaagtgagataaggattgaaggttttattaattgggttattaggagtataggatttgagagtatttttgggtgggaatagatttagtttggggtagggtttaggtttttgatgggaattttggaagggttttttttatttaatatgttttaatttaggggttttcgaagtttgattatagtaatgttttaaattatgtgttttttttggtttaaggtttagtcgttttttttagaggggagtttatgaaagagtttagtggagtgttagggttttgagttttagttttagttttgtttttgttatttgtgagggaatttgggttttagtttttttaggtgggttttataattgttttttttgatttggattgttttagtgtttaggtttagtgagtgatataggtagttgggtttttatattttttgatttgggttttttttattgtttttaggtagggttcggttttttatttttaagtggtttattgtgtgagtttagttttagtggggatagaaattgggttgagaaaagggaatatttatttattttattaagttaatgttaagtaaatagtgtagtattttatgtagagtttttgttttgtttttttttatttgggtgttgttgtttagagtatataaaaggtattttgttgggtatgttttatattagtttattagatttagagacggaattagagacgggttagagtattttttttttttattatgaaattcgttgttatttttattttggttatattggttttttgttgtagtttcggtgagtgtttagagattttttttttttttttggatttaggaatttttaggattttttagttttgtttagaagaaggagtgagttgtttatttttgttttggagttgttgggaggatttgggtatgttgagttttagaaaattgggtttggtgagtaagtttattttggaaatttggagagagttttaggttgtaaggaagtttaaaaagggttttattttttatatttaataatttttagaattttagggaatggaatagtttggagggaggagtggagaatattttataaagatgagtatatttagtataggaataatgaggtttttattttagatttggatagattttaagatgttgagattttggtgtagtttttaagtttggggtttttattttatgttggtagttgaagttattggaaggggagttgtagggattcgtgattttaaaagaaatttaatttaagataaggttttttattttgggtatagaggaatattttagaaagagagattttttttgaggaattgttaatttagagtgaagttttttaaatattttcgttttttgtaaaagggattaggagtttttgagtagttgttgttgttattaaaaggaaaagaattgtggggggaagaggggtagaaagagagacggagagagggggagaaaggaaggaaagaaggattatagttttttttaagatttttcgtttttggggaattgggttatttaattttgttttttattttgcgttagttttttttatttttatttgaaaatgttgttgttattttttaataaataaattttaattaatttatttggaaagttttataatatttatggagataagttttatgattttggggagttagaaaatttaaattaagaagtagtaggaataattattttgtagagaggtttatttgttttttagagaaaatgatattattttggattgaaatgtgtattaattagaagattttagtgttgtttgcgtatagaggtgggtggttgagtaagataggattgtaatatgttaaggggtgggttagagatgtatttgtttatttgtgtgtatatgtatataatatttaatatttattttatataatgtgttaattattgttatttttttatataatatttttttttattttttttttttttttttttttttgagatagagtttcgttttgttgttaggttggagtgtagtggcgcgattttagtttattgtaattttcgtttttcgggtttaagcgatttttttgttttagttttttaagtaggtgggattataggtacgtattattgtatttagttaatttttgtatttttagtagagatagggttttattatgttggttaggatggtttttattttttgatttcgtgatttatttatttaggttttttaaagtgttgggattaggcgtgagttattatgtttggtttttttttttatttttataataattttatgaagtagggatattgggttaggtacggtggtttattgtttgtaattttagtaatttgggaggtcgagttgggtagattatttgaggttaggagtttaggattaatttggttaatatggtgaaattttgtttttattaaaaatataaaaattagttaggtatggtggcgtatgtttgtagttttagttatttgggaggtcgaggtaggagaattatttgaatttgggaggtagaggttgtagttagtcgagatggtattattgtattttagtttgggtaatagagcgagatttcgtttgaaaataaataaataaataaaaataaaatttaaattaaattaaaatttaaaaaataaaaaataaaatgaagtagggatattgtttttattttatagatgagaaaattgagttatagaaatatagagtgatttgtttggtgatatagtaagttatatattaaggatttaagttttggagagggtttgatttggagtggtaatttttagtgaggttttagagttagaggagggaaggtaaatttgtttagaaggtagagaatttaaggaaaagggatttgagatttattgggaagatggaggtaagtagtgggtagaaaatggtgatttttttttatgtttttggttgtaaggatttgagaagaaaatagagtttggaagttttgtgttgaagggaatgaagtggtataagtggttgttttgtttatgagttgagtgtgttatagggttcggtgtgtatatgtgtatattttttttcggttaggttcgggggtttatgtttggttggtataattttaatggtttttttttttttttttttttttttttttttttttttgtttgtttgtttgtttgtttgtttgtttgtttgtttgttttttgagatagaatttcgttttgttgtttaggttggagtgtagtgacgagattttagtttattgtaatttttgttttttggatttaagtgatttttttgttttagttttttgagtagttaggattacgggtgtttagaattacgttcggttaattttttgtatttttagtagagacggggttttattatgttggttaggttggtttcgaatttttgatttcgtgattcgtttgtttcggttttttaaagtgttgggattataggtgtgagttatcgtgtttggtttataatcgtttttttttgttagagtttgaatttgttatatgtttttagtgaagtatggtttagggtatttttaattattgatgagaggtaagtttttggtgggaaataaaatttttagtggtttttttttagtttttatattgtattaaaaaattaggttagtagtttttatgattaatattttgttttgatttttaatagaaagaaaaacggtattttgtttattttaatttaagaagtttaaggaagattcgggtaatttataaattttatattttagtttatcgatgaaaaggttgttatttttcgttgatgggtttggttgtttgtatttgggtagatttagttagagggttagttagtttggaaaggggtttggagatatgtgtttttttttttttgtgttgtagt

SEQ ID NO: 1870 - DNA, 8143 bp, Artificial Sequence
  chemically treated genomic DNA (Homo sapiens)
gttgtaatatagaggagagaaggtatatgtttttaggtttttttttaagttggttagttttttggttgggtttgtttagatgtaaatagttaggtttattagcgagagatagtagtttttttatcgatggattagagtgtaagatttgtggattgttcgagttttttttagattttttgggttgaggtgagtaaggtgtcgtttttttttttgttggagattaaggtagagtattgattatagaagttgttggtttgattttttaatgtagtgtggaggttgggaagaggttattgagggttttattttttattagaaatttgttttttattagtggttagagatgttttgagttatgttttattgggggtatgtgataaatttaggttttggtaggaaaaagcgattgtaagttaggtacggtggtttatatttgtaattttagtattttgggaggtcgaggtaggcggattacgaggttaggagttcgagattagtttggttaatatggtgaaatttcgtttttattaaaaatataaaaaattagtcgggcgtggttttgggtattcgtaattttagttatttaggaggttgaggtaggagaattatttgaatttaggaagtagaagttgtagtgagttgagatttcgttattgtattttagtttgggtaatagagcgagattttgttttaaaaagtaagtaagtaagtaagtaagtaagtaagtaagtaagtaagagaaaagaaaaagaagaaaagaaaagaaaagaagttattgagattgtattagttaaatatgggttttcgaatttggtcgggaagaggtgtgtatatgtgtatatcgggttttgtggtatatttagtttatggatagagtagttatttgtattattttattttttttaatatagagtttttagattttgttttttttttaggtttttataattaggaatatgggggaaagttattattttttatttattgtttgtttttatttttttagtgagttttaaattttttttttttgaattttttgttttttgaataaatttgtttttttttttttgattttagggttttattagaaattgttattttaagttagattttttttagaatttaggtttttgatgtgtaatttattgtgttattaggtaagttattttgtgtttttgtagtttagtttttttatttgtaaaatgggaataatatttttattttattttattttttattttttaaattttaatttaatttaaattttatttttatttatttatttgtttttagacggagtttcgttttattgtttaggttggagtgtagtgatgttatttcggttgattgtaatttttgttttttaggtttaagtgatttttttgtttcggttttttaagtagttgggattataggtatgcgttattatgtttggttaatttttgtatttttaatagagataaggttttattatgttggttaggttggttttgaatttttgattttaagtgatttatttaattcggttttttaaattgttgggattataggtagtgagttatcgtgtttggtttaatatttttattttatagggttgttgtaagaataaaaagagaggttaggtatggtggtttacgtttaattttagtattttgggaggtttaggtgggtggattacgaggttaagagatggagattattttggttaatatggtgaaattttgtttttattaaaaatataaaaattagttgggtgtagtggtgcgtgtttgtaattttatttatttgggaggttgaggtaggagaatcgtttgaattcgggaggcggaggttgtagtgagttgagatcgcgttattgtattttagtttggtaatagagcgagattttgttttaaaaaaaaaaaaaaaaaaaaagaatgaaaagagatattatgtgaaagggtgatagtgattggtatattgtgtgaagtaagtgttaaatattgtatgtatgtgtatataaatagataaatgtatttttgatttattttttaatatgttgtagttttattttgtttagttatttatttttgtacgtagatagtattgagattttttaattaatatatattttagtttaaaatgatgttattttttttgaaaaataaataaatttttttgtaaaatagttgtttttattgttttttggtttgggttttttaattttttagggttataaaatttatttttatgggtgttgtgaagttttttaagtgaattaattggagtttgtttattaaaaaataataatagtatttttagatgagaatggaagaggttgacgtagagtgaaaaatagagttagataatttagttttttaaagacgggggattttggagagagttgtgatttttttttttttttttttttttttttttttcgtttttttttttgttttttttttttttatagtttttttttttttagtgatagtagtaattatttagagatttttaattttttttgtagaggacggaaatgtttagaaaattttattttgggttggtagttttttaaagggaatttttttttttggaatatttttttgtgtttagaatgagagattttgttttgggttgggttttttttggggttacgagtttttgtagttttttttttagtgattttagttgttagtatggagtggagattttagatttggaggttgtattaaggttttagtattttggagtttgtttagatttgggatgagggttttattatttttatgttggatgtatttatttttatggggtattttttatttttttttttaggttattttattttttgggattttgagggttgttggatatagaagatgggattttttttaggtttttttatagtttggggttttttttaagtttttaagatgagtttgtttattagatttagttttttgagatttagtatgtttaggtttttttagtagttttagagtaggaatgggtagtttatttttttttttgagtagaattggggggttttgagagtttttaagtttaggagggagggaagggtttttgagtatttatcggagttgtagtagagagttagtgtgattagggtgagggtgatagcgagttttatggtggaggagggggatgttttggttcgtttttggtttcgtttttgagtttggtgggttagtatgagatatgtttagtaaggtgttttttatatgttttaggtagtagtatttagatggggaagggtagggtaagggttttatataagatattgtattatttatttggtattggtttggtgggataggtaaatattttttttttttaatttagtttttgtttttattgaaattgagtttatataatgggttatttgggggtggagggtcgagttttgtttggaggtagtgaagggaatttaagttagaggatgtggaaatttagttgtttgtgttatttattgaatttgggtattggggtagtttagattaagagaagtaattgtggagtttatttggagaaattgaggtttaagtttttttataagtggtagggataggattaggattaggatttaggattttgatattttattgggtttttttataggtttttttttgaggagggcgattgaattttaagttaggaaagatatatggtttggagtattgttgtggttagatttcgggggtttttggattgaagtatgttgaataaaagggatttttttagaatttttattagaaatttgagttttgttttaggttgggtttgtttttatttagaagtgtttttaagttttgtgtttttgatggtttaattggtgggatttttagtttttattttatttgattttttaatggttttgatatttgtgattgtttttttttcgaattatttttttttttgcgtttttacgttttagtttttttttgtttttttttttttggttatttttttttgttttttttagatgtttattttttattgtttttaagtgttgatggtttttaggttttggttttttttttttttttgtttttagttgttattttttggtttttttttaaagttcgggttttatagtatttaatttggtttggttaaaattttttgatttgatttttttgtttttttgttagttttttttagttattttttgaaaggttattagaatgatttttttaaaatttattggtcgtgtttttttttttgaaatttttaaatttttttttttgtttaaagaataaaatttaagtgtaatttataaggtttttgtttattgatttttgtttattatttgaattttatttttttttttttttatataacgatttagtttttttttattatttgtggattcgagaatgttttatgtttttttatgtttttttatttatgtataagttaagttttatgtttgaatatatattttttgttttgtttatttcgttaaattttattcgtattttaagatttaattaaatattgatttatttatttatttaataaatgttgattatttatgatgtgttagatgtggtgttaggagtcgggaattggggtagatagatatggagaggtattgcgtggtattttaagaattttttaaaaataaataaataaataaaaataaataaataaataaaaggttagatagggtggtttatgtttgtaattttaggattttgggaggttgaggtaggtggattatttaaggttaggagtttgagattagtttggttgatatgatgaaatttcgtttttattaaaaatataaaaattagttggatgtggtggtgggtatttgtaattttagttatttgggaggttgaggtaggagaattgtttgaatttgggagttatagattgcggtgagttgagattacgtttattgtattttagtttgggtaataagagtaaaatttcgttttagaaaaaaaaaaaaaaaaaagaaggattttattgtgtttgagggtttcgaaagggttgttgtgtttgtaaagggggtatttaggggttagagtatataaggtttcgttttaaggtttttatatttagagtgggaagtttttgaaggttttaattagggagtgatatggtttgatattttttttttgatgaattgattttgatttgggtagttgggggaatggggtgttattttttgatatagagaagatttgggaaaaatagggttgggggtgaaaatagggagtgaagtttttttcgataggtggttttgatgggtggtgattttttttatgggttttttttttttttttgtttatagggtttattatataatattttaattttgtaatttttatttttttgtatgatttttttatttgattgattttttttagggttgaggtcgttgtaagttaaggtacgtaacgtttgttaaataggaatttttggaatgaatttatgtatgaggtttttgtgttatgtgatagttgaaggttgtggtgatttcggaatcgttttatttcgagacgttttaatatcggtaagagtatacgttttaaattagtaattaataaagatttgttaagtacgttatggtgtgtttttataatgaaacgttgtgtggttgaaaatagagaaagaagattttttgagttgatggtgaaatgatttttaaggtagattgtaaagggggaaaaataaggtatgaatagagtaaaaaagaataaagagaaggttgggcgcggtggtttacgtttgtaattttagtattttgggaggttgaggcgggtggattataaggttagattgagattattttggttaatatagtgaaatttcgtttttattaaaaaaatataaaaagttgggtatggtggcgtttgtttgtaattttagttattcgggaggttgaggtacgagaattatttgagtttaggaggtagaggttgtagtgagtcgagattatgttattgtatttttagtttggtgatagagtatgatttcgttttaaaaaaaagtaaaaagaatttatatatgtatttgtttgtatttgtataaagtattttagaagtgtttttttttttttaagtttttttttgtgttttattatttgggtttttgaggttagtttattttgaggattttaggtgtttgtatttttttttttttagggattgttgaaaggtgtagtttgtttgtaattttagtattttgggaggttgaggagggtagattaattgaggtcgtcgagagtttgagattagtttggttaatatggcgaaattttttttttattaaaaatataaaaattagtcgggcgtggtggtaggtgtttgtaattttagttatttgggaggttgaggtaggagaattatttgagtttaggaggtggaggttgtagtgagtcgagattatattattgtattttagtttgggtaataagagcgaaattttattttaaaaataaataaataaataaataaataaataaataaataaataaaagaaagttgtggttaatggagttgaaatgggtaaggaagatgagttggattattgggggtatttaaagtttatttagtgtcgttattagtggatttttttgtgggtagtggttggtttggtcggggtagttgtgatggttgtaggggttttaggtaggagttatattatttatagttttagattttgttttttattttttatttttatggtgtaaggttttggggataggatagttggtttttgggtttttgaggaatttaatagttaggaggagagatagagatgggtgtaattgatgggaatgttttgtggggagatggaggaagttagagaaggaaatggtgtttcgggagttgaaagggggttgtttttaggttgggcgtggtggtttatgtttgtaattttagtattttgggaggttaaggtaggcggattatttgaggttgggagttcgagattagtttgaataatatggagaaattttgtttgtattaaaaatataaaattggttgggtttgtggtagtgtttgtttgtaattttagttatttgggaggttgaggtagaagaatcgtttgaatttgggaggtagaggttgcggtgagtcgagattacgttattgtattttagtttgggtaataagagcgaaatttcgttttaaaaaaaaaggaaaaaaaaaaaaaaaaaaaaaagaaagggggttgttttaagaaaggtagttgggtagaggggagagggtacgtggagggttggtatttgagttggtttttggtggatgggtgatgttggtggttggggtgaagcgggggatgtgttaggaggaggaagttatatgaagggggtttaggtttaggaggggatttggttatggttcgatatgtatgggatagataagtatataggtatagtgggagtttgggggtatcgggggtattggttttttaggtgcgaggttggaggtttgttttgattttggaaggtatttcgattgttattattaagtgttttagataggttttgttatttggtttttgggagattttgtttggtggcggtgggtgttttttttttttgttttaggattttgtaaagtttttgtttttttgattttttgtttgagatagtgaggtaaaaagtgtgttagttaaggtttggaatttagagtttttttttttttttttttggaaacggagtttcgtttttgttgcgtaggttggagtgtaatggtacgattttagcggtttattgtaatttttatttttcgagtttagacgatttttttgttttagttttttaaatagttggtattataggcgtgcgttattacgttttgttaattttcgtattattaataaagatgggattttattatgttggttaggttggtttttaaattttgattttaggtgattttttcgttttggttttcgtaagtgttgggattataggcgtgagttattatgtttggttagaatttagaattttttaaattttaatatttgttttttaaatttttaaattttatatattgtgagttttaggttagaatttttaagtttgatttagtatgtggagaggattgggatttgttgtttttggttatatgtggttagttatttatttggttatcgtgtaaagataaattgtttcgag

SEQ ID NO: 1871 - DNA, 10832 bp, Artificial Sequence
  chemically treated genomic DNA (Homo sapiens)
  unsure 8857: n is a or g or c or t
ttttaattttgtttaggttggagtgtagcggtgtaatttcggtttattgtaattttttttttttaggtttaagtaatttattttgttttagtttttttagtagtttggattataggtgtttattattatgtttagttagaatttttttaaaaattattagattttatgagatttatttattattataagaatagtataggaaagatttgtttttatgatttaattattttttattgggttttaagatgagatgtgggtggggatatagttaaattatattatagttattgtgaaagtagagttggagggttattttagtttgggaggttgaggttgtagtgagacgtgtttatgttaatgtattttagtttgggtgataaagtgagattttgtaaaaaaaaaaaaaagaaaggaaagaaaggtttatgttttatttaaataatattttattatgattggttttgtgtttttatttaaattttattttgtaggttttataatttttatatgttgtgagagggattcggtagatgataattgaattatgggggtaggtttttttcgtgttgtttttgtgatagtgaataagttttatgagatttgatggttttaaaaatgagagtttttttgtataagttttttttttttttgtttgttgttatgtgagatatgatttttattttttattatgattatgaggtttttttagttatgtggaattgtaagtttaataaattttttttttttgtaaattttttagttttgggtatgtttttattagtagtatgaaaaagaattaatatagtaaattggtattagtagagtgaggtattgttaaaaagatatttaaaaatatggaagtaattttggaattgggttaatagttagatgttggaatagtttggagggtttagaagaagataggaaaatgtaggaaagtttagaattttttagaggtttgttaaatggttttgataaaaatgttgataattatatggataatgaaatttaattaggtggttttagatggagatgaggaatttgttgggaattggagtaaaggtgatttttgttatgttttagtaaagaggttggcgggtattttgtttttgttatagagatttgtgaaattttgaattggagagagatgatttagggtatttgatagaagaaatttttaagtagtaaagtatttaagaggtgatttgggtgttgttaaaggtatttagtttttaagggaaatagaatataaaagtttggaaaatttgtagtttgataatatgatagaaaagaaaattttattttttgaggagaaatttaagttagttgtagaaatttgtataagtaaggaagattcgaatgttaattattaagataatggggaaaacgggtatgttagagatttttatggtagttttttttattataggtttggaggtttaggaagaaaaaatggttttgtgggtcgggtttaggatttttttgttgtgtgtagtttaggaatttggtgttttgtgttttagttgttttagttgtaattaaaaggggttgaggtatagtttgggttattgttttagagggtggaagtttaagttttggagtttttatttggtgttgagtttgtaggtatatagtagttaagaattgaagtttgagagtttttatttaattgatataaaaagtagataaataggttaggtatgatggtttatgtttgtaattttagtattttgggaagttaaggtaggtggattatttgaagttaggagtttgagattagttcggttaatatggtaaaattttgtttttattaaaaatataaaaattagcgtgatgtggtggtgcgtatttgtagttttagttatttgggaggtttaagtaggagaattttttgaatttgggaggtggaggttgtagtgagttaagattgtattattgtattttagtttggatgatagagcgagatttcgttttaagaaaaaaaaaataaaaagtaaaaaataaaaaattagataaatagagaaaaattgaattgttattagagaagacggggagatgtgggaatttagagttttgtttttaattttttattgattttttatttttatagatttttgatatattattagaggatttagggttttatgaaatataatttgaaaataattagtttattttggtagtttttaaagtttgtagtattaagattttttggtatgtttaaaaattgaagatttaaagaagttttttttatgtggattgtaattattggtatttattatattagaaatgaaaattgataaattatatataaaagattaattttttaaaattgataataagtttattatatgttaatataaatattatattttaatgaaaaattattatattttaaaaataaaagataagattggtattgttttatatttttgtaaatttttaatatttgatttaaaaaatagtttaattttatttgttttgatagtatattatagtttttataaaattttattgtatatttttgagagaataagagtgaaaaaagtaagtaatatatgaaaattttttgattttatggattttagaaagaatttcggagattgtttatagtttttagtttatatttggagaatttttgttttaaatttaaaggtttattttagttggtattgaaaattgatttaatttttgaaattttattaatcgttttgaagagtttgattttattaaaatattaaaaaagaatgtgaggtgaatattaaatagaaaaatgttgaatttaaaatgaagggattaagataagtggtttttattataaagtaaattgtattagataatttaaatttatgtatgtttaaaaagatgtatttgttatatttagtgtaattatttgtttatatattttttttatttaatttgtgagttttgtaagaaggaaatgagttttttttgtttggttatttttttgagatagtgtttcgttttgttttttaggttgtagggtagtggtgtgatttcggtttattgtaatagggagttttttgagtagttgggattataggtgtttatcgttttattcggttaattttttgtatttttagtggagtcggggttttattatgttggttaggttggtttggaatttttgattttaggtgattcgttcgttatggttttttaaagtgttgggattataggcgtaaattatcgtgtttggttaaaggaattgagttttaattttttttgtatttttagtttttaggataacgtttgatatataataggtattaaatatttgttggatgaatgaattgaattgtatagaatgtagaaagtttatatatattggttaggtatagtggtttatatttgtaattttagtattttgggaggtcgagacgggcggattatttgaggttaggagtttgagattagtttggttaatatagtaaaattcggtttttattaaaaatataaaaattagtcgggtatggttgtgggcgtttgtaattttagttattcgggaggttgaggtaggagaatcgtttgaatttggaaggaggaggttgaggtgagtcgagatcgtattattgtattttagtttcggcgataagagggagatttcgttttaaaataattaattaataagtttatatattttgttatacgtgttataatttatagtaaattgttttatttatatttaattatttttttaaagttattattatgattttattaagaaaatcgtaatttatatggtattttaatgtgtttttataaattattaattattttttttatgatgtatgttaaaatggtttatgttatttgatgtaatttttaatgtagggaaataaaaggttatgattatgtttggtttttttttttatatgttagatttgagtgttaaaatgatttcgaagcggcgaaagaaaggaacggaattgttttttatattaaaaatgagtaggttttataggttaattttatttttttttacgtacggtatttatatgttgtaaattttttgttttatagtacgtatagatattttaaatttcggattgggtttgaggaatatttttgtaaagagcgttaggagggcgtgggggtttcgtttttttcgttagggattagggagtggatatttattggtttagttatgaggaatttagtatttttttgacgggaggcgttttttttttagaagcggtgggttaggaggaatttgattaaattttgggttgtcggtcggagggcgcggttgatttcggggtttcgaggttgtgggcgaggagtaattcgttcgtcgagatcgattcgtagatttaggagatcgaaattcgagggcggcgttttagggtgttgaggagatcggaaaggcggttaggatttttcggtcgtttcggtttattatttatttagtgttcgcgtagttttaaagtttggtagacgcggagcgtacgcggtttttgtttcggttaggatagggtagcggggagagggttgttagataataatttttgattttttttcgatttacgatcgttaggtaggcgcgtaaagtttttatatttgcggcgcgttttcgttttttggtttagcggatacgttacgtacgtagtttcgtttagcgtcgttcgcggtaggggcggagcgttgagttggttaaagcggatttgtttagttaggttaggggcgggtaggtttttttagttaggattagttttagttttttcgtttttgagtcgtgaaggaaatagggatttggttttgggttttgtgtagcgggagggggagttaggaagtagttgagggtagaatttaggagggtttggttgcgggggaatgaagttttcgttttcgtaggtaaaagtttttaaatacgggtttaggttcgggatttagagtgtaacgcgtggtagtttgagggaggggcgtgcgtcgagagggagtttagatcgagcggggcgcgggtggagaagttgcggcgcgcggttcgtaggaaggtgttgttcgaacgatcgggataggagcggtttttgcgtttgttgttgggaagtgggtaagcgtcgtttttaggttggtttcgcgttcgggcgggatgtttttaggtttgggcgggatgtggagggagcggggttggggtgtgcgcgttgttttcggtcgttcgttgcgttgggtttcgggtttttcgttttacgattttcgtttttttggggtttagggcgggaatcgtattttggaattgttgttttggggatgtggtcgtttgggttttttatttaagattcgtgagttttttagttttttttttttttgtttttatttatttttttgatttggatgagatttttttgtcgtttttaaagtcgaacgtttattataggaagcggttttttcgttggggattttattttggtcgtagagtcgtagttttttgtttgtgtttaagagtttgtttatttgaggggtttttgttttttttatgtcgttttttttaagaaattaaagagaaacgaagttagaaagtttttttgagagtaaaatattaagattgtcgtgatatttgttcgggatgttttggaatttattgttggttttttatattatagaattgttttgtttgatgtcggggaaggttttttttgggtgtttcgggagattatgtttgtgtgagattttgaaaaattatacgttttataaatatataggaagataatttagtagggttaggaattttagtatagagaaaagaggggttcgttggtagggatttatttatgggtatatagagtagtagttgtttatcgatagattttaaagatatagtgagtttttgagtttttttaaattttttaagaaatggagaatagtagtttttttttaggggggttttggaaatgaaagagttgattgtttgttttgagatgtgtttattagtggttaggatttagtttaaggtaaggggtagataattttgattgaaaagattttattttttttttcgttgttgtatttttttttttaataaaatttataattggataagtataatttatttttttttttgtttatttttatagttttatatgataatttttagatataaaattaatatcggtttttttattgattaaatatttttttttggttaggtattttttattgtttaatttttggaaatgattaaaatgtgtgaagttgatgtatttaattataatgtttatcgttagtttttgggtatttatgtaaaatatgttgtagagagttggggttagaaggattatatttcgtttagattgtagtagggtatttgttatttgttagtgattttttttgggttggaatgtttatttgaatttatgaaattttatatgaagagtagttttggaacggtttggtttgttgtgatttttttaaaatatagaggtaaaaatttattttaaaataatttatttaataaggaaatatttttatgtttttgatagtagaatagagggttagagggtatataaaagtagaaatagaaaatgggggtcgggcgtggtggtttacgtttgtaattttagtattttgggaggtcgagacgggcggattacgaggttaggagatcgagattattttggttaatatggtgaaatttcgtttttattaaaaatataaaaaaaaattagtcgggcgtagtggcgggcgtttgtagttttagttattcgggaggttgaggtaggagaatggtatgaatttgggaggtagagtttttagtgagtcgagattgcgttattgtattttaatttgggtaattgagcgagattacgttttaaaaaaaaaaaagaaaaagaaaagaaaatggggttgggcgtagtggtttacgtttgtaattttagtattttgggaggttaaggtggatggattatttgaggttaggagttcgagattagtttgattaatatggtgaaatttcgtttttattaaatatataaaaattagttgggcgtggtggtgggtatttgtaattttagttattcgggaggttgaggtaggagaattgtttgaatttaggagacggaggttgtagtgagtcgatatggtgttattgtattttagtttcggtgatagtgagatttcgttttaaaaagaaaaaagaaatagaaaatggagttggtagatatttgtgttatgtaaagtgtgttattaatattatgttaaattttatgttaaagtttattgaagattttattgaaatttttaagtgagtatttatttggatttgtatagattgtatattagtttttttattgatttttttattgttatcggtaagtcgtattttatgggaaatagtaaggcgagaatatttaaaataaagtttgtgtaaaatatatttagttttgtgatataagtttatttgttattagtagtttattttagttgatgtatgtaaagtaagttgaaatgtggttttataattaaggtagataagaagtaattttggggaaatatgttgaagttttttaggtaatttaaaaaaagaatttggttagatgcgatggtttatatttgtaattttaatattttgggaggttgaggtaggtggattaattgaggttaggagtttgagattagtttggtttatatggtgaaaatttgtttttagaaaaaatataaatattagttggatatggtggcggatatttgtagttttaggtatttggtatttgggaggttaggtgggagatttatttgaatttgggaggcggaggttgcggtgagtttagattgtgttgttgtattttagtttgggtaatagagtgagattttgtgttagaaaaaaaaaaaaaaagttgatagtattttggttaattattgtaaaaatattatgatcggtaatttgaattaaagttatttatatagaagtttttattttaaaaagagacgtttttgtggagagttatttatttatttaattaataattattgagaggttgttattttaggagttaaggatatagtagggagtagtagtaaataattgttagtttggttgtgttttattaaattatgaattttttaagtttaggagttgtaacgagtagatattgattttatatttaataaatgtgttagtagaatttgttttggttgagattaagagtaaaggttgttttaataattttttggttaggagattaagtggtaattttaaaagattttttggtttaatattattttgagattttattttttaggtattttagatatattgggtttaattaagtgaaaaaagttaggtgttaatagtatatatggtattttattgaatttagaaagataagattattagaatatatatgtatatttatttgtagttgggaggatatataagaaaacggattgtttgtgtggaagtaaagtaggggatagtaaagtagataaggaaggggttggagtgagattttttatgtgtattttgttataatagatttaattttgaattatatgaatattatttagaattaataatttttttttttttttttgagatggagtttcgtgtttgttgtttaggttggagtgtaatatggtacgattttagtttattgtaattttcgtttttcgggtttaagcgatttttttgttttagttttttaagtagttgggattatagatatgtgttattatgtttcgttaattttgtatttttagtagagatggggttttgttatgttgattaggttggttttgaatttttgattttaggtgatttagttttttcggtttttcgaagtgttgggattataggtatgagtagcgtgtttggttagaataaataatttttaaatatgtattntatatggttaggaatattatttgaatatagatttaaatagaatattgttttatttaattgaattatataatttaaaattttgtttatttttattattttattaaagttttatttttttgaattgtttttgaatagttatgaggggtttggtatagtggttcgtgttgtaatgttagtattttgtgaggttgaggtaggtagattgtatgagtttaggagttcgagattagtttgggtaatatggtaaaattttgtttttattaaaaatataaaaattaatttggtgtggtggtatgtatttgtagttttagttatttggcgggttgaggtacgagaattaaatttaggaggcggaggttgtaataagtgtagttgagatggtgttattgtattttagtttgtgtgataaagtgagattttgttttaaaaaaaataaatatcgtggtggtttatgtttgtaattttagtatttttggaggttgaggcgggtggattacgaggttaagaaatttagattattttgattaatatggtgaaattttatttttattaaaaatataaaaattagttgggtatggtagtgtgtgtttgtagttttagttattcgttaggttgaggtaggagaattgtttgaatttaggagacggaggttgtagtgagtcgaggttatattgtattttagtttggcgatagagtaagattttgttttattaaaaaaaaaaaaaaaaagttatgagggattagattttatgagttgatatttatattattaaagattaatgtataagttagattggtagtttattaatataggttataaataatttaggatatttatatggattagttagtttatttttttttagtagggaaatttatttagagaattaaacgaaaatttagaatattgtttaatatagatttaaattaaaaagaattggataattttaattatatgatttgtttttttttataatagggatattttttttgttaggtatttaaattaggttagttttttagagtgcgttttttgatttatataggagtatattaaaaaatttttaaattttttgattattattttttttttttttggaatttgtgaatgggttagattagatgatgtttgaggttttggtaaggtaaaattattttttgtttttaagaatttgattagtttgatagtttttattataacggataaatgagtatatttatgtataaattagttttttgttattttgattagtgtgaattagtttatttaatgtttttgaaaatttattaaaatttgtgtaatttatttttttgttggtattgggaaggaaaaaaatttgtgtaatagttttggtaattatagaaattatattttttttaattattttatggtttttgattaaagttgaaatggagtttaagattattgtttagtatttaaaagtaaattttgaaagttaaagtagtgtgtagggtatataattttattagaggttaattttggattgtggaattaattttattttatattatcgtaatttaaatttgttataaatttatttttgtatattagtatttatttaagtaagaatcgtataagtatgtttattttggagtttttttttagtaattaaagttgttttagtgtattatagatttaaggaaggttttattttgattttttattttttaaatattaggttattataatttttgtggtttttttttagtaatattagttattgtaattatttttatatgttttatgttagtgtagttgagaataggttaggttatttaattggaatgttattttttaaattattatttttataattttttagagcgaatgtaggaaatttttttagatatttgttattttgatagtttttataaagtataattaatgtataatattatttttttaaattttttgtttttaatattagaatagttttattgttttttttttagt

SEQ ID NO: 1872 - DNA, 10832 bp, Artificial Sequence
  chemically treated genomic DNA (Homo sapiens)
  unsure 1976: n is a or g or c or t
attagaaggaaaatagtaagattgttttagtattgaaaatagaaaatttaaagaaataatattgtatattaattatattttataaaaattgttaaggtgatagatatttggaaagattttttatattcgttttgaggaattatggaaatagtgatttaaaaaataatattttaattggatgatttagtttgtttttagttgtattagtatgaaatatatggaaataattatagtaattgatattattgaaggggagttataaagattataatgatttaatatttagaaagtaaagaattaaagtaaaattttttttaggtttataatatattaggataattttgattgttgagagaaagttttaggatgaatatatttgtacgatttttgtttaaataaatgttagtgtataaagatgagtttataataggtttagattacgatgatatagaataagattagttttatagtttagaattggtttttgatgagattatatgttttatatattattttggtttttaaagtttatttttaggtattaggtaataattttaaattttattttaattttaattagaaattataaggtggttaaagaaaatgtaatttttgtaattattaaagttgttatatagattttttttttttttaatgttagtagaaaagtgggttatatagattttgatagatttttaaaagtattaggtgaattgatttatattaattaaaatgataaggaattgatttatatataagtatgtttatttattcgttataatgagaattgttaaattgattagatttttaaaagtaaagaatggttttgttttgttaagattttagatattatttaatttaatttatttatagattttaaagagaaggaaaatggtaattagagagtttaagaattttttagtatatttttgtatggattagagaacgtattttggaaggttggtttaatttgaatgtttggtaagaagaatatttttattatgaaaaaagataaattatataattaagattatttaattttttttggtttgaatttgtattaaataatattttaaattttcgtttggttttttggatagatttttttattagaagaaaatgagttgattaatttatgtaggtattttggattgtttgtagtttgtgttaataaattattaatttggtttatgtattgatttttagtggtatagatattaatttatggagtttgattttttatgattttttttttttttttttaatgagatagagttttgttttgtcgttaggttagagtataatgtgatttcggtttattgtaattttcgttttttgggtttaagtagtttttttgttttagtttaacgagtagttgggattataggtatatattattatgtttagttaatttttgtatttttagtagagatggggttttattatgttggttaggatggtttggattttttgatttcgtgatttattcgttttagtttttaaaagtgttgggattataggtatgagttattacggtatttattttttttgagatagaattttattttgttatataggttgaagtgtagtggtattattttagttgtatttattataattttcgttttttgggtttgattttcgtgttttagttcgttaagtagttgggattataggtgtatgttattatattaggttaatttttgtatttttagtagagatagggttttgttatgttgtttaggttggtttcgaatttttgagtttatgtaatttgtttgttttagttttataaagtgttagtattatagtacgagttattgtgttaggttttttatgattgtttaaaaataatttaaagaaatagaattttggtaaaatagtgaaaatggatagaattttgaattatatgatttagttaaatagaatagtattttatttgaatttgtatttaaatagtatttttagttatatgnaatatatgtttggaaattatttattttagttaggtacgttgtttatgtttgtaattttagtatttcgggaggtcgaggaggttgaattatttgaggttaggagtttaagattagtttgattaatatgataaaattttatttttattaaaaatataaaattagcggggtatggtggtatatgtttgtaattttagttatttgggaggttgaggtaggagaatcgtttgaattcgggaggcggaggttgtagtgagttgagatcgtgttatgttgtattttagtttgggtaataagtacgaaattttattttaaaaaaaaaaaaaaaaattattgattttgaataatgtttatatggtttaaaattaaatttgttgtaataaggtatatatgagaagttttattttaattttttttttatttattttgttattttttattttgtttttatataagtaattcgtttttttgtatatttttttagttataagtaaatatatatatatattttaataattttgtttttttaaatttaatagaatattatatatattattaatatttggttttttttatttaattaaatttagtatatttagaatatttaaagagtagaattttaaagtaatgttggattagaggattttttagggttattatttaattttttagttaaaaggttattagggtagtttttatttttaattttaattaggataggttttgttaatatatttattaaatgtagaattagtgtttattcgttgtagtttttgggtttaaggagtttatagtttaataaggtatagttaggttaatagttatttgttgttgttttttgttgtatttttgatttttagaatagtagttttttaatgattattaattgaatgaatgagtaattttttataagggcgtttttttttgagatgaagatttttgtgtaaatagttttagtttagattgtcgattatagtatttttgtagtaattgattagaatattattaattttttttttttttttttgatataaggttttattttgttgtttaggttggagtgtaatagtataatttgggtttatcgtagttttcgttttttaggtttaagtgagttttttatttagttttttaagtattaagtatttgggattataggtgttcgttattatgtttagttaatgtttgtattttttttagagataggtttttattatgtgggttaggttggttttaagtttttgattttagttgatttatttgttttagttttttaaagtgttgggattataggtgtgagttatcgtatttggttaagttttttttttgagttatttaaagaattttagtatgtttttttagagttattttttatttgttttgattgtgagattatattttaatttgttttatatatattagttgggatagattattgatggtaggtgaatttgtattatagaattggatgtgttttatataagttttattttgggtattttcgttttgttattttttatgaaatacggtttatcgatgataatgggagaattaatgaaaaggttgatgtataatttgtgtaagtttaaataaatgtttatttggaagttttaataaaatttttaataagttttaatatggagtttgatatagtgttagtgatatattttgtatgatatagatgtttgttaattttattttttattttttttttttttttgagacggagttttattgttatcgaggttggagtgtagtggtattatgtcggtttattgtaattttcgttttttgggtttaagtaatttttttgttttagtttttcgagtagttgggattataggtgtttattattacgtttagttagtttttatatatttagtagagacggggttttattatattggttaggttggtttcgaatttttgattttaggtgatttatttattttggttttttaaagtgttgggattataggcgtgagttattgcgtttagttttattttttttttttttttttttttttttttgagacgtagtttcgtttagttgtttaggttggagtgtagtggcgtaatttcggtttattgaaagttttgttttttaggtttatgttatttttttgttttagtttttcgagtagttgggattataggcgttcgttattacgttcggttaatttttttttgtatttttagtagagacgggattttattatgttagttaggatggtttcgattttttgatttcgtgattcgttcgtttcggttttttaaagtgttgggattataggcgtgagttattacgttcggtttttattttttatttttatttttatgtattttttggttttttattttgttgttagagatataggagtgtttttttattaaatgggttattttgaaatgagtttttatttttgtattttgggagagttataataaattaaatcgttttaaaattattttttatgtaaaattttataaatttaaataaatattttaatttagaaggggttattaataaataataaatgttttattataatttaaacggaatataatttttttagttttagttttttatagtatattttgtataggtatttaggagttaacgatgggtattatagttggatatattagttttatatattttaattatttttagaaattaaatagtaaaagatgtttgattagagaaaaatatttaattagtaagaaagtcggtattaattttatgtttaagggttattatgtaaagttgtggaagtaaataagaaggaagatggattatgtttatttagttatagattttgttagaaaaaggagtatagtaacgggagaagaaatgagatttttttaattagggttgtttattttttattttaaattggattttggttattaataagtatattttagagtagatagttagtttttttatttttagaatttttttgaagaaagattattgttttttattttttaagggatttgaagaaatttaaaggtttattgtgtttttgaggtttgtcgatagatagttattgttttgtatgtttatgaatagatttttattagcgaattttttttttttttatattagaatttttaattttattaagttatttttttatatatttataggacgtataattttttaagattttatataaatatggtttttcgaggtatttaggaaaggtttttttcgatattaaatagagtaattttgtggtgtagggggttaataatggattttaggatatttcggatagatattacggtagttttagtattttgtttttaagagggttttttggtttcgtttttttttggttttttaagaggggcggtatgagaaaagtaggagttttttaggtgagtagatttttaaatataaataaaagattacgattttgcggttaaaatgaggtttttaacgagagaatcgttttttgtggtgggcgttcggttttggaggcggtagggaaattttatttaagttaggaaagtgggtaaaggtagaaagagaaggggttggaagatttacgagttttgaataagaagtttagacgattatatttttaggatagtagttttaaaatgcggttttcgttttaagttttaaagagacgaaggtcgtgagacgggaagttcgggatttagcgtagcgagcgatcgggagtagcgcgtatattttagtttcgttttttttatatttcgtttagatttgggagtatttcgttcgggcgcggggttagtttgggagcggcgtttatttattttttagtagtaagcgtagggatcgtttttatttcgatcgttcggatagtatttttttacgggtcgcgcgtcgtagtttttttattcgcgtttcgttcgatttgagttttttttcggcgtacgttttttttttaggttgttacgcgttatattttgagtttcgggtttgagttcgtatttaaaggtttttgtttgcgaaggcggaggttttattttttcgtagttaggtttttttggattttgtttttagttgttttttagttttttttttcgttatataaggtttagggttaggtttttattttttttacggtttaggggcggggagattggggttggttttggttgggagggtttgttcgtttttggtttagttgggtaaattcgttttggttagtttagcgtttcgtttttatcgcgagcggcgttgggcggggttgcgtgcgtggcgtgttcgttggattaggggacgggggcgcgtcgtaggtgtaggagttttgcgcgtttatttggcggtcgtgggtcgaggaggggttaagaattgttgtttagtagtttttttttcgttgttttgttttggtcgaggtaaaggtcgcgtgcgtttcgcgtttgttaggttttagggttgcgcggatattgggtgggtggtgggtcgaggcgatcggaaggttttggtcgttttttcggtttttttagtattttggagcgtcgttttcgggtttcggttttttggatttgcgggtcggtttcggcgggcggattatttttcgtttataatttcgaggtttcggggttaatcgcgtttttcggtcggtaatttagggtttagttagattttttttgatttatcgtttttgggaaagaggcgtttttcgttaggaggatgttgagttttttatgattggattagtgagtgtttattttttggtttttggcgagagaggcgggatttttacgtttttttggcgttttttgtagagatgttttttaggtttaattcgggatttgggatgtttgtgcgtgttgtggagtagagagtttgtaatatgtaagtgtcgtgcgtgaggaagagtaaaattaatttatggagtttgtttatttttaatgtggagggtagtttcgtttttttttttcgtcgtttcgaggttattttaatatttaaatttaatatataagaaaaaaagttaggtataattatggttttttatttttttgtattaaggattatattaggtgatataagttattttaatatatattatgaagaaagtgattagtaatttataaaggtatattaaaatattatataaattacggtttttttgataggattatgatggtgattttaagaaagtggttgaatgtggatgaaatagtttgttgtggattgtagtacgtgtggtaggatatgtaggtttgttggttggttgttttgagacggagttttttttttgtcgtcgaggttggagtgtagtggtgcgatttcggtttattttaattttttttttttagatttaaacgatttttttgttttagtttttcgagtagttgggattataggcgtttataattatgttcggttaatttttatatttttaatagagatcgggttttgttatgttgattaggttggttttaaatttttgattttaggtgattcgttcgtttcggttttttaaagtgttgggattataggtgtgagttattgtgtttggttagtatatgtaggttttttgtattttatgtagtttagtttatttatttaataaatatttaatgtttgttgtgtgttagacgttattttaaagattgaagatgtaaaagggattaagatttaatttttttggttaggtacggtggtttacgtttgtaattttagtattttgggaggttatagcgggcggattatttgaggttaggagttttagattagtttggttaatatggtgaaatttcggttttattaaaaatataaaaagttagtcgggtgaggcggtgggtatttgtaattttagttgtttaggaggttttttgttgtagtgagtcgagattatattattgttttgtagtttggggaatagaacgagatattgttttagaaaaataattaaataaaaaagatttattttttttttgtaaagtttataggttgggtagaagagatatgtaaataagtaattgtattagatatgataagtatatttttttgaatatatatagatttaagttatttaatatagtttgttttgtaataaaaattatttattttagtttttttattttgaatttaatatttttttatttagtatttattttatatttttttttagtattttggtagaattagattttttaaaacggttaataggattttagaaattaagttaatttttagtgttagttagaatggatttttggatttaggatagaggttttttaaatgtgagttggggattgtagataattttcgaggttttttttgggatttatgaggttaaaaagtttttatgtgttatttgttttttttatttttgtttttttagaagtgtataatgaagttttgtggagattataatgtgttattaaagtaaatagaattaagttgttttttaagttagatattagagatttataaaaatgtaaaataatgttaattttattttttgtttttaaaatatagtaattttttattaaaatatgatatttatgttaatatgtaatgggtttattgttaattttaaggaattaattttttatatataatttattagtttttatttttaatatggtaaatattaatagttataatttatatgaaaaaaatttttttgagtttttaatttttaaatatgttaaggggttttgatattataaattttgagaattgttaaggtaggttagttatttttaaattatgttttatggagttttgaattttttggtagtgtgttagaaatttgtgaggatagagaattagtaggaagttaaagataaggttttgggtttttatattttttcgttttttttaatggtagtttaatttttttttgtttatttggttttttgttttttgttttttgtttttttttttttgagacggagtttcgttttgttatttaggttggaatgtagtggtgtaattttagtttattgtaatttttattttttaggtttaaaagatttttttgtttaggttttttaaatagttgggattataggtgcgtattattatattacgttaatttttgtgtttttagtagagatagggttttgttatgttggtcgggttggttttaaatttttgattttaggtgatttatttgttttggttttttaaagtgttgggattataggtatgagttattatgtttggtttgtttatttgttttttgtattaattaggtggagatttttaaattttaatttttgattattgtgtatttataggtttaatattaagtggaagttttaaggtttgggtttttattttttgaagtaatagtttaagttatgttttagttttttttagttatagttggggtagttgggatataaggtattaagtttttagattgtatatagtagagggattttgggttcggtttataaaattattttttttttttaaatttttaggtttgtgatgggaggagttgttatgaagatttttgatatgttcgttttttttattgttttggtgattaatattcggattttttttatttatgtaaatttttatagttagtttgaatttttttttagaaaatgagatttttttttttgttatgttgttaggttgtaaattttttaaatttttatgttttgttttttttaaaaattgaatgtttttaatagtatttaagttattttttgaatgttttgttgtttagaaattttttttgttagatattttaaattatttttttttagtttaaagttttataaatttttatggtaggggtaaagtgttcgttagtttttttgttaaaatataataaaagttatttttgttttagtttttaataagttttttatttttatttgagattatttgattggattttattgtttatataattattagtatttttgttaaagttatttaataagtttttagggagttttaaatttttttgtatttttttgtttttttttgagttttttagattgttttaatatttggttgttaatttagttttaaagttgtttttatatttttggatatttttttagtagtgttttattttattggtattaatttattgtgttagtttttttttatgttgttgataaagatatatttaagattaggaaatttataaaagaaagaggtttattggatttatagttttatatggttggggaagttttataattatggtggaaggtgaaagttatgttttatatggtagtagataagagaagagagaatttgtgtagggaaatttttatttttaaaattattagattttatgagatttatttattattataagaatagtacgggaaagatttgtttttatgatttaattattatttgtcgggttttttttataatatgtaggaattatgggatttataagatgagatttgggtggggatatagagttagttatagtaaggtattgtttgggtaaaatataagtttttttttttttttttttttttttttttatagggttttattttgttatttaggttggaatgtattggtatgaatacgttttattgtagttttaattttttaggttgaagtgattttttaattttgtttttatagtagttgtgatatggtttggttgtgtttttatttatattttattttaaaatttagtgggaggtaattgaattatgggggtaagttttttttgtgttgtttttgtgatagtgaataagttttatgagatttgatggtttttaaaagagttttggttgggtatggtggtgggtatttgtaatttaaattattagggaggttgaggtagagtgaattgtttgaatttgggagaaggaggttgtagtgagtcgagattgtatcgttgtattttagtttgggtaaaattgaag

SEQ ID NO: 1873 - DNA, 11662 bp, Artificial Sequence
  chemically treated genomic DNA (Homo sapiens)
gtatttattttaagttttagggtatatatgtaggatgtgtaggtttgttatatagttaaatatgtgttatggtggtttgttgtttagattaatttattatttaggtattaagtttagtatttatgagttattttttttgatgttttttttttttcgattatttttttgtttttttttataattttgttatttaaatttgtatttgtaaataatatagatgattttatttgtttcggtatttaatataaatagaattttattgtttttttttgttttgttttttttttttttttggtttaattttatgtttgagagatttatgatgtgtgtttttataagttgtagtttgtggattgttagtattgaatatattttattgtatgaatatattataattttatttatttattttattgttgatgggttttgggttgtatttagttttttattattgtgaataatgttataacgaatatttttttatattttgaaatatatgtgagtggggtttttagagtatatatttaggggtggagttgttgcgtggtatcgttttatagtttttgtatttttttttttagtatttggttttatagagaggtggatttttatgttagtttttgtattttatttattgtgatattatatattttttatgtagtttttggaaaattttattgtatatttgtgggagaatgataatgagaaaattaagtaatattattacggaaatagttttgattttgtaaaatttttttgaaaaattattggggatttttaggattttttggtttatattttgagaatcgttagtttagtagagtagtttttggtattttgaagggattagtttaggataattttttttttttatattaaaatttagatgtttaagttttttttataaaatgatatagtatttgtatataatttatttatatttttttttaaatttttagttattttttgattatttttatttaataaatgtaaatgttatgtaaatagttgttttatagtattggttttttatttgtattatttgtattgttttttttttattgttgttttttttaaatatttttaatttgttgttggttgaatttgtagatgtgaagtttaagtatatggagggttaaatgtgtatgttatttattttttttgattgttaaaataattagggagatttttttagataaaaggaaatatagtattatttattgtatcgaaattattaagatttgtaggtcgtgtgtatagtattggggataaatatgggatgtagtgattattttcgttagaattgttatataatgacgatgaattttggggggattttttttgagatttgagttttttttattttttttttattttttttttgatattggattttttgttttgataaattgtggggtaatatattagtaaaggttatttaattttaaggggaaaatgattaattaaagaatattttaacggtttataaagggtattaggtgtaatgaggatgtgttattttattagaataaatttttgagtttatataatttttagttatataatttgaaattcggatttggtatttggtaagtacgtaatgaatagttatagtaagttggttaagggtagagtttagtttgaataaagtaatttgagaatattaaaggaagtttggggaatagtaagggatttagaatggttagagggtaagaggtagagggagggggtaagtagaagggttagagaggaggaatgagtttggataggtgggttggggtttattttagagttttgagagtaaggtagaggattttgaattttttgtgtttaggaagttgttgattaaggttttagaagtggtggtgaggtggggttatttaggtggtagtcgatgtaatgatttagaagggatagttgggggttgggggataggggggttggggttttgaaatgggattatgatagttgggtttgagagatagtggtagaaatatttagatttagtatttatttgttggtttggatgtagggtttagaacgaaaagagaagaaaagttatttttatatagaaatatgtttagagcgtttattgtttttaaaattatggattggtatttgagtgatagtatgattttaaagttaaaattttgtttgtaaggaatatatatatatatatatatatatatgtatatatgatatagttatagtttaatagtaaggatagatatgtaaattgttaaaagatataaggtagaatagaataaaatgttgtttttttgggattttggaaatttaaggaatttaagggatttaaggaaggtggttttgtttttcgggagggttttgtagatgatttatagggtattggatatgtttatgttgtttttttagtaataagtttgttattttgatttgatgaaaggagatgaaaggagttggtagtgtgtttgatggtggtttattaatttatgtttttagtttaaaaagaaagtagttttaaaagggttttagaaatattttttatggacgtgttattttttagtagtttttaaagtaagattattatattgttgttttgttgtgtgattttttagtttttagagtattattttttgtaattgtttggttatgagtttgtttttgtttatttgatttttttttttaggtaaggattatttttaatttgattttttgggtttagtttttagtatagtgattgttatttagtagggtttatacgttttataaatatttggtagatgagggaattagtaatgggttttgttttggttttagagtagatattaattggattgtttagtagtggttttttgttgtaatttatgagtatgaatgtggattgtttattatttagattagtaagtattttttggttaagggtagagttgtggttataaattatttaggtatatagtagaagtagttttaaaaagtttggaagttttgtatgatgtaggaaagttataaaattattatagtggtgatttatgtgtttatagtttttttattgtttataatttgtaaatgaatttatatagtattgggattttggaagaattattatttttaaggtttaaattaaattgtgaattttagaatttttaataaggatataataaagagtgaaagtattgttatgtttattttgtttgtttagaattttggttttaaaaaatgaagagtgtttgggtgtggggaggagttttagtgtgtatgtgtatgtaaagtatttattttaaggagaagaatgagagggtattttaattatttgttaatatgttttataggatattaaaattttagttagttgtttttttatgattttttaagtatatttttaagtatggttggttagtgatgtgtatggtttaaatgttgggatttgtgtagttattttggaattgtatagtatagtagtatattttttttaaaaagagtgtaatatttttaattttggttgtataatatttgttttatagtttatggttaataaatataaatttgagttgtttttgtttattttttttttttgattttaaattagttattagaatttttttaaatgttttttttttggattttgggttagtggaatgagtataatttaatttaattgaatttgtttatttatttggttttttgttgtgaataaaagttttttgaaaaggaatttggaagaaagagattttgttttagtgaatagtttgtaaattagggagttatagtttttggtacgtaatgaaggtgagttttatagaatataaggtaggtaggttttacggtaaaaagtttttttttaggtttttaattaggtttatttatgtaaatgaaggatggaaatttgtttagtttttattggttattgtagttgtattttgattggttgatgaagttgagttttgagtggttgaggtgggtgagttttaattggttggtttaggtgagcgttgaaaattttaattataaaaaggtataggtttttaggatatttagagtaatcgtgtgatttgtagtaagtaaagggttagttggttttattttaaatttaggtttagttagttatttaagatttattttataggattggtttttttaggtttatattaataaaggtttgtttttggggaagatttttgtttatatgcgttttagtgaatttttttttttggttattttttattttagtacgttttttattttcgattcgttttatttatttatttgtttattttttttttagtatgttttacgatttttaagtttttgtttatgtgtttaaattgtgagtttggtttattttatggcgcgtgttcgtgtggtgggttttgttgtagttttaagattttatattgtgttggatttaataaatattgttggacgaaggaatgaaatatatgatataagtgagtaggtagtatcgggggagttgtggagtgggtatttttataggtttttatggcgaaagcgggggtatagttgtgtttttttttttttaaaaggttttttaaaaagttttttgtttaatttttggaaaagaagtttaatttgtttattatatagtcgtttttttttttttttggtaatatttgttggtttgtggaaatattaatttaatggattttgaggttttggaagtattttgttgtgtttatttaagaatgtgatttgagtatgaaattttagttagtttaattgttgttgtttattaagaaatttaataaagttttattttttttatttttgaaagtgaattttttgttatttttgtggattgatagttttttatagttacgtgatatagttaaatattaatttggtgtatcgattggtttttgttatatatatatatataagtaggagagggcgaatttttggtaggagtaaaggcgttatggttgtggagttttagggcggacgtttatttgttttgggtttgttgttgtgtgtgttgggtttagtggtgttttatgttgggaagatattgttgattttagtggatggtagttattggttgagtatgtttggggttatttagtagttgtagtagaggggatatgaaatagttgttttagtatttgacgtttcgttgtatattagagacggagtattttatattttgaagacgtattttgtgttattttaaagggaggatgtgaaagagttttttgttagtttcgggtataatgtttttgagaatgatttttttttgtagcgtgtgattaaaatatataagaaaataaaaaaggattttgttatgtttttgtttggttgtttttatttattgtataataaggagtttatggtttttttggtagaaagtagttttgatgttatgttgacggattttttttttttttgtagttttatcgtggtttagtatttgtttttgtttattgtattttttttgtatgtattgttatgtagtttggaatttgaggttatttagtgttttaatttatttttttacgtgtttaggtttttttttttttatttagattatatgatttttttgtagcgggtgaagaatatgtttattgtttttttatagaattttttgtgcgacgtggtttatttttcgtatgtaatttttgttttagaatttttttagagagaggtgattgtttaggatttattgagttttgtatttgtttggttgtttagaagtgattttgtgaaggattattttaggtttattatgtttaatatggtttttgttggtggaattaattgtttttattaaaatttattattttaggtgtgtattggagtgggatttttatatgcgtatatttttttagatgtattattttggatcgattaattagttttagatatatgttgagtaagtattttgagataatttaaaatgtttttttttgttaatttttgatttttaggtttgagtttgtttttggtattattttttggatgattttttggtatttgagatttcgggaaagtattttttggatattttattttgtgtgttttagtggatagtaattaattagaaataataagttgttaaatgttataggtatagaatgttgggtttggggtattttgtagaaaatttagttgaagtttgtattttgttttggatttagttaggtaggtaatgtttaggattgatgaaattattttttgatgatgatagattttggaaatgaaagttgtttttgtgattttggttaaagttttagtttttaaatattttgataagaagttaaattttgtagttcgtttttttttaatgagtgaattattagatagttaggttttgatatgatatagaaaggttgtaggttttatttttaagttattaggtttattttttttttatagagtttgaagtatgtaaaaagtagtatttatatttttatcgaaattttagtagaggatagaaaagaataggagaggtttttttagatggagcgttagggaattattttttgaggaggtgatattttagagagcgtttatttatttattttgtaaagattggttgaggatttattggtagtttaggtattttttaggtgttgcgtttggtttttattaaggggattgatattattttcggaggtgattttatttttattatatttttaatgtgatttgtattttattttttttaattttttgtgtatttttttttatagtatattaaatatggtagttattttatttagatagttgttgattgttcgttttatattatgagttatgtggggatttgtgtgattttgtattaattatatttattgtatgcggcgtttttaatatttgttaatgggtttgtatgtatttggcgttttataaattttagtatttaaggtatagaataggtatttatcgaatatgtgttatattaatgaatgagaagaaaggtgttaatcgaggtttagttaatgggtcgagagtaatttataatagttttttttagttttttgtattttagttattatatattaatatgtatatagaaatatatgtaaaattttttggttgttttttttataaaatagagtaatagtgtatttttattgtttatttatcgataatgttatggatattattttagttttaaatgttattattttttaaattatgaaatagtattttatggtatttgtgtattatagtgtattttgttggagatttagtttagttttttatagaggaatattataatttgtattttaggagttttgttgttgtgattttaaatattttttttaaaaagataagttattttgtagtttaaaaaatatttgttttgttttttttttatttatttttttttaagtattttatacggttttttttttttggttattattgtgaatgtgttatttttttgtatttttatttttagttgattatttatttattatttagttattttattaaaatattgatttttataataaaaaataataggtagttatttgttgataaagaaattttggtttttttttttataaattttatgttaaatattagggttattgaatttattagaatttttaaaaatagttgaataattttggtaataggaaagatgttcgttttgttgttattttagtggaaattgattattattttattattttgtattatgttagttattgttttttgaataggttttattgatttagataatttttttttttgcgtgaggatgtttgtaggagaggtatcgaattttattagttgtttttttggtatttattgatataattataaaagtttaagtggtgaattgtgttgattatatatttgttgttgttttgtttggtgtagttaggtttaggtgtgaaaatatgtttttaaattgtattttttagtaatttgttttgttttgttgtatgttttaatttgaaattttattttttggatattaatattattatttttgtattatttttgtttatatttttttagtatatttttagtatttttttgtttttaagttttttttttttttaaataatatggtattggtatttttaatttagttaggtagttgttttaataagtgtattttgtttatttgaatttaataattaatagatttgattgtaatttttttagtttattttatgtttagttgattttgttattttttttttttcggatttttattggttggttaagttattgtttttattttttttttttttttttgttaattaaaaatgttattttgtattattattttttttgtgttgatggttttatttttaatatttttgataaaatttttgaattttaagaataaagataaaatttttattgtataaagaagtttatagagaaagtataatttggtattggcgtgtttttggtgtgtttgaaggaaaagagatagtggaataatattgggagaaaaggaatgaaatttaagaattttaagatgttttttttttgttagggtaagatagtagtggtttatagataatcgtaatgttgggtttgagaaaaataattaaatagaagattagtgaggattaaggtttcgagatggttaggagaggaaagtttgggagtagggaaggttgagatatatgtgggttattgggaatgcgtgatggtgaagttatagatgatttatatggtgtttaagtgttaaagaagaattttgggaaaatgaaatgtatttgggaagggaaaatttaattaaaagtttaaattaaaaatataaaatttttggtaaagtttaggagttatgttaaatgttttattttggttggtgaagttttattagaatagggaaatttttttatttaggggtattttattttttttttgaagggaattaatggtgggggattggagtgttatttttagttaatatgttgttttattttttggttatttcggtaattgtgaagttagggtgaagtttaagggaagttttgttaagtaggggatggattttatttttattgagttttatagtagttggtttaggtaggagttggtcgtgatgataatttttttgtagtttgttttgcgtgaatttttagatgaatttttgtgttatttaaattttcgtgattttttgttatttaatttcgaatgtttatggatttgtgggtttaattttgtgtgaattatattttgttgattgttgagtgggcgtgtgggagggtgtgtttggaggagaatttagattcggttttttttagatgagttttagtgtaagagtgggttttatgaagagtaaaggttttaggaaatttaagtaagttatttattaacgtttagaagaaagaatttgaagagtatttggaaatgagttgtgtttttttaagaaagagggagagaaagaggggagagatgtggtgtagattttagggaggaaggagtttagaaaaattatttttagggtgtttttgttataaattaaaaaatgtagtatggtggtggggaggatgattttgttttttttgatttttagatgagtttaagggaaaaggtaaagataaagtttttaagagttagaggatttacgagggtttggggttggtgagagtggcggggagagagggtttattttgggagaaggatggttagtgtttggggtttttttggttatgttttaaattaggtttggtaggagttttgttgtgtaaattgcgtttgttgagttttgttagaggttttttgtgttttatatttagggtgattagtattttggtttttttaggattgtttaggttttagtattgaatattatatgttttagggaattttttagtttgggtaagttttgttatattatataattatattagtgtttttagtattttttgtaaatataaaattatagatttagtaattttattattgggtatatatttaaagaaatataaattattttattataaagatatatgtatatatttgtttattgtagtattatttataataataaagttatggaattaatttagatgtttattaatggtagattggataaagaaaatgtggtatatatatattatggaatattatgtagttataataaggaatgagattatattttttgtaaggatatggatgaagttggaagttattattttttataaattaatataggaatagaaaattaaatatcgtatgtttttatttataagtgggagttgaatagtgagaatgcgtagacgtagggaggggaataatatatattagggtttgtggcggggtgaggggtgaggggaggaatttagaggataggttaataggtgtagtaaattattatggtatatgtattttagaattttaagtaaataataataataataattaataataataataataataaataaatttataaagttatttgagagatttttgggggatttattggattattgaaaatttatagtgagaaaagaattgttatgttgatgaaataggaaaattttttttgttttttttatagagtatgtgatagcgggaggggtttatttttttagtgcgttattgtttaaatttttaggggagtatatagacgggtaggttgtggggttttgattttatcggtagtgtttagaggtggatgtttatagtttttgaagttttagtgggcgtgggttatggtttttttttagttttgttttttatagttagtttgtgttaattagtttaattatattttttattttgtcgtaaggatagagggttttttgtattttgggggtttgttttggtgtattagaagaatcgaattttatttgggtttggagaatgagtgtaaggatttattgagtggatgtagtttttagtagatgggggaagttagaaggggatggaatgggaagggttttttttggagttagatcgtttagtggttcgggttcggtggttcgggttcggtggtttgggttttttttcgattgttttagttaaatttcgcgttgttttgttggttagtggtttgtcggtgtttgttggtgagttttttttaatgtttagttgtttttgcgttttttcgttgatgtgtttttttcgatgtttagttatttgtgtgtttgtttgttagggttttggggtttttataggtatatgatgggggcgtggtaggttagggtggttttgggaaatgaaatatttaggtaggaaaataaaaatgtttgtttttatttaggtttatgggtataggtttgggggtggagttttcgttagggattatatttttttttatttagtattttttttttttatttttatattatttaaagggattacgttttttttagttttttttttttgtattattgatgttttgttttgtgttttttaagtggaattattattgtgtgtatgtataggtgtgtgtatgtgtgtgtatgtatttgtgttttttttttggaaaattagtatattatttggattttgtattttaaggataattttgtaagtaggaatttttttttttttagaaggaagtaaaggagaggaaaatgttgtaaaatttatatattaataattttttattttattttaaatacgtatgtttttaattatagttttaagaggaagatatttaatttataatttattgtatgtagttattaaagaatatgagaaaaaattaattgaaaattttttttttggttttagg

SEQ ID NO: 1874 - DNA, 11662 bp, Artificial Sequence
  chemically treated genomic DNA (Homo sapiens)
tttagagttagaagaaaaatttttagttaatttttttttatattttttgatgattatatatagtaagttatgaattagatattttttttttaagattatgattaaaggtatgcgtgtttgagatagagtaaaaaattattaatatgtaagttttatagtattttttttttttttatttttttttaaaggaggaagggtttttgtttatagaattatttttgagatgtaaaatttaggtaatgtgttagttttttaaaagaaaagtataggtatatgtatatatatgtatatatttgtatatatatatagtgataattttatttagagaatatagagtaaggtattagtgatatagaagggaagagttgggaagggcgtggtttttttaaatgatatggaagtagggaagggaagtgttgggtagaagagggtgtggtttttggcgagggttttatttttagatttgtgtttatggatttaggtgaggataggtatttttgtttttttgtttaaatgttttattttttaaaattattttggtttgttacgtttttattatgtgtttataaaaattttaagattttagtaggtagatatataggtagttggatatcgggaggagtatattagcggagggacgtaaggatagttggatattgagaagaatttattaataggtatcggtaggttattgattagtagaataacgcggagtttggttgaggtagtcggaggagagtttaggttatcgagttcgggttatcgagttcgggttattgagcggtttgattttaggggaaattttttttattttatttttttttggttttttttatttgttgagagttatatttatttaataaatttttgtatttattttttaagtttaggtgggattcgatttttttggtatattaaggtaagtttttaggatatagaaagttttttgtttttgcgataaggtagagggtgtaattgagttggttaatataagttgattatagagggtaaaattaaaagaaggttataatttacgtttattggagttttaggagttgtaaatatttatttttagatattgtcggtgaggttagagttttataatttgttcgtttgtatgtttttttagaggtttgagtagtggcgtattgagaaagtgagtttttttcgttgttatatgttttgtgagggggataaggaaagtttttttgttttattaatatggtaattttttttttattgtagatttttagtggtttaatgaattttttaagaattttttaaatggttttatgggtttatttattattattattattattaattattattattattatttatttgaagttttgggatatatatgttatggtggtttgttgtatttattgatttattttttaagtttttttttttattttttatttcgttataagttttggtgtgtgttgtttttttttttgcgtttacgtatttttattgtttaatttttatttatgagtgagaatatgcggtgtttgattttttgtttttgtgttagtttgtggaggatgatggtttttagttttatttatgtttttgtaaagaatatgattttattttttgttatggttgtatagtattttatggtgtatatgtattatattttttttatttaatttattattgatgggtatttgggttggttttatgattttgttattgtgaatagtgttgtaataaataaatatgtgtatgtgtttttatagtagaataatttatatttttttgggtatatatttagtaatgggattattgagtttatggttttatgtttgtaaagaatattgagggtattaatatgattgtgtgatgtggtagggtttgtttaaattgaggggttttttaggatatgtgatgtttagtgttaaaatttgaatagttttgaggaagttaggatgttggttattttagatgtgagatataggagatttttgatagggtttagtaaacgtaatttgtatagtaggatttttgttaagtttgatttggaatatgattaggaaagttttagatattgattattttttttttaaggtgagtttttttttttcgttatttttattagttttaggttttcgtgagttttttggtttttaagggttttgtttttgtttttttttttgggtttatttaaaagttagggaggatagagttattttttttattattatgttgtattttttggtttgtagtaagaatattttgaggatggtttttttgaatttttttttttttagggtttgtattatatttttttttttttttttttttttttttttggggagatatagtttatttttaagtgttttttaagtttttttttttgagcgttggtaaatggtttatttaaattttttaggatttttgttttttatgaaatttatttttatattgaagtttatttggaaaaggtcgagtttaagtttttttttaggtatatttttttatacgtttatttagtaattagtaggatgtgatttatataaaattgaatttataggtttataaatattcgaagttaaatagtaggagattacgaaagtttaaatggtataaaagtttatttggagatttacgtagggtaaattgtagagaagttgttattacggttaatttttatttgagttagttattatgaggtttaataaaggtgaagtttattttttatttggtaaagttttttttaaattttattttgattttatagttatcggaatgattaaagagtgaagtaatatattaattgaaaataatattttaattttttattattgattttttttaaagaaaagatgagatgtttttgaatgagagaatttttttgttttgatgagattttattagttaaaatgagatatttaatataatttttaaattttattaagaattttgtatttttagtttaggtttttaattagattttttttttttaaatgtattttatttttttagaatttttttttagtatttagatattatgtgggttatttgtgattttattattacgtatttttagtaatttatatatattttaattttttttgtttttaagttttttttttttggttatttcgaagttttggtttttattaattttttgtttagttattttttttagatttagtattgcgattgtttgtgaattattgttattttattttggtaggggaggaatattttggaatttttgagttttatttttttttttttaatgttgttttattatttttttttttttagatatattaaagatacgttaatgttaggttgtgttttttttatggatttttttgtgtaataaaagttttatttttatttttaaagtttaggagttttattaagagtattgagaataggattattaatataagaggaatggtagtgtagagtggtatttttagttaataaaggaagaaagagaaaataagaatagtaatttgattaattagtagaaattcggaaaaaggagaatggtaaagttaattaaatataaagtaaattgagagagttataattaaatttattaattgttagatttaaataggtaaaatgtatttattaaagtaattgtttgattggattaaaaatattagtgttatgttgtttaaaaaggaagaaagtttgaagataaaggagtattaaagatgtgttagggaaatgtaaataaaaataatatagaagtggtaatattaatatttaaaaagtggaattttagattaaaatatgtaataagataaaataggttattaaaaggtataatttaaaaatatatttttatatttaagtttgattgtattaaataaggtaataataaatatgtagttaatatagtttattatttagatttttatggttatattaataaatgttagaaaggtagttgataaagttcggtgttttttttataaatatttttacgtaaagaaggaaattatttaaattaataaagtttgtttagaaaataatggttaatataatgtaaaataatgaaatgataattaatttttattaaaatagtagtaagacgggtattttttttattgttagaattatttaattgtttttagagattttaataaatttaatagttttgatatttggtatggaatttataagagaagaaattaaaatttttttattagtaaatgattgtttattattttttattatgaaaattaatattttgatgagatagttgagtaatgagtagataattagttagagatagaaatgtaaaaaaataatatatttatagtagtgattaaaaaaaaaaaatcgtgtaaaatatttaagaaaagatgaatgagaaagaaatagaataaatgttttttaaattataaaatagtttatttttttaaaggaagtgtttgaggttataataataaaatttttggaatataaattgtaatgtttttttgtggggaattagattagatttttagtagaatatattgtggtatataagtattatgaaatattattttatagtttaaaaagtaatagtatttaaaattggagtgatatttatgatattatcggtaagtgggtagtgggaatatattgttattttattttgtagaaaaagtaattaaaaaattttatatatgtttttatatatatattggtatgtaatagttggagtataaagaattaaaaagagttattgtggattattttcgatttattaattagatttcggttggtatttttttttttatttattaatgtaatatatattcggtgggtgtttattttgtgttttaggtgttgagatttatggggcgttaaatatatgtagatttattggtaggtgttgaggacgtcgtatatagtggatgtgattaatgtaaagttatataggtttttatatggtttatgatgtgaagcggataattaataattatttaagtgaaatggttgttatatttgatgtgttatgaaggaaaatgtatagaaaattaaaaaaaataaaatataaattatattggaggtatagtggaaataaggttattttcgaaggtgatattagtttttttaatgggagttagacgtagtatttgggaagtgtttgggttgttagtagatttttagttaatttttgtaggataagtgaatgaacgttttttgaaatgttatttttttaaagagtaattttttaacgttttatttgaaggagttttttttgtttttttttattttttgttgagatttcgatgaggatgtgaatgttattttttgtatattttaaattttgtaggggaaaaataaatttaatagtttgagaatgaaatttataatttttttgtattatgttagaatttgattgtttggtgatttatttattagaagagaacggattgtaggatttagttttttattagaatatttagaaattggagttttaattagggttataaaggtaatttttatttttaggatttattattattaaagaatgattttattagttttgaatattgtttgtttgattgaatttagggtaaggtgtaggttttaattgagttttttgtagggtgttttaaatttagtattttgtgtttatggtatttaatagtttgttgtttttaattgattattatttattggagtatatagagtaaaatgtttaaggaatgttttttcgaaattttagatattaagaaattatttagaagatgatgttaaagatagatttaaatttaggagttaaaaattaataaaagagggtattttaaattattttagaatgtttgtttagtatatatttggggttagttaatcgatttaaagtaatatatttgaaagaatatacgtatgtaaaagttttattttaatatatatttgggatagtggattttggtgaaggtagttgattttattaataaaaattatattgggtatgatgggtttagggtaattttttataaagttatttttaaatagttagatagatgtagagtttaataggttttggatagttatttttttttgaaggaattttgaggtaagggttgtatacggggaataaattacgtcgtatagaaagttttgtgaaaaggtaatgagtatgttttttattcgttgtaggaaggttatgtgatttgaatgagaggagagaggtttgggtacgtaggagaatgggttggggtattgggtagttttaaattttaggttgtatggtagtgtatgtaagaagaatatagtgggtagagataggtattgggttacgatggggttgtaaggaaggaaagggttcgttagtatgatattaaagttgttttttgttagggaggttatgagttttttgttgtgtagtaagtgggaatagttagataaaagtatagtagagtttttttttatttttttgtatgttttgattatacgttgtaggaaagaattatttttaaaaatattatgttcgagattaataaaagatttttttatattttttttttggaatggtatagggtacgtttttaaggtgtaaaatgtttcgtttttgatgtataacgaggcgttaggtgttaggataattattttatgttttttttgttgtagttgttggatggttttaagtatgtttagttagtggttgttatttattgggattaatagtatttttttagtatgggatattattgggtttagtatatatagtagtaggtttaggataagtgggcgttcgttttgggattttatagttatggcgtttttgtttttgttagaggttcgtttttttttatttatatatatatatatggtaaaaattaatcgatatattaagttaatgtttgattgtgttacgtgattataaaaagttgttagtttataaaggtagtagggagtttatttttagagataaagaaggtggagttttattaggttttttaataggtaataatagttgaattggttggaattttatatttaaattatatttttgagtgaatatagtaaagtatttttagaattttaggatttattaaattagtatttttatagattaataagtgttattagagaggaagaaggacgattatgtagtgaataagttaggttttttttttagaaattaaatagaaggttttttagaaagttttttagaaagaaaagaatataattgtattttcgttttcgttatggaaatttgtaagagtgtttattttatagttttttcggtattgtttgtttatttgtattatgtgttttattttttcgtttaataatatttattgagtttagtatagtgtggggttttgaggttgtagtagagtttattatacgagtacgcgttatgaggtgagttagatttataatttaaatatatgagtaggaatttagaaatcgtgaagtatgttaagaaggaaatgaataggtgggtgggtggggcgggtcgggggtggggggcgtgttggggtagagaatgattagaaagggaaatttattggagcgtatgtgaatagaagttttttttaaggataggtttttattagtgtgaatttgaaagagttagttttgtaagatagattttgagtggttaattgggtttggatttaaaatagagttaattggttttttgtttattataggttatacggttattttgagtattttgaaaatttgtatttttttatagttgagatttttagcgtttatttgaattaattaattaaagtttatttattttagttatttagggtttagttttattaattaattagaatgtagttgtagtgattaataagaattaagtaagtttttattttttatttgtataaatggatttgattgggaatttgggaaggaattttttgtcgtgaaatttgtttgttttgtgttttgtggaatttatttttattgcgtattagaggttgtaattttttggtttgtaaattgtttattagaataaagttttttttttttaaatttttttttagagaatttttgtttataataggaaattaaatagataagtaaatttaattaagttaaattgtatttattttattggtttaagatttaggggaaaggtatttggggaaattttgatgattgatttgaagttaaaagggaaagatgagtaaaaataatttaaatttgtatttattgattatggattatggggtaagtattgtgtagttagaattggaagtattatattttttttgggggggatatattgttgtattatataattttaagataattgtatagattttaatatttgaattatatatattattggttagttatatttggggatgtgtttagaggattatagagaaatagttaattagagttttggtgttttatgggatatattaataggtaattagggtatttttttatttttttttttagagtaggtattttgtatgtatatgtatattgaagtttttttttatatttaaatattttttattttttaggattaagattttgggtaagtagaatagatatagtaatgtttttattttttgttgtgtttttattagaaattttgaaatttatagtttaatttaaattttaagggtgataatttttttaaagttttaatgttgtgtgagtttatttgtagattatagatagtaaaggggttataaatatataagttattattgtaatgattttatgatttttttgtattatgtagagtttttaagttttttgaggttgtttttgttgtgtatttggatggtttgtggttatagttttgtttttgattaagaaatatttattaatttgaatagtgggtaatttatatttatgtttatgaattataatagagaattattattaagtaatttaattaatatttgttttgaaattaaagtagaatttattgttaatttttttatttgttaaatatttatggaacgtgtgagttttattggatggtagttattatgttaggaattaggtttagaaagttaagttagaaatggtttttgtttgaaaggaggggttaggtagatagagataaatttatgattaggtaattataggggatggtgttttaggggttgagaaattatatagtagggtagtaatatgatggttttgttttgggggttgttaaagagtgatacgtttatggaaagtgtttttggaatttttttgaagttattttttttttaagttgaagatataagttagtaggttattattagatatattattagttttttttatttttttttattaaattagaatgataggtttattattaaaggagtaatataaatatgtttagtgttttgtagattatttataggattttttcgggaagtaaagttattttttttgaattttttgaattttttgaatttttaaaattttagaaaaatagtattttgttttgttttgttttgtattttttagtagtttgtatatttgtttttgttattagattatagttatattatatatatatatatatatatatatatatatatattttttataggtaagattttggttttggaattatgttattatttaggtgttagtttatggttttggagatagtaagcgttttggatatgtttttgtatagaagtgatttttttttttttttcgttttagattttgtatttaagttagtaagtaagtgttgaatttggatgtttttattattgttttttagatttagttgttatggttttattttagggttttagtttttttgttttttaatttttagttgttttttttgaattattgtatcggttgttatttgaataattttattttattattatttttggaattttggttagtagttttttgggtatagaaaatttagagttttttgttttgtttttaaaattttgggatagattttagtttatttgtttaagtttattttttttttttagtttttttgtttgttttttttttttgttttttattttttagttattttggattttttgttgttttttaaattttttttgatgtttttaaattgttttgtttaaattgaattttatttttggttagtttattatgattgtttattgcgtgtttattaagtgttaagttcgggttttaggttatgtaattagaggttatataaatttagaagtttgttttggtgagataatatatttttattatatttaatattttttatgaatcgttagaatgttttttggttaattattttttttttggaattgagtgatttttattagtgtattgttttataatttattaaagtaaagaatttagtgttaaaaagagaataaggaggaggtgaagagaatttagattttaaaaaaagtttttttaaaatttatcgttattatatagtagttttagcggaaataattattgtattttatgtttatttttagtgttatatatacggtttgtaagttttaatggtttcgatatagtaaatagtgttgtatttttttttgtttgagaggatttttttggttgttttagtagttaagaaaagtgaataatatgtatatttgattttttatatatttgggttttatatttgtagatttagttaatagtagattgaaaatatttggggggaataataatgaaaaaaaaatagtataaataatataaataaaaaattaatattgtaaaataattatttatatagtatttatatttattaggtaaaagtaattaagagatgattagaggtttaaaggaggatatgggtaggttatatataaatattgtgttattttataaaaggagtttgagtatttagattttggtatggggaaggagggttgttttaaattaatttttttagaatattagggattattttgttagattagcgatttttaaagtatgagttaggaaattttagggatttttagtaattttttaggagaattttataaagttaaaattattttcgtaataatgttatttgatttttttattgttatttttttataagtgtatagtggagttttttagaagttatatgggggatgtgtaatattataatagatagaatgtagaagttgatatgagaatttatttttttatagagttaagtattaaagagagagatgtaaaaattgtaaaacgatgttacgtagtagttttatttttaggtatatattttaaaaattttatttatatgtgttttagaatgtaaaagaatgttcgttgtaatattgtttatagtagtgaaaagttagatataatttaaagtttattaatagtagaatggataaataaaattgtggtgtatttatataatgggatatatttagtattgataatttataaattataatttgtaaaaatatatattatgaattttttaaatataaggttgaattaaaaaaaaaaaaaaggtaagataaagaaaaatagtaaaattttatttatgttaagtatcgaaataggtaaaattatttgtattatttatagatgtaaatttaggtggtaaaattgtaaagaaaagtaaagaaatagtcgagggagagagaatattaaaaagaatagtttatggatgttgagtttaatatttaggtgatgggttgatttgggtagtaaattattatggtatatgtttagttatgtaataaatttgtatattttgtatgtgtgttttggaatttaaaataaatgt

SEQ ID NO: 1875 - DNA, 9728 bp, Artificial Sequence
  chemically treated genomic DNA (Homo sapiens)
taaatatgaagattgaaaaaaattaaatatattttttataatgagattttgtttagagaatagtagtgattaaagtgtaaattgttggaaaatatggatatatgtatatttgtatatgtatatagtgtataatatgtatgtatatgttattgtttatatgtagaaatttatttatttgtagatagtttaggtgggttaatgtttttaatggaaaattatttagggttatttaaaattattagggttaatttgtggagacgaattttatttattttggaattaatttgttgttttttgatatttataaagttaaattaataaagtgtgaaatataaaggggttattatttagtttattttgtttatttggatttataattatttttatatttgaattattaatagttgatttgtaaattgtattggtattttttggttttgagtgatttttgttttttttaagttttttgagaatttggagtgggttttattggttatttagataaagggttttatttataagtggataggtttttttatagggattatcgtatatatatatataagtatatatttttattaggtttgtaataattgatttaaaattattttatagtattgataaatagttttatatttttaaggtgtagaagaattttatagttttaattattttagtgttttgttggtttgttttaagtgtattttttgggtttttggttattttattatttttaaatttttttgttgttgtttattttgtatgtatataatgtcgttttgtaaaggtaggttgtaaatattttatttgtaagttaaaattatttatgtgtaatgttgtaaagtgatgatttgttgttttgttattgttatagtaaatgttataagttatggatgaaattttaaaatgtatattttatatgttatgtatttttataaatatattatattaaagatattatatggttgtttttttttttttaattaaatttttgtttaaagaaaagagtaatttttttttttttttaaatatatgaaagatttagaaaaggtaaaaatattataggattattataatatgtttggtttaggattttagagagaaagtaataattttgtgttttagagtattttaaggtatttatttaaaaatgttaaggaaattttagagttaggtgtggtggttagtatttgtaaattttaatattttgaaaggttaaagtggaaggattttttgagtttaggagtttgatattagtttggataaaataaggagatatttacgtttttttaattttttatatattaaaaattgttttaaaaatattaattgagtgtgttggtgtatgtttgtgattttatttatttgggaggttgaggtggaagtattatttgaattcgggaggtagaagttatagtgagttgtgattatgttattttattttagtttgggtaataaagtgagattagattttattttaaaaaaaaaaaaaaaaaaaaaaaaaaaaaaaaaaaaaagtttcgggttgttgttaattttatattggtattttaggtgataatgttgttagattgtttggagggtattttgggttggattttataagtttatatattttggtgtggattttagtaatttgggttagtttatatagatatgattaggttttgaaagtttaaatgtgttatttacgtgtaaatgaggttgatttatggtatattgttaattagttagagtgttaaagtgttttgattagtttattttgttaagaaaataaaaatatgttttaatatttggtttttattttattaagattttattgtatttatttgtaatgagaaatatttgttaaaagtatgggttttttatattggtttattagtataattttttgagaaaatatagataataaagaatattagaaatgaaattagaattaggtttatgagttaaaattataagttttttatgggttttttttttatttagaatttgtatgtattttagtatttatatagtttatgaagtttatttgtaattaatattttatttaattttaataaatttttatgaagtaagttattttatttggattagagaaaattgagttatagaatttaggtgattgtttaaggttattgagatatttattggaagataattttttttttttttttggtatagggttttattttgttatttaggttggattgtagtggtatgattatagtttattgtggttttaattttttaggtttaagtgatatttttgttttagtttttttagtagttgggattataagtgtgtgttatgatgtttggttaattttttttattttttgaagagatagagttttattatgttatttaggttggttttaaatttttgggttttttatttttgttttttaaagtgttgggattgtaggtatgagttattgatttggttttagaatataatttaaaataaatgtgtatgtgtgtgttttagtgtttttgtgtgtgtatagtgtaggttaaataataataaataattaaataatagtattttagtttatatttttttgaaggggagtggtttagaggaattattaatatagttatggaatattagtaaaagttttaatataaatgataattagaattttataagtttagtttaaaatagatattagagtagaatatagaagggatttagtaagtaatatagagttaggtttatgaaaaggtttagattgaattattgtatgaaattttatatttatggaaattttttagggtaaatatttaaaatagtaagattaaatattggttaaagttaagattttttatttagtttaagtaaatgaaatggagaatataaaatgaattggtataatttatgtttttttgtttttttttttgttgttgttgttgtttgtttgtttgtttgttgttgttgagatagagtttttgttgtttaggttggagtgtagtggtatgattttggtttattgtaatttttattttttcggggtttaagtaatttttttgttttagttttttaagtagttgggattataggtatgtgttattatgttcggttaatttttgtattttttggtagagacggggttttattatgttgattgggttggtttcgaatttttaattttaggtgatttatttttttcggttttttaaagtattgggattataggtatgagttattatatttagttttattaattttttattaagtgtttttgagtgaattattttattgaatttttatagtgatttttggagaaagttaatattattatttttattttttttttttttttttgagcgtagtttggttttttcgtttagtttggagtgtagtgatgcgatttcggtttattgtaagttttgtttttcgggtttatattatttttttgttttagtttttcgagtagttgggattataggcgtttattattatgtttagttaatttttttgtatttttagtagagacggggttttattatgttagttaagatggttttgattttttgatttcgtgattcgttcgttttagttttttaaagtgttgggattataggcgtgagttatcgcgttcggtttttttattttatttttgagaaaattgagatttatatagtttaaaatgtattgttaaagattatttagttagtaagtagaatgggattaaaatttaaatgttttggtttgaaattttatgttttttgtagtgtattatatagttatgttttatttgttttttttttttaaaaaagtatttgttatagttgatatatgatatcgtatatatttattgggtatatagtgttattttaatatatataatgtatagtgattaaattagagtaatttatatattttttattttaaatatttattttttttttgtgttgggaatatttaaacgttttttttttagttattttaaaatatatagtaaattattattgattatagttattttatagtgtaatggaatattaggatttattttttttatttagttgtaatttgtgttttttaattattttttattttttttagtttttagtgattattattttattttttagttttatgagattaatttttttagtttttgtatatgagcgagaatatttggtatttatttttttgtttttggtttgttttattaatataatgttttttaggtttatttattttgttgtaaatgataaggttttattttttatgtgaatttaagggttattttttttaagttagaataaagtattgttttatatatataatggagaagggatttatttgtatagattatttattgattatttttttaagggatttatttgtaaagattaaatatgtttggatttttagattgtttagtaatattatttttttggataattttgatattaattaattaatcgttttttaattttttttttttttttttttattttttttatatttattatttaagtatttgaggtacgttaaaggaaataaaaaagtatttttttaggaagtagagtatagataaaagaggtaatgaatattgtaatgatttaagtgttatatatttttatgtgtaaattgttatggaattgttacgtattagatgttatgaagttaataaaagaattgagtaaaggtttttgtttttgataatttatattttatttggagaaatatggggggtaaattttggttaataattagtaaatataatatgttaggttaaggagtagagataattaagagaattagtcgagaaggtattggttattaaaaaatggataggatttatgtaaatttttatgaaaggtgggattttatgattttatagttaatttagttgttttgggttttgaattttagcgattttatttagaagaaattaggagaagtataaattggcgttaggttcgttattatttatttgatttttgagttcggggaaatttacgggtgtagtaagtcgggaaagttgtagacgaggtaggcggaagaggcgggatttcgcgggtgacgttatcggggcgtcggaggttcggggcgtttgggaatttgaagtaaataggtagcgcgcgataatggcggtcgttcgtgtagttttggggttattggtgacgggtttgtacgacgtgtaggtttttaagtttggggatttcgtgttgaagagcgggttttttttttttatttatatcgatttgcggggtatcgtgtttcgatcgcgttttttgagttaggtgttggtttaggaagggaaaggatagggtttggtggcgggaaggaggataaggaaatggaagagggtgataggagttgggtcgtgagtgagagtaaaagagttaagtaggtagatcgattttatttttggtttggggagtaagtatgagaagtatagaggttaggggttgggtttttcgagagtcgtttgtttttttatttatacgtttagatacgtgttttgtaaaagtcgggaaatttagtttggaacgttttttggtattgaagtatatttgaatgaattttgtatatttaattttttaagaaaattagatttgcggtcgggcgtggtgttttatgagagtaatattagtattttgggatgtttaagtgggtagattatttgagttttaggagttcgagattagtttgggtaatatgacgagatttcgtttttataaaaaattagttgggtgtggtggcgtacgtttgggacgttgaggtgggaggattatttgagtttgggaggttaaggttgtaatgagttgttattgcgttattgtattttagtttgggcgataagtgagattttgtttttaaaaaataaataaatagatcgggaaaacgtgggtaggtagagaatttagtagttgggaaattattggtgagaaaaggaaaatagaataattagaattttgtgatgtatataaaatttattagagtttagagagattttaattatatttttttatgtagtttcgggataattatttaaaggaattttgtttttgattagttgttttttttattattttaatgtatttggaatgtgtgatataaagaataatgtatagttaattaatcgtttgtgttattattttatttatttattttttagatgggattttttttacgttatttaggttggagtgtagttttgtgattatagtttattgtagtttggaatttttgggtttaagagatttttttgtttcgggtgagtataggggtttatgtttgtagttttaattttgggaggttttttttgggaggttgaggcgggtggattatttaaggtttggagttcgagattagtttggttaatatggtgaaattttgtttttattgaaaatgtaaaaattagttgggtatggtggtgtatatttgtaattttagttatttaggaggttgaggtagaagaattaggaggttgtagttagtcgaaattgagttattgtattttagtttgggtaatagagggagattgttttagaaaaaaaaaaaaaaaagagatttttttattttaatttttgagtagttggaattataggtatgtgttattatgtttattaaattaaaaattttttttttttgtagagaggaggttttattatattgtttaggttcgttttaaatttttggttttaaaagatttttttgttttggcggttttttaagtagttgggattataaatgtttggtgttattttcgggttattttttgttattttaatgtaaatttttggtgaatataggaattgtttttttttttgttttaaaaatttatttgtaattattgtaatcgaagtttatagttagggtaattatttatattaattttgttttagtttttttttgttaggtttatatttggaagggttgtttggaaaggggagttgaattttgtattgtgcggttagaagtaataattaagattagaaggtggatatattgggaaagtaggtttttagttaatataaggaaaatttttgtataaattagaggtttttaatatagtgttttttaattttgagtatatatgaattatttgggaattttgttaaaatgtagaatttatttttgtagttttgagattagatttgaggttgtgtatttttaataaagtgttagttgaaattgtagattatattgagtagagggtcgtaaatatgttttttaatatagtttgttattagttacgtgttattattgagtattatgaatttttaagtttaaatagttatatatggttagtggttattatattggattgtaaagatagagaatatttttattattgtagaaagttttattaagaagatatataagtttttttagtttatttaagggtttatgtttattagggattattttgtgtggttattgtaaaaagtattgaagataggttggattattaaggttgcggtattttggattattaattttttattatttagaattttgttatggtgtattttagtaatgtggagaattattaaggattttttagggaaaaattgatttattttaataagttagttgataaatgatagaaaaagttttttgataattagattatggtgtgtgtgtgtgtgtgtgtgtgtgtgtgtattttggtgattaattggggaggagtttaaaatatggagagatttgggtataataaaatttttttttatattttatgcgaatagaattttttagtatttatattttaaaaagtaatataatttatgttaaattttaattttttttaataagtgataataagtgatatttgattatagtattatatatatattagtgtatataaagtaattggagaggaaaggtagtattaatttattaaaaatgtattttttaaatttgtttttatttttttgttaaaatttgtaaattatgtttgaattaattatatgtttgttataatttaatgatatatagaagaatttttttttttaaaaagtataatttttatttttttttttttaagagaatagtttttttttagtttttaaggatttagttttttatatgggttttggtgagggttatgaggtagtatttataggtttaaattagattggggtatttggtttttgtgggatttataagatggattattgattgttttgttgtgaatggtataatttatattttaatgtagtttcgtatatagtttgggaagaatataggaggtaaagttgtttattgtagtaatgtttttgattgttgcggtttttattatgttttgtacgacgagttttttaatggttttttttttgggtatgtatcggatatagtatgtgttattattggttatagttttttttggtacgattattgttttttttttttttttgttattttggaagtaaggatttgagagagttatagaagaatttttgatatttagagatttatggttatgggaaatttttttttaattattattttaaattttagtttatatatatatagataagtatgatagagggattagtaaaagttttttaagtataattatatattattttagaataaaattttgtggatatagtggagtgaaaatatgagttggaaaaagatgtaaaaaattttaaattttttatagtttagtaattttacgttttgtttttttaaatggagatggtggatatttagttattagtatttgtattttaagtttattttttaaaaagagtgataaaatagttttaagataatatgttaatatttttagtattagaaattatattttttgtaatttaaaatagttatagtttttttttgtttgtttttttattttttagaagtattggtgtaaatttatgatttagtttataaagtaatttagtgattgtttgtttttttaaaaaaaaaatgaggtggttttgggtgggaatatgtattttaatattaaaatatgatgatttatgtggaaaaggagattataaaatagtaatttatataatagtttgtatttatgaaattttttaattgaaggttttttttaggatatataattaaaagatgataggtttagatatttagtttaatgggttattgaggaaattaggaagtcgggatcgtttttagtttttggggttaatattatgagtttttttagtatattttaggttgtttttagaatagattttgagtttggttgaatagatttatttttgtgtttttagatttatatttgtgtattgggtttatggagagggtaataaaaaggtatttgtttttttttttttaattaagtttgagatttatttttattagtttattattgttttttttgttacgttgttatatgtttatatattatttaaaatagttataataggttgggcgtagtggtttacgtttgtaattttagtattttgggaggtcgaggtaggtggattataaggttaagagtttgaggttagtttgattaatatagtgaaattttatttttattaaaaatataaaaaaattagttgggtgtagtggtgcgcgtttgtaattttagttttttgggaggttggggtaggagaattatttgaatttgggaggtagaggttgtagtgagtcgagatcgtattattgtattttagtttgggtaatagggcgagattttattttaaaaaataaaaaatataaaataaaataaaatagttataataaaatattgtttatgtgtttatttttttatagg

SEQ ID NO: 1876 - DNA, 9728 bp, Artificial Sequence
  chemically treated genomic DNA (Homo sapiens)
tttgtaagaaaatgaatatataaataatgttttattgtaattattttattttattttatattttttattttttgagatggagtttcgttttgttgtttaggttggaatgtagtggtgcgatttcggtttattgtaatttttgttttttaggtttaagtgatttttttgttttagttttttaaggagttgagattataggcgcgtattattatatttagttaatttttttgtatttttagtagagatggggttttattatgttggttaggttggttttaaatttttggttttgtgatttatttgtttcggttttttaaagtgttgggattataggcgtgagttattgcgtttagtttattgtaattattttaaatagtgtataaatatgtaataacgtaatagaaaagatagtaataaattagtgggggtaagttttaaatttgattggagaaaaaaaaataaatgtttttttattattttttttataaatttagtatataaatataaatttaaaaatataagaatgaatttatttaattagatttagaatttgttttgaaggtaatttgagatgtgttggggaagtttatgatgttgattttaaagattaaggacgatttcgattttttggtttttttagtaatttattaggttgagtatttaaatttattattttttagttatatattttgaaagaagtttttaattaggaagttttataaatatagattattgtgtgaattgttattttataatttttttttttatataaattattatattttaatgttaggatatatatttttatttaagattattttattttttttttaaaaaagtaaatagttattgagttgttttgtgaattagattataggtttatattagtatttttaaagagtaaaaaaataaataaaaaaaaattatgattattttaagttgtagagaatgtaatttttagtattaaaaatattaatatattattttagaattgttttattattttttttaaggaataaatttggaatataaatgttagtgattggatatttattatttttatttaaaaaaataaaacgtgaaattgttggattatgaaaagtttaaaattttttatatttttttttaatttatatttttattttattgtgtttatagaattttattttaaagtaatatatgattatatttgaaaagtttttattgatttttttgttatatttgtttatatgtatgtaaattgaaatttaaaatggtaattaaaaaaaaattttttatgattataagtttttagatgttaagaatttttttgtagtttttttaggtttttatttttaagatgataaagaaaagaaaggaataatgatcgtgttaaaaagggttgtggttagtagtggtatatattatgttcgatgtatgtttaaggaaaagattattaagaagttcgtcgtgtaaaatatagtagaggtcgtagtagttagggatattattgtagtgagtaattttgttttttatgttttttttaagttgtatgcgaagttatattaaggtgtgagttgtgttatttatagtaaggtagttagtaatttattttgtgaattttataaggattaaatattttaatttgatttaaatttgtgggtgttgttttatgatttttattaaagtttatgtaaggagttgaatttttaaggattgaagagaaattatttttttgaggaaaagaaaatggaaattgtattttttaaagaagagaatttttttgtatattattaaattataataagtatatgattaatttaaatatgatttgtaaattttgatagagagataaaaatagatttggaaaatgtatttttagtgagttaatgttattttttttttttaattattttatgtatattaatgtgtatatagtattatagttaaatattatttattattatttattaagggaagttagagtttagtataaattatattgttttttggggtgtaaatattgagaaattttattcgtataagatgtgaaaagaagttttgttatatttaagtttttttatgttttgaatttttttttagttaattattaaaatatatatatatatatatatatatatatatattatgatttagttattaaaaaattttttttgttatttattagttggtttattaaaataaattaatttttttttagaaaatttttagtaattttttatattgttaagatatattatagtaagattttggatggtgagaagttaatggtttaaagtatcgtaattttaatagtttaatttatttttaatattttttataataattatataaagtggtttttagtgaatataaatttttaagtgggttgaggaaatttatatgtttttttgatagaattttttgtaatgatggaaatgttttttatttttgtagtttaatatgatagttattggttatatatgattatttaaatttaaaaatttataatgtttaatagtaatacgtggttagtagtaaattgtattggaaagtatatttacggttttttatttagtgtggtttgtagttttagttggtattttgttagaaatgtataattttaggtttagttttagagttatagaaatggattttgtattttaataaaatttttaggtaatttatatatatttaaagttgagaagtattgtattagaaatttttaatttgtataaaaattttttttatattgattaaaaatttgtttttttaatatgtttattttttagttttaattattgtttttggtcgtatagtgtaaaatttaatttttttttttaaatagtttttttaagtgtggatttaataggaagaggttgaggtaaaattaatatgagtagttgttttgattataggtttcgattatagtagttataagtggatttttaaagtaaaagaaggggtagtttttatatttattaagaatttgtattgaaataataggaggtagttcgggggtggtattaggtatttgtagttttagttatttgggaagtcgttaaggtaagaggattttttgaggttaggagtttgagacgagtttgggtagtatggtgagattttttttttataaaaaaaaaaaatttttaatttggtgggtatgatggtatatgtttgtagttttagttatttagaggttgaggtaagaggattttttttttttttttttttttgagatagtttttttttgttgtttaggttggagtgtagtggtttaatttcggttaattgtaattttttgatttttttgttttagttttttgagtagttgggattataggtgtgtattattatgtttagttaatttttgtatttttagtagagatagggttttattatgttggttaggttggtttcgaattttagattttaagtgatttattcgttttagttttttaaagaaagttttttaaagttgggattataggtatgagtttttgtgtttattcgaggtaagaagattttttaagtttaggagttttaggttgtagtgagttatgattatagagttgtattttagtttgggtgacgtaagagagattttatttaaaaaataaataaataaaataataatataagcgattgattagttatatattgttttttgtattatatattttaggtatattaagataatgggagaggtagttagttagggataaaatttttttaaataattgtttcggggttgtataggggagtatggttgaagtttttttgggttttgataaattttgtatatattatagagttttggttgttttatttttttttttttattagtaattttttagttattgaattttttgtttatttacgttttttcggtttatttgtttgttttttgagggtagggttttatttgtcgtttaggttggagtgtagtggcgtaatgatagtttattgtagttttgattttttaggtttaggtgatttttttattttagcgttttaggcgtgcgttattatatttagttaattttttgtagagacggggtttcgttatgttgtttaggttggtttcgaatttttggggtttaggtgatttgtttatttaggtattttaaagtgttggtattatttttatgaggtattacgttcggtcgtaagtttaatttttttaaagagttaaatatatagaatttatttaagtgtgttttagtgttagaaagcgttttaaattgggtttttcgatttttgtaaaatacgtgtttaagcgtgtgggtgaaagaatagacgattttcgaggagtttaatttttggtttttgtgttttttatgtttattttttaaattaagagtagggtcggtttgtttgtttggtttttttgtttttatttacggtttaatttttgttatttttttttatttttttgttttttttttcgttattaagttttgttttttttttttttaggttagtatttgatttagaagacgcggtcgagatacgatgtttcgtagatcgatgtagatgggggaggaaagttcgttttttagtacgaagtttttaaatttgaaagtttgtacgtcgtatagattcgttattaatggttttaaagttgtacgagcgatcgttattgtcgcgcgttgtttgtttgttttaaatttttaggcgtttcgggttttcggcgtttcgatgacgttattcgcgaagtttcgtttttttcgtttgtttcgtttgtagttttttcggtttgttgtattcgtgggttttttcgggtttaagggttaggtggatggtagcgaatttagcgttagtttgtgttttttttggttttttttggatggggtcgttggggtttaaagtttagaatagttagattgattgtaggattatgaagttttattttttatgagagtttgtataaattttgtttattttttaatagttaatgttttttcgattagtttttttaattatttttattttttggtttaatatgttatatttgttagttattagttaagatttattttttatgtttttttaaatagaatataagttattaaagatagggatttttatttaatttttttattaattttatagtatttagtacgtgatagttttatagtagtttgtatataggaatatatagtatttagattattatagtatttattattttttttgtttgtattttgttttttggaggagtatttttttattttttttggcgtattttaaatgtttaggtaataggtgtagaaaaggtaagggagggaaggaggagagttagaagacggttaattgattggtattagggttatttaggaggataatattgttagataatttgaaaatttaaatatatttggtttttataaataaattttttaaagaaataattaataaataatttgtataaataaattttttttttattgtgtatataaggtaatattttattttagtttaaggaaaataatttttaaatttatataaagaatgaaattttgttatttgtagtaaggtggatgaatttgaaggatattatgttagtgaaataagttaggaataggaagataaatattaaatgttttcgtttatatgtagaagttaaaaaagttgattttatggagttagagaataaaatagtaattattagaggttgggaagggtagggggtggttaaaggatataaattatagttagataggaggaataagttttagtgttttattgtattgtagggtgattgtagttaataataatttattatatattttaaaatagttagaagaggggcgtttgaatgtttttaatataaagaaaggataaatatttaaggtgaggaatatatgaattattttgatttgattattgtatattgtgtgtattgaaatagtattatgtatttaataaatgtgtacgatattatgtgttaattataataaatatttttttaaaaaagaggaatagataaggtatagttgtatagtgtattataaagaatatgaagttttaaattaaaatatttggattttagttttattttatttattggttgagtgatttttggtaatgtattttgagttatatgagttttaatttttttaaaaatagaatgaagaagtcgggcgcggtggtttacgtttgtaattttagtattttgggaggttgaggcgggcggattacgaggttaggagattaagattattttggttaatatggtgaaatttcgtttttattaaaaatataaaaaaattagttgggtatggtggtaggcgtttgtagttttagttattcgggaggttgaggtaggagaatggtgtgaattcgggaggtaaagtttgtagtgagtcgagatcgtattattgtattttaggttgggcgaaagagttagattgcgtttaaaaaaaaaaaaaaagaatgaagataataatattaattttttttaaaaattattatgaagatttaataagatagtttatttaaaaatatttgataaaaagttggtagagttgagtgtggtggtttatgtttgtaattttagtattttgggaggtcgagggaagtggattatttgaggttgagagttcgagattagtttagttaatatgatgaaatttcgtttttattaaaaaatataaaaattagtcgggtatagtagtatatgtttatagttttagttatttgggaggttgaggtaggagaattgtttgaatttcgagggggtggaggttgtagtgagttaagattatgttattatattttagtttgggtaatagagattttgttttaataataataaataaataaataaataataataataataaaaaaaaaagtagaggaatatagattgtattaatttattttgtgttttttattttatttatttaggttgggtaaaggattttggttttaattaatatttagttttattattttaggtatttattttaaagagtttttatgaatgtaaaattttatgtagtagtttaatttgagtttttttatggatttagttttatattgtttattgaattttttttgtattttattttgatatttattttagattgagtttgtggggttttgattattatttgtattagggtttttgttaatattttataattatattggtgatttttttgaattatttttttttaaaaaaatataggttgaggtattgttatttaattatttattattgtttgatttatattatatatatatagagatattgaaatatatatatatatatttattttaagttatgttttagggttaggttagtggtttatgtttgtaattttagtattttgggaggtagagatgggaagtttaggagtttgagattagtttgggtaatatgatgagattttgtttttttaaaaaataaaaaaaattagttagatattatggtatatatttgtggttttagttattggggaggttgaggtaggaatattatttgagtttgggaggttgaggttatagtgaattgtgattatgttattgtagtttagtttgagtgatagagtgagattttgtgttaaaaaaaaaaaaaaagttattttttagtgaatgttttagtgattttgaataattatttagattttgtgatttagttttttttaatttaagtaaaataatttattttataagaatttgttgggattaaatgaaatattaattataaatgggttttataagttatataggtgttaaaatatatataaattttagataaaaaaaaagtttataaggggtttatgattttaatttataaatttgattttgattttatttttaatattttttattatttatatttttttaggagattgtgttgatgagttaatgtgaagagtttatgtttttgataagtgttttttattataaataaatgtaataaaattttaatgaaatagaagttaaatgttaaaatatgtttttgtttttttggtaaaataagttaattaaaatattttaatattttggttaattgatagtatattatgaattagttttatttgtacgtgggtggtatatttaaatttttaaagtttgattatatttgtataggttaatttaaattgttggagtttatattagaatgtataaatttgtgagatttagtttaaaatattttttagatagtttaataatattattatttgaaatattagtatgaaattaataataattcgaggtttttttttttttttttttttttttttttttttttttttgagatagggtttggttttattttgttgtttaggttagagtgaggtagtataattatagtttattgtagtttttatttttcgggtttagatgatgtttttattttagttttttaagtagatgggattataggtatgtattaatatatttagttaatatttttaaaataatttttaatatgtggggggttggggggacgtgggtgtttttttattttgtttaggttggtgttaaatttttgggtttaagagatttttttattttggttttttaaagtgttaggatttataggtgttagttattatatttggttttgaggtttttttggtatttttgggtaaatgttttagaatattttagggtataaaattgttgttttttttttaaaattttgggttaaatatgttgtaataattttgtgatatttttattttttttaagttttttatatatttggagaaagaaaaaaattatttttttttttgaataaaggtttaattaggaaaaaagagataattatatagtatttttagtatagtatatttataggaatgtataatatgtgagatgtatattttgaagttttatttataatttataatatttattgtagtagtaataagatagtaggttattattttataatattatatatgagtgattttgatttataaataaaatatttataatttatttttataaaacgatattgtgtgtatataaaatgaataatagtagaaaaatttaaaaataataaaataattaaaaatttagaagatatatttaaggtagattagtaagatattgaaataattaaggttgtggaatttttttgtattttgaaaatatagagttatttattaatattgtggagtgattttaaattaattgttataagtttgatggaagtatgtatttatatgtatatgtgcgatggtttttatggggaaatttgtttatttatgaataaggttttttgtttgaatggttagtgaagtttattttaaatttttaaaagatttgaggggggtaggggttatttaaaattaagagatgttaatatagtttgtaaattaattattaatagtttaaatgtaaagatagttataagtttagataaatagaataaattaaatgatggtttttttatgttttatattttgttagtttggttttgtggatgttaaaagatagtaaattaattttagaatgagtagaattcgtttttataaattagttttaatggttttgaatggttttaaatggttttttattagaaatattgatttatttgggttgtttgtaaatggatagatttttgtatatgagtaataatatatatatatatattatatattatatatatgtatagatgtatatatatttatattttttaatagtttgtattttgattattattgttttttgaataggattttattatgaagagtatgtttagttttttttagtttttatatttg

SEQ ID NO: 1877 - DNA, 5460 bp, Artificial Sequence
  chemically treated genomic DNA (Homo sapiens)
  unsure 3899, 3986, 4033, 4092: n is a or g or c or t
attatgttggttaggttggttttaaatttttgattttaggtgattggttcgttttagttttataaagtgttgggattataggtgtgagttatcgtatttggtatatttgtagattttaagagtatagtgtgttttaagataatttggttagatttattttaatgtatttatgaagttttagggataaagagagaatttaagtatttagaggtaaaaagtaaattatttatatggaagaaaaaaattaggtttatttttgagttatttttaatatttaatataagaggaataatgtttcgtttatagattttttagggaaagtaagtggaattcgagaatattataaattgagtatgtagattgatagataattagaaaaaaaagaatattataaataatgaagattttatttaaatataaaagtagtaggtatttttaggtatgaaaagatttatgatatatgagttttgagttttttttttttttttttttttttttttttttgcgatagaattttgttttgttttaaggttggagtatagtggtttattgtagtttttgttttttgggtttaattaatttttttattttagttttttgagtagttattattatgggtgtgtattattatatttggttaatttttgtttgttttttgttgcgatgaagttttattatattgtttaggttggttttaaatttttgggtttaagtgatttttttattttggttttttaaagtgttgggattataggagtgagttattatgttaggtttgagttttttttgaaaataaaattttaattagtttgtaattttagtatttgatatggttgagtgtggaagtatatagtttaatatagtgagagttggggtgcgtttagtttagaatatacggtagaggttggttaaaggcggggaagggcgtggtgggaagttttgttcgcggtcgcgttagttgtttttcgggtagggtcgtttttaggtgtttattttcgttatttcgttatggcgggttttggttcgggcgcggtgttggagttttttcggtagttgttgggtcgcgtgcgttttttggtagaggtagcgcggagttttcgcgtcgggcggtcgttgttagtagcgttggttttcgtgtcgcgagaggtgttttataagttttataaggatttagcgggatcgtcgcgcgtgtttttgtcggtgtgggaggtagagggtttggggttgcgtgtgggcgtcgtaggtttagttttcggtatcggtttcgggttttttcgcgtcgttcgcgatagtattgagtttcggcgcggcgtttgcgtgcgtattacgggcgaggagttgtgtaatggttacgggttttgggtgaagttgataaaggtgcgtttttttttgtttaggattcggtaaaagatttttggggttagagaaatttttggttgtttgtttttttttttttgtattgagttggtattgcgttcggcgttttttgttttgggttgggtacgataggcggttgggtagttttttgacggttgtttttattttacgcgtttcggtaggagtagttggtagagtatttgggcgattgcgggttgtaggaaggttggttgttggtgtgtcgttcggcggagggcggagttcgtttggtatttatcgatatttttaattatttttagcggtagtagtagttttttggcgtggattatcggtcggtgtttaggtattgtatttgaaggagcggggttggttgttataaggtcgggttaggagggtttgggaatattttagttatagtttggggtgggtgggatattggagcggaggtagggttaagagtagaaaggggcgggacgtgaagggggtttggagggagattgggagatagagttttgaagaaggttatacggtatggaggtagtgttttgttgatcggtgatgttttttattttattttttattttgtgtttataggtgggaataggtggtggatttgatatatttatatcgttttggatcgagattttagtcggtagaggtatacgtaaaagttgttaaaagttattgtgagtgagttggaatggggtggggaggaagagttttgcgtttgggttaagtttaattaggggtttggggttgtttagttatgtattttcgatatggatttacgagtgcgacgaggatttgatttattttttgtatgattatttgggtaaggaggatgagaatttgggtagcgtgaagtagtatgtggagagtatagacgtttttttttatacggtgggtgttggggttttttttattttaggtaagatatagttatattttttaaggttagatttagaaagaatttttatttgtaggttaggattaaaatagggtttttataggttatatttagtttagttttttattttggacgtttataggattttttatatatttagcggttttttattttatattagttgtttgttagtttaattttattatgttttttttttggtgtttttggtttagagtataagtttagtgtagggagggagggtaattgttgattttacgtttttgtttttttttaggaggagtttaacgtgttttgtttgatagatagtaatgtcgatatttattgggagagcgatgggttttagtgttaatattgggtacggtttattatgaagaagggtattattgttaagtaagtaggttttgggtaggatagggtgggtgggttatgtttttgtgggtttataaagatttatatttatattttgattttttaggaagttgttatttatagtggatattatagatgataattttatgttaaagcgggtggtggtttatgggggtgaaggggataatttgaagaagttgagtgacgtgagtattgacgagtgagtacgttggtttggggagggaagtagggtatgttttaagtttagtttagtttgaaagtttaagtttgagtgagattttagtagtttttgaaggtttgaggtaggaggtatttgaagtgttttatatttatttttttaggatttttatcggggatgtttgtgttttggaggatatgatcgtttatttttcgattatcgagattcgtatcgtggagtgtcgaggtgaggtttaaggttataaggagggaaagagagttcggcgtggagatgggggtaaatagagagtgtgtgtggagagaagaggatgggtttggagttggggtgaaggcgatgttgaattaattttaggatttggagttttggggtttgagttagttgggatatgttaggtataggtttgttttaaagttatataggtggttgggtttatttggaagaggaattgagttgggatttttaggtattttagtattttagtggaagatagaggaattagtaggaatagattaattagaattaggtgatagaaggtgatttcgaaggtttcgagtttttaggggttaacggtgatataaggttgagcgtttaaggagtcggttttaggtttgagggttaaggaggtagtaggtgttgtaaatgattttattttgatttttttttttagatgatgggattgatgttcgttttcgaggggttaagattaagttatttagatagcgggaattagggttgaatgtagatttgttttagttaattagtttggtgcgatatttacgtttagaaggtatcgattttgaagtattgtatcgtagagttgtttttttgtagaggtggttgtggttttggatttatgggtttttttttttttttaatattgagttttgtgtgtttgtatggagaaggtttttaaggttttatagtataagttgtttaagggttagagaagtttttaggttttttttttttttgtttttttatgttggggagttagggggtgtatangtatgttaaattttttagttgtagtttatttatttatgttagatttattaagattttcgatagtgtgttgtattatttggtatttgnttgggattatatattgtgtatttttagtgagattaaggtgagtcganttagttagtgtttgttttggtattttttttttttgtttacgtagttgtttattttttantagagtattgttattatttttatttaagttattattttagttagtttgggttattggtaatagttatttttttggtttttcgggttgttgtttttttttttatttttagcgaatttgttggattttttattttatgggtggtgtgattaaagtgtttgagataatggtttttttttttgttattgataggagttttgagttattagggttgattttgtttgttatttttaattttaaggatattggagattattatttattttaatgtgattgttgatttttgtttttttagttttgtagttttttaaaggttggggttgttttgagtagagttaatttttgtatttattataggtttaggttatagtatggatttggttggataagattgttggtattatgagtgggatttgcgttaagttttcggatatttagattgttagatgagaataaattttttatgttatcgtaagatatatttatagcggagtttttttttgggtttttgttgttgcgtcgttatagtaaattttacggtgaaaaaaggtaggggttttacgggtagtagttagggtagttttggagttgtcgttggagttcgattatgtgatttttaatatggcgacgtttttggttttttatagaaaggggcggagtttggattggggggtaggtttagatttaggttaaattgtggattgagttcgtagttatagatagttgattatggaagcgaatgggttggggtgagttttttagagtacgcggtgtggttagtcgggtttttaatttgagttttttaatttaggattttatttttttatttttttttttttattttggagattttttaatttgaatttcgttagttgggattttgaattttaaaattatggatttttgagatgtttattttagggttttaatttaagggatgttttaggatttttaattaggatttttattttgggattattaattttgatttttttttattttttagtttgggtattttttagtttttgaattagtttagtgatattttcgtttttgaggtttattagttcgaagatttttaaattatttttagtgggtttttattttttttttttagtttttttggttgtttcgagtttggaagagtagagattaagtggagggaagaggttttagggcgggtttttttggagtttgtgtattatttgataggtagagaggaggcggaacgggcggaaagttagggtttgggagttggtttggaggaggtagatagcggttttggattgaatcggttttatgaattcgcgttttttttagtttttagcgtagtatattgatatttatttttatttttatttgatcgttaga

SEQ ID NO: 1878 - DNA, 5460 bp, Artificial Sequence
  chemically treated genomic DNA (Homo sapiens)
  unsure 1369, 1428, 1475, 1562: n is a or g or c or t
tttggcgattaggtgggggtgggggtaggtgttagtatgttacgttggaggttggggaaagcgcgggtttataaggtcgatttagtttaggatcgttatttattttttttaggttagtttttaaattttggtttttcgttcgtttcgttttttttttgtttattaggtggtgtataaattttagaagggttcgttttggggttttttttttttatttagtttttatttttttaagttcgaagtaattagagggattggggggagggaatgaaggtttattaaggatagtttgggggttttcgaattagtgagttttagaaacgggaatgttattgggttggtttaggggttgagaaatatttaggttgggggataaagagggattagagttgatggttttagaatagagattttggttggaaattttgaggtattttttgaattaaggttttgggatgaatattttaaaaatttatggttttaggatttaggattttagttaacggagtttaggttgggaggtttttagggtggggaaaggggagtagagggatagagttttgagttggaagatttaaattagaagttcggttagttatatcgcgtgttttggagaatttattttaatttattcgtttttatggttagttgtttgtaattgcgagtttaatttataatttaatttgaatttgagtttgttttttagtttaggtttcgtttttttttgtagggaattaagagcgtcgttatgttgaagattatatgatcggattttagcgatagttttagggttgttttggttgttgttcgtaggatttttatttttttttatcgtaaagtttgttgtagcgacgtaataataaaggtttaaaagaaaatttcgttgtaaatgtattttacggtgatatgaggaatttgtttttatttgatagtttgggtattcggaggtttggcgtaagttttatttatgatattaatagttttatttagttaggtttatattatagtttggatttatagtaggtgtagaggttagttttgtttaagatagttttagtttttaaggagttataagattggggaaatagaaattagtaattatattaaaatgaataatgatttttagtgtttttgggattaggagtgataaatagaattaattttaatgatttaagatttttgttagtggtaggggaaggggttattgttttaaatattttaattatattatttataggatagggagtttagtagattcgttgggagtgggaggaaaaatagtagttcgaagaattagaaaaatgattgttgttaatgatttaggttagttagaatggtgatttgaatgagggtagtagtagtattttgntaagaaatgaataattacgtgagtaggaagggaaaatgttaagataagtattggttggntcggtttattttaattttattgaaggtgtatagtgtgtggttttagntaggtattaggtggtgtagtatattatcgaggattttgatgaatttggtatgggtagatagattgtagttaaagagtttagtatatntgtatattttttaattttttaatatagagggataggaaaaggaaggatttgggggtttttttgatttttgaatagtttatattatgagattttgggaattttttttatgtagatatataaggtttaatgttgggggaagggaagggtttataggtttaggattatagttatttttgtaggaggatagttttgcggtatagtattttagggtcggtgttttttaggcgtggatatcgtattagattagttggttggaataggtttgtatttaattttagttttcgttgtttagatgatttgattttgatttttcggagacgaatattaattttattatttgggggaaggggttagagtaaggttatttatagtatttgttgtttttttggtttttagatttgggatcggttttttgaacgtttagttttgtgttatcgttagtttttagaaattcgggattttcgggattattttttattatttgattttgattgatttatttttgttgatttttttgttttttattagaatgttgggatgtttgagggttttaatttagttttttttttaggtgagtttaattatttgtatggttttaaggtaggtttatatttggtatgttttagttggtttaggttttaaagttttaaattttggagttagtttagtatcgtttttattttaattttaagtttatttttttttttttatatatattttttgtttgtttttatttttacgtcgggttttttttttttttttatagttttaaattttatttcggtattttacgatgcggatttcgatgatcgggaggtggacggttatgttttttaggatatagatattttcgatgagggttttgaggagatgagtgtgaagtattttagatattttttgttttaggtttttagagattgttggagttttatttaaatttaggtttttaagttgggttaggtttggaatatgttttatttttttttttaggttagcgtgtttattcgttaatgtttacgttatttagtttttttaggttgttttttttatttttatagattattattcgttttggtataaagttgttatttgtggtatttattgtgagtagtagttttttgaagggttagagtgtgaatatgagtttttgtgaatttatagggatatagtttatttattttgttttgtttagagtttatttatttgataatggtgtttttttttatagtaagtcgtatttagtgttggtattgggatttatcgtttttttagtaggtatcggtattgttgtttgttaggtaggatacgttgaattttttttggggaggggtagagacgtgaagttagtagttattttttttttttgtattgggtttgtgttttgggttaggagtattagagagaaagtatagtgaagttgggttaataggtaattggtatgggatagggggtcgttgggtatgtaaggggttttatagacgtttaagatggggagttgaattgagtgtggtttgtggggattttgttttagttttggtttgtaggtgggggttttttttggatttagttttgaggggtgtgattatattttgtttggggtgggaggagttttagtatttatcgtgtaggaggaaacgtttatgttttttatatattgttttacgttatttaggtttttattttttttgtttaggtggttatataagaaatggattaggttttcgtcgtattcgtaggtttatgtcgggggtatatagttaagtaattttaagtttttaattagatttggtttagacgtagagttttttttttttattttattttagtttatttatagtagtttttgatagtttttgcgtatgtttttgtcggttgaggtttcgatttagggcgatgtgagtatgttaggtttattatttgtttttatttgtgggtatagagtagggagtggaatggggaatattatcggttagtaagatattatttttatgtcgtgtagttttttttagggttttattttttagtttttttttaagttttttttacgtttcgtttttttttgtttttaattttgttttcgttttagtattttatttattttaggttgtggttgaagtgtttttaagtttttttggttcggttttatgatagttagtttcgtttttttaagtgtagtatttgagtatcggtcgataatttacgttaaagagttgttgttgtcgttggaggtggttgggagtgtcgatgggtattaggcgggtttcgtttttcgtcgggcggtatattagtagttagtttttttgtagttcgtagtcgtttaggtgttttgttagttgtttttgtcgggacgcgtaggatggggatagtcgttagggaattgtttagtcgtttgtcgtgtttagtttagggtaaagggcgtcgaacgtaatgttaatttaatataggggagaaaaggtaaatagttagaggtttttttggttttaggggttttttatcgggttttgggtagggaagagcgtatttttgttagttttatttagagttcgtggttattgtatagtttttcgttcgtggtgcgtacgtaggcgtcgcgtcggagtttaatgttgtcgcgggcggcgcggaggggttcggagtcggtatcgggggttgggtttgcggcgtttatacgtagttttaggttttttgttttttatatcggtagaagtacgcgcgacggtttcgttgggtttttgtaaagtttgtagagtatttttcgcggtacgaaagttagcgttgttggtagcggtcgttcggcgcggaggtttcgcgttgtttttgttaagaagcgtacgcggtttagtagttgtcggggggattttagtatcgcgttcgggttaggattcgttatggcgaagtggcggaggtgagtatttagaggcgattttgttcggggaatagttggcgcgatcgcggatagagttttttattacgttttttttcgtttttggttagtttttgtcgtatgttttggattaagcgtattttagtttttattgtattggattgtgtatttttatatttaattatattaagtgttaggattataggttggttgaagttttatttttaagaagggtttaggtttggtatggtggtttatttttgtaattttagtattttgggaggttaaggtgggaggattatttgagtttaggggtttgagattagtttgggtaatataatgagattttatcgtaataaaaaataaataaaaattagttaaatgtggtggtgtatatttatagtggtagttatttaggaggttgaggtaggaggattgattgagtttaggaggtagaggttgtagtgagttattgtattttagttttgagatagagtaagattttgtcgtaaaaaaaaaaaaagaaaaaagaaaaggaagggtttagggtttatatgttataagtttttttatgtttgagaatgtttattgtttttatatttgaataaaatttttattgtttataatatttttttttttttggttatttattaatttgtatatttagtttataatattttcgagttttatttgttttttttgaaaagtttgtggacgggatattgttttttttgtattaaatgttgggaataatttagaggtaagtttaattttttttttttatgtaaatgatttgttttttgtttttggatatttgaattttttttttatttttgaagttttataagtatattaggataaatttggttaaattattttagaatatattatatttttaaaatttgtagatgtgttaggtgcggtggtttatatttgtaattttagtattttgtgaggttaaggcgggttaattatttgaggttaggagtttgagattagtttgattaatatggt

SEQ ID NO: 1879 - DNA, 4415 bp, Artificial Sequence
  chemically treated genomic DNA (Homo sapiens)
aaaaggtgatttattgtattattgaaaagatttaattggaaagttttttttataattaatttaatatgattgtatttttttttaattattatattttaagttttagggtatatgtgtataatgtgtaggtttgttatataggtatatatgtgttatgttggtttgttatatttattaatttgttatttatattaggtattttttttaatgttattttttttttagttttttattttaattattattatatattatttatatagtattttattatatttattttaagagattttatatgattagtgttgattgatagttataaaatgatatgaattatttgaaataatattatttgagtatttgtaaatttgttttgagaggttatatatagttgtataaggttttataatttttaggtagaatatttggatttgaagataagattattagattttgagtttagattttttttaaattgttatatatttaattagtagggatttattgagtttttagtatttattggttattatgttaaaagtgttgaagtattaatggtgaataagatatagatatttttggtttttttagagttaataatttggtaattgtttatatatgagttgtatttttagtttttggtatagtatagagtaataagtaaatttttttttttgtgtattaattatttagttattatattgttttatgggtgttttttttttagataaaatatgttttttttttttaatataggagttattatttttttttggatatttttaatttcgttagtattttttttaaggagtggtattttgaattagatatttaggtttttagtatgatttggtgggtgtgtagtgtttagagattgtggttttagaagatttgaaggttgaattattaggagtgtaatttggatttattatagttattttgattttttatggtagtgtttatttttatggttcgtaaaattataagattttttttttgtgaattgtgattaagttagattttttttatattgtatttaaatattggaaatatttaaatgttgatttttaatgtatttttattaaattttatttcgttatttggaatattattatatattttgaggttttttttattttgttttttttatttttaaggttgttttttttagttttgtattattaataggttagataattacgtgttgtattagtttgtttttatacgttgataaagatatatttaaaattaggaagaaaaagaggtttaatggatttatagttttatttggttggggaagttttatagttatggtggaaggtaaggaggagtaagttacgttttatatggatggtggtaggtaaagagagagagtttttgtatggggaattgttttttttaaaatcgttagtttttgtgagatttatttacgattatgagaatagtacgggaaagatttgtttttatgatttagttattttttatagggttttttttataatatatgggaatttaaaatgatattttagtggggataaggttaaattatattatgtgttttatgttattaataaaaaggttaaatcgaataagtttaaagataaaatttagtagtattttatttagataggttagtttaaatttgttaattttatatttgtaattttgattatttattaattttgtaaattttaataaatgttttattttaagttaaatgttgagatgaaaaaatgaaattatatgagttagtaaagtagaaaatataggtatattaattagtaaatgtagaatgataaatgttttattaatatgtatttgttgtagtgaggttatcgaggagggtgtaatttttttaatttgggaggagtaggtaggattttagatgttatttaatttaaagatatagtgagggatttgattaaatatttgttaagattattatgagttaaatgaatagattaggtatttttttaatgttgtaagtttcgaattatatttaaatttagaataatatagtttggttataatgattttaaggattttattggttattgtttttgagttttaaaggaatatattaaaattttataatatttttttgatttattttgaagttaagtagtgaatttatatgatgatgatataaatattgtaaaggatttttgggttatttgtttataagttagtattttttgaattaatttttttgatttttagatatttggtaggtgaagttatatttatatatttttatattttagaatagtatttttaatttatttttttttttttgttttttagtgggagttatattagtatttaagaggagatttagaagtttttttaattaggtagggatagttatagattttagattttagttatggtttttgttatagagtataaatgttatatagtataagtttattgtatatattttattgagtttttgagttttagaatttttttgtagaatttaatagtttttttatgtcgtatttatatattattgttagtatttagaatttttttttttaaatgtataacgtttattattgtattttttgtatttattaagtggaaaattatgtattagatattgtagaagtagatataataatgaataagaattggttttgattatgagaggaattgatgatttaatgggggagatagatttgtacgtgtttaataaaaggaagtggttatttcggtttttttttgatgggtaagtattttgtaaggttttgggttatgtgtgtgtaaggttaagttagttagttaattgggatttttttaaaaaggtattttattggggggaaaaggaatatagagttggttattgtttttttgtttataataaaaatttattatttttaattttttaattgggtttgcggttaaattttatagtttaagagatttgttattttagatggattttatatatttgtatttaagtatgtaaaaaaattttaattatttagtaatttaattaaattattggtaatttttttaaaataaaaaaaaattgttttttttgttttggtagtaattttagttatagttttttattttttatttaagaaaatagttttaaaaagttgatgtttgttgttaaaagaattatttttatgaataaatataaaattaagaagttatggtgttttttttttaaaaaatgatttattaaaagaaataattttttttttttttttgtaagagaaaaaaattaattttttttagaattgtaaatatatttttttgatggagaaaattaatttatatggtatagtcgttatttatttagtttaaaaattagagtagaatttattattttgtttttattttttttttttttatttttttaatttatattggatttagaaagttttattttgtaattagtattgttttttatttttttagtaaagatagttttttggagtcgaagatgaggaaaagtttgtattttatagttttggaagtgtttttttttgttaggatagagagaggagttttagtagtgagagtaattgaaggggttaatagtggaatttggttgggtgtttgttaaatttttttttttggttttgttttgggtttttttttgaagggattttttttcgtttttgtaataagattttttataaagtatagattttttattttatttcgcggtatttgtatcgggttttattggttttaggagttgaatatttttttaggtatatataggtgggatataaataagggttttggaattattatttttttattacgatagtaatttaaaatgtttgggaagatggtcgtgatttttggagttttaaatatattttggataatgtttgtagtttgtaagttatttttttttatttgttttaaatgttagtatttaattttagttttggttttggttttagttagttttgcgatagtagtgaagtaaagatattaggattttaaatagtaggaaaagttaatttagtttaatttttaatatgtaattgagttttgttatatattattgtattgttatagttagagttgaaaattgatgtttttggtatttttttttttaaaggtaattgagtaatttggattttgtttttagtcggtttgtttttttagttttttatatttgataatgaggttaaatttagtaaataataaaatagttttgataaatgggtattaaggttggaattgagaattttttttattgaagatgattttataaatttttttggtagtgatttcggtgttttttggttattttgtagttagtttgaagtagtttaggaaagagattagtttgattatattttagatattatatagagaagaaggaggagaatattagataaattagtggtaaatttgtttttgtttttttttgtttttgtagt

SEQ ID NO: 1880 - DNA, 4415 bp, Artificial Sequence
  chemically treated genomic DNA (Homo sapiens)
gttgtaaaagtaaaaaaagatagaagtaaatttattattagtttgtttagtattttttttttttttttttgtataatgtttaaaatatgattagattgattttttttttaagttgttttaaattaattgtaaggtagttaaaaagtatcgaagttattgttaaaaaagtttatggaattatttttagtagagagaatttttagttttaattttgatgtttatttattaaagttgttttgttatttgttaagtttgattttattgttaagtataggaaattaaagagatagatcgattagagatagaatttaaattatttaattgtttttggaaaaaaagatattaaaaatattaatttttagttttaattatgatagtataatggtatatagtaaaatttaattgtatattaaaagttagattaaattaattttttttattgtttaaaattttagtgtttttattttattattatcgtaaaattgattgaagttaaaattagggttaaaattgaatgttaatatttgaaatagatgaagggaaataatttataagttgtaaatattatttaaagtatatttgaggttttaaggattacgattatttttttaggtattttaagttgttgtcgtgatgagaaaatagtggttttaaaatttttatttgtgttttatttgtgtgtgtttgggagggtatttagtttttgaagttagtgaggttcgatgtagatatcgcggagtgaaatagaaagtttgtgttttataaagggttttgttgtagaggcggagggaaatttttttaaggggaaatttagggtagagttagggaaaaaagtttaatagatatttagttaagttttattattaatttttttagttgtttttattgttgaagtttttttttttgttttggtaaaagaagatatttttaagattataaaatataggtttttttttattttcgattttaaaaggttatttttattggaaagataaaggataatgttgattgtagaatgaagttttttgaatttaatgtgggttaagggggtggggagagaaaaaatggagatagagtagtaaattttattttggtttttgaattggataaataacgattatgttatgtgaattgattttttttattaaggaaatatgtttgtaattttaaaagagattaattttttttttttataagagaaaggaaaaagttattttttttgatgagttattttttaaaaaagggatattataattttttagttttatatttatttataaaaatagtttttttagtaataaatattaattttttgaaattatttttttgagtagaaagtaaaggattgtaattgaaattgttgttaaaataagggaaataatttttttttgttttagaaaagttattaataatttggttaaattgttggataattggaatttttttgtatatttaaatgtaagtgtatggaatttatttgaagtggtaaattttttgggttgtgagatttaatcgtaaatttagttaaaaaattaaaaataataggtttttattataggtaaggggataataattaattttatgttttttttttttttagtgaagtgtttttttaaaaaaattttaattaattaattggtttagttttgtatatatatagtttaaggttttgtaaaatgtttgtttattaaaaagaaatcggaatagttatttttttttattaaatacgtgtaggtttattttttttattggattattagttttttttatggttaggattagtttttgtttattgttgtatttatttttataatatttaatgtatgattttttatttagtggatataaaaaatgtaataataaacgttatatatttggagaagaaaattttaaatattagtaataatatgtaaatacggtatgaaaaaattgttaaattttataagaaaattttaaagtttagagatttaatgggatgtgtataataaatttgtattatataatatttgtattttgtaataaaggttatagttgaggtttggaatttataattgtttttatttggttggagaggtttttggatttttttttggatattgatgtggtttttattaaaagataaggagggaaaaataagttggagatgttgttttagggtgtggggatatataggtatgattttatttattaaatatttagggattagaaaaattgatttaggaaatattagtttataaataagtaatttagaggttttttatagtgtttgtgttattattatgtaaatttattatttaattttagaatagattaaaagggtattatggagttttaatatgtttttttgaggtttaaagataatggttaataggatttttgggattattatgattaagttatgttgttttgagtttggatatgattcgaagtttgtaatattggagaaatgtttaatttatttatttaatttatagtggttttggtaaatgtttgattaagttttttattatatttttgagttggatgatatttgaagttttatttgttttttttaggttgagaggattgtatttttttcggtggttttattataataagtgtatattgatggagtatttattattttgtatttattgattaatatgtttatattttttattttgttaatttatatggttttatttttttattttagtatttagtttaaaataaagtatttattaaaatttgtagaattaatgaatgattagagttgtaagtataaggttaatagatttagattaatttgtttgaataaagtattattgagttttgtttttgaatttgttcggtttaatttttttattagtagtataaagtatataatatggtttggttttgtttttattgaaatattattttgaatttttatgtgttgtgggagggattttgtgggaggtaattgaattatggaggtaaatttttttcgtgttgtttttatgatcgtgagtaagttttataagagttgacggttttaaaaagagtagttttttatatagaagttttttttttttgtttgttattatttatgtaagacgtgatttgtttttttttgttttttattatgattgtgaggtttttttagttaggtggaattataagtttattaaatttttttttttttttggttttgggtatgtttttattagcgtgtgaaaataaattaatatagtacgtgattatttaatttattaataatgtaaaattgggaaagataattttagagatgagagaagtaagataaagaagattttaaggtatgtaataatattttagatgacgaagtaaaatttaataggaatgtattaaaggttagtatttaaatgtttttaatgtttgagtatagtatgggagagatttgatttggttataatttatagaaagaaggttttgtgattttacgaattataaaaatgaatattgttatgagaaattaaaatagttgtgatgagtttaggttgtatttttagtaatttaatttttaagttttttgaggttatagtttttgagtattatatatttattagattatattgggagtttgggtgtttaatttagaatgttattttttaagaaagatgttgacgaaattaagggtgtttagagaaaagtaatagtttttatgttgaagaaaaaggatatattttgtttagagaagaggtatttatgaagtaatgtgataattgaatgattaatgtataggggaaggaatttatttattattttgtgttatattaaaagttaaaagtataatttatatgtaggtaattattagattattagttttagaggaattaagaatgtttatgttttgtttattattagtgttttagtatttttaatatagtaattagtagatattaggagtttagtaaatttttattgattgaatatataataatttaaaggagatttggatttagagtttaatagttttgtttttaagtttaggtattttatttaggaattgtgaaattttgtataattatatgtagttttttagagtagatttataaatgtttagatagtattattttaagtgatttatattattttatgattattaattaatattgattatatgaaattttttaaaataaatatagtaaaatgttatataaatggtatatggtaataattagagtagggggttgggggagggatagtattaggagaaatgtttaatgtaaatgataagttgatgggtgtagtaaattaatatggtatatgtatatttatgtaataaatttgtatattgtgtatatgtattttagaatttaaagtataataattaaaaaaagatataattatattaagttgattgtaaaaaggattttttagttaaatttttttaataatgtaatagattatttttt

SEQ ID NO: 1881 - DNA, 16722 bp, Artificial Sequence
  chemically treated genomic DNA (Homo sapiens)
gttattgaattttagtttgggtgatagagggagattttgttttaaaaaataaaataaaataaaataaataaataaaagaatatttgggaaatgtaaaaagagttaaaggaaaaaattatttatagttttataaatagaaatataatttaataattatgttttaatttataagaattgattaattttggttgggtgtagtggtttatatttgtaattttagtattttgggaggcggaggtcggtagattataaggttaggagtttgagattagtttggttaatatggtgaaattttatttttattaaaaatataaaaattagttgggtatggtgtcgtgtatttgtaattttagttatttgggaggttgaggtagaattgtttgaattaggatttgggaggcggaggttgtagtgagttaagattatgttatcgtattttagtttgggttatagagagagattttattttaaaaaaaaaaaaaaaaaaaaaaaaaagaattgataaatttttataaatattttattaatatttaatatatttttttttaatatttgtttttttgtgtatatatatataaaatttttaaaaattatagttatgatgttggagttttttggaattgttttagattagatttaggatattttatgttttgggatatgtaggagaatattattaattgtgtttattttgggatgttttttgttttgtttttttaagagattattgttgttatttagaatttggaggtttagttgggtttttttttggatgttgagtgttagggtatagtgtggggagtgtggtttgagatttttgattataaatacgttattttgattttttttatttagattttagtttgaggagtttattggaaaatgattggaaagttaggttttatgataatgtaattttataatttaattaattgatgttggttataagtagaatatttttttttttaaaaattaatttatataaatgattattatttttgtttttatgaattttatttttaagttttggtatttagtatagataatgttaagaaattatatagaaatttagggatatttggttttgaaaagagaagagttgggagtgttttattttatgtttttgaaaggggggtggaataggtttatgattttgattataaattggttgttttttattttgataaatatttatagtagaagttttaaggttgtaagttagagataagataaaaattaaaaattttttaaaatgaaatagttttatattggtaatttattttaatattaataatgaaagaaaaattttattttttttggatgttttatattgttttttttgaatggaggagaggaattgagttagtatttggaagaaaataatttaaattggattaggtaaaataggaggtcgttggtttaggtagttggtaagtatagggtgtagttttcggtatggttagatttaggattttatttttgttttttttttatgggtttattttatttttagggagtttttatttttgtagttttaggaatttttatttggttttattggtttatttttgcggggcggggatcgggggcggtgggaggttaggatgtgggggcggagaggcgggggtaggagaggtatatagggttttaattggttagattgggttatgtggttatttttaggaaggttttggagttagggatggagttagttttatgaaagtttgttgattaaaaggagagggaaatagggttattcgtttagagaaaaattgaggttaggattgttttgtttttataaatttttttttttatttattaagatttgattgttttcgttagggatttgttttagttgggttaagtttaagtggggttattgaagtggaatagggaaatttacgtatggtaagaataggggggtatttaaggaataggggtttagagttattttttgtagcggttgttttattttttgttttgtgaaaagttttcgttaatttcgtaatatcgatagggatgttagatttaggtttttttaagggttttgaaagttttcgtatttttttttttgttatatttatttttgggttttttagtttaggtttgtaagagaggatttgattgatttggtttgggttaggggtttaattttgatttaattagttgtggtagatggaatggaggtggggtttagggggtttttttttttttttagggttgtggtgggttaatggattttagtgattatggtatttgtagattttagttgattttgttttttaaaaaattattaatattattttttgagacgggaatttgttttgtggtttaggttggagtgtagtagtgggatgttagtttattgtattttcgaatttttggttttaagttattttatttttttggttttttaaatagttgggattatttatatgtgtttttgagtttggtttagttattgatgagtgtttatttttttttttttttttttttttttggtagagtttcgtttttgttgtttagattggagtgtgatggtgagattttagtttatcgtaattttcgttttttgggtttaagtaatttttttgttttagttttacgagtagttgggattataggtatgtgttattatgttcggttaatttttgtatttttagtagagacggggtttttttatgttggtaaggttggtttcgaattttcgattttaggtgatttagtcgttttagttttttaaagtgttgggattataggagtgagttattgtacggggtcgagtgtttattttttatgtgttttattttaaatttatattaatattttgaagttgaggtttttagaggttagtttttttgtttgggttacgtagttattaagtgagtggttaatttgaaattagtatttaggggagttggcgaaggggtttagggtagtagaggttatgaagaattttttttaagttgttgtttttttttgttttttttttttgggggggggggataatgttattttgttagttaggttggagtatagcggtttaattttagttgattttagttttttttttttaagtttaagcgattttcgtgttttagttttttgagtagttgggattataggcgcgcgttattacgttcgtttagtttttgtatttttagtagagatagggttttgttatgttgtttaggttggtttcgaagttttggttttaagtgatttgtttgtttcggttttttaaagtattaggattataggtttgagttattgtattcggtttagattggttttttaaagcggagttgagaggtggcgttggaggggaggaagtttttcgatatttgtttttagttttaaaattgggttgtatcggtatttgtttttagttttgtggggtttttggagtttcgttttgtttcgttcggtttttttgagtttttgttttttttttgtttattagttttagtgtgcggggtggggattattaggttgggaagtttagagtttttaggtaattcgtgcgtttgggagggttatagaattcgttttatattttttaggattttgaagggggtttttttttatatttttagttattttttttttagtttttatatagggtttaggtaatttgtttgtattttatttttattttgtattagttgtttttttttttagtattttattttattggagtattttttttaattttagtcgttatttttaatttgtcgtttttttttagtagttagttttgattgtttttttcgtagttttagttgtttattgttttagatagtgtcgtagttggttgtgaggagtgttttgattttgtaattcggtattttttttatagggttttagacgttttaagttttttaggacgtttgttgattaaaggcgaaggatgtgtagaattttcgtttatttacgaattaattttcgaaatttgtttcgagtgggtttcgcgcgtaatataggggatatttagtggtgaacgagattattcgtttaggtttagtagcgaggtgatcgtttatttaatatatattaattgggtttcgtaggatacgtttcggttggtcgcgggggttattcggggtgtttttagtcggtcggtcggttataatcggcgtgattttttcgcgtcgagagatttagtagggatttcgtaaaatttaatttacgttttgttttattttgtttttttgttttttaaatgtatggaaattggttgttagtagttttgttataggagaaaatcgttaatttgtagtgtaaaatcggcgtataggggttttttttgagattgtttagacgtcgcgcgggcgggtcggaggcgttagatatattgtattcggagcgcggagttcgggagtaatagtcgtcgtttttattttgtatttgcgtcgttttaggcgtttagtgttcgcgttgggtttgggattgttttcgggggatggggtttacgcgggttttgatggggggtcgggggttattttgtttatttaggcgaggtttgggtttagcgtcggttatattaattttcgggggatttagtagcgcggaggttaagtaggaggtttaggagtttcgcgcgttttttattagcgtagggattttcgggttatagtttagagaatcggaaggtttttttttttttttcgagcgttgttattggggtcgaggtttttagtaagaattcgcgtgtttttgcgtacgtatatacggtgtatacgttagttcggcgttttttcgtgtttcgatttacgtaggttttttcgcgcgttcgtaatacgttcgtaggtttttgtgtttgttgtcggggtagcggggttcggaagggtaagaacgcggttcgttagcgggatggggattttggttcggtttggacgttgtttcgggcggggtttgggggcggagcgcgtcgggtcgggcgcgtaggaggggaggcgggttcgcgtcgtcgtcgttcgcgtcgtttcgtttttggtttagtcgttcgttcggtttcgttttttggttcggttttttgttttcgcgtcgtagttttcgtcgtagtcgttttcgagttcgtcgttatattttttgaggtaggcgtagcggaaaaggatttcggtttttttgcgttttggacggcgggggttaggtttttggggagttgagagggaggcgttgagggaggagcgggcgaggggtttcggtagttcggtcgcggggagggatcgcgagcggtcggcgcgggtttggttggtgagcgggcgggtagagaaggtcgtataggcgggtgtcgaataggtttgggttggggagcgcgaggtcgagggtttagagacgtttgcggttggcggcgagaggcggttcgggtttgcgggcggaagtgtaagggcggtcgcgtggaggttcggcgggtcgcgcgtttaggtgatttttttcggcggcgttttttggttttggattttattagcgtgtattcggcggggattcgttcgtcgtttacgttcgtcggattaggttagcgggcgggtgtcggttacgttgtcgtttcggggatgagtttacgtgacgatcgtggtttcgagtttttaggtttacgcgttttggtcggtttacgttcgtagaagttggcgttcggtatcgttcgtttgtgttagagttttttagagcggaacgcgtcggtcgagagtcgatttaggcggtagaggtcggagttcgggtttgggttgaaggtttggtttcggaaaaggaggttttacggggaaggatgtggtttttttggttttaggagtgattattggttcggtcgtttatttattcgttaaatgcggcggtgtattttggaaattgtttcggagtttgattttggattagaggttcgtagttttagtggtttgtataaggttatatagttgggaagtttttatattttcgtttttttatttataggacgggagtaattgtatttttttttcgatgagttttggggaataataaaatgaattaattagtatgaaatttttagaatagtgtcggtgtggagaagggttaagtagaaattttgatatttttggggttttttgggtgaatttagtttatttttcgtagattattttgttatacgtggcgttgtggaaggggtttaataaatgtagtttttgtttttaaatatttttttattattattgataagtatttgtatattaggtattgagtaatttttagtttaatttatgaaaaattttgtaagtttataaatggatattgttaagttggagtagtaagtttgtatgtggagattttgaatgtaggagtagattttggtttagagttcgtttcgttcggggtttttgtttttttgattagtttttttttttttggggagataggggaaagggtttttttgttgtttaaatttttttattgaggtaggagaaggttagagtagattatcgagggttagtttttattttgtttattttagttttggattaatttagtttttaagggttagattgaggtattgaggttttgtgttattttgtttttagtgtttggggtggtgttgtttggtatatagtaggtgtttgagaagggtttgtgggggtaaatgtatttttgtgttagaatttatttatttttattgatagagttttattattttagtatatggtttatagtaggtgtttattgagtatttgtggaattattgaatgggtatatgaagggttgtaggtttagattatagttttttgattttggattttttttttttttgagatagggttttgttttgttgttaggtttggagcgcggtggtattataacggtttatggtagtttttgttttttgggtttaggtaatttttttattttagttttatagagtatttgggattttaggtatatattattacgtttggttaatttttgtatttttagtagagtcggggttttattatgtttgttaggttgattttaaatttttggttttaagtaatttattcgttttcgttttttaaagtgttgggattatacgcgtgagttattatgttcggttttggatatttttttgagggatatagatattttatttgtggaaaatagttttatttagtagagagttataaatatttaaagaattgtaatagtatgtatagttttttgaaataagtgttttaaatatatcgtttttattttttggttttttaagtttcgagggaaatttgttgaattggtgtttttgggtttgtagggagggtgatatgggtgattgggattttatagaaggtgttgggtttgttatttttttttttatggtgggtggatggatagtttgtgttggggttgttttgagtagggtgtttgtttgtgggtagtggggattattttttgttgattatttagttttatttttgttattttagagtggggttataggtaggggttattcgtagtttagaaagtgggggattatatagggatgaggtgtttgtgggtttttggttttgttgaatattaggtaggtgtggatagtgaattttatgttggggaggtgaagggtatttaatttttatttttattaggaagatgtttttgaagtattgaagtttatttcgtttttgatggaatttttcgtggtgtagtgttttcggtggtagtgattggaagaggcgtatgtgtggttgaggattagtcgaagtttggaggtagttttttttggtgtttagagattttgtagtttgcggttttgggttttttatggagttttgtggtagttattgagaaaagttgattagtgggttttttagttgggtttgggcgtatttttttattttattacgtatttagggggtttgggatgagtgggattttaagttttttatttagaattgtgttggaaagagtattggagagtagtttaggtttataatataggtttggtgagttatagggtcggttttatataggttaagttattgttttgtgttttagtttttttttttttttttttttttttttttttttagatggagttttattttgttgtttaggttggagtgtagtggtgtaatttcggttttttgtaatttttatttttcgggtttaagtaagtttttgttttattttttcgagtagtcgggattataggcgtttgttattatgtttggttaatttttttgtattttttagtagagatggggttttattattttggttaggttggttttgaatttttgattttttgatttattcgtttcggttttttaaagtgcggggattgtaggtgtgagttattgagttcggtcgagtttgtttgttataaaagtatgattgtcgttattatagtgattgttgattgagggtttgtttagtatttttttgggggtttaacgaatgttttgtgatgttgagtttattattttatattttgggagagagatagtgtgtttttattttataggttagtagattcgagtatagagaggtgaggtaatatagtttggtaggagtggagttgggatttaaggtttggtttgaatggtggtgtttttatattgtagttgtattttaagggatttttgtaaggtgttaatagatgtgaatgttttttggaaagttaaaattggtgtttagatgggagatattatttttttatattagttagagtgaatttgtgtatggttgtgtgcgggttaattggtagtggataatggagttatttttattttttgtaaggatagtggtgttgagtgtttattataagggttcgttttttttgggatttggtgggaggtatttttttaggatttgtttagttaaataatgttttattgtggatatgaaggattttggattttgtggtttagggtgattttttgaatatgtttagtagttattattataataaatatataaaatgaaaatttgtgataaaatattgtgtgtattttttgtttattaagcgttagttattgtattaagtgttgtatattaacgagttaatttagtttttatagtgacgttaatttaggttttttttttttatattagagttgaagaaaaaggagtagagaggttgcgatttgtttaaagttatatatttagaaagtggtggggtgggttagaatttaggtttatttgattttcgaggttttttgtttaagtattgtttgttttaattttatttggttaagttaagtagtgaggttttagggaatttgaggtgttttaggttaggtaggagttttaggtatgtttgggatttagattatagtgtattggttgttagcgtaggttatttttttttgataggtgggtgggtaggttgttttgagttagtaattttttgagtttaggagtttagtatggaatttagttgtgttggtggtggtttagttgttagggtgttttaaaatagaagttatttttggaaagttttattgtttattgcgagattgttgtggaagaatggagggagagaatagttgtattgggtacgtagatttgttattagaatatagggttattagtttttgttagtattttggagtttgaattaggaattgtttttttgggttgtttttttttggtaagaaagagaaagtgttggagtgtgtgtgtgtgtatgcgtgtatgtgtgtgagcgagttgttgattgtgttcgtttttatgttggtttttagagttagggttgttttttgttggggaagttgttttttttggtttttagggttaggaagaggtgttgtttttgtgattattggttggtttgatattttttttataggttggtttagttttgttttgataaattatttagaatggtgttggtgaaatagcggggttagagatttttttatagtatttttttttttggtagaattataagatgatggtaatgatgatgatgatggttgtgattgttttgttggttagcgtttttgtagggatttggtgtatatttatatttggtaatttaggagagtttaatgaagatattatttgtaaagttgtggatggggtgttaggtttggtttgttaatattttgaggtttataagagagggagttttttggtaggagttgtggttttgggtagaggaaggtagttattgtttatttgaagtttagtagggagggagattcggggtgagtatttcgattttatttttttttaaattttcgttttttgtaagtattttacgttgaaaggttaagtttaattataagtttatggatagtagtttataatgattagttttgggggtatagagtagggtggaagggaggagaatggatttggaggggtagatagagtatttagtgtagtggattatggttattattgttatttgttgaatatttattttatgttagatatttttgttgttttgtttgttttatttattttttgtaataatttttttaggtttaaggtttttttttttagttgtttttagttgagttttggagatttatggttattttgttttttgtattaattattgtagtagttgttggttttttaggggtgtaaagtttatttgtttgaatttttttattattattatttatttttttttattttttatttaaaagagatagggttttattgtattgtttaggttggtttcgaatttttgtatttaggcgatttttttgttttagttttttaaagtgttgggattagaggcgtgagttattatgtttggtatatgtttgaatttttttgagggagtttttgtagagaagagagtatatttttattaggcgggggtttggtaggtgtttagtgtaggaatcgttttgagttgttgttttttagtggtatttgggggtagttttgtttgttaggtataggttgagaggtagggtaggaggagttttattttttttggtaggttttttttgaataagcgttttcggtgatttttgtgtattttgaagttagggagtttttttttgtttatgatttttggtagggtggttaagttattagtggttatttgggagtgaaatgtgtttcgacggattttgtttgataatttttttattttagtgtagtttaaatttgtttttgtaatttgtatggatattttaggtagttttttggtattgttattgtagtagttttggaacgtgatttgggatataatatagtttaattttaggtatagtggttggtttttaaagtgttgtttttttggagagggagtttttcgttttgttatttaggttggagtgtagtggtacgattttggtttattgtagtttttgtttttgggtttaagtgatttttatgttttagttttttaagtagttgggattataggtatttattattacgttcggttaatttttgtattgaaattttttatttttaaataaattattagtatatataaatagtttaaataatgaagtagaataaaaaatgaaaattcgatttgaagtgtattttttttttaaatttttttttttagaagcgtatttaagttagttttaatttgtagattggtttgtatttttttatatgtttttttatttatttatgaatatagaaagatgtgtaaaaaggtttttttttaattatatggaattataaattttttgattttttttatttaattgtattatagttagttagtttttttttttttttttttttttgtttcgagacggagttttatttttgttgtttaggttggattataatggcgcgattttagtttattataatttttattttttaggttgaggtaatttttttgttttagtttttcgagtagttgggattataggtatgcgttattacgtttggttaatttattttgtatttttaatagagatagggtttttttatgttggttagggtggtttcgaatttttgattttaggtgattcgtttatttcggttttttaaagtgttgggattataggtatgagttattgcgtacggttatcgtagttttatagttagttttttatgttattatatatatttattttatttttttttttttttttttttttttgtgagatagtttcgttttgttatttaggttggagtgtagtggtatgattttggtttattgtaatttttgttttttggtttaagtttgtgttttagttttttaagtagttggtattataggcgtgtattattatatttgggtgattttttttttttattttttttttatttttagtagagacggggttttgttatgttggttaggttgatttggaagttttggtttgaagtgattcgtttattttagttttttaaagtgttgggattataggtatgagttatttattttattttttttgattattatatggtattttttagtttgtaagtatagtattttaatttttatttatttattttttttttgatggatttttaggttgtttttgggttttgtgttataaatattgttgtagtgagtatttttatatatatatttttgagtagtgttttggttgttatagtggggtaggtttttagaagtggaattgttattagggttaatgttgggttaattgttttttaaaaagagtgtatttgtagtatttttttttggcgtgaataagagtgattgttttttatatttttattgatattggatattatttacgtttttgttagattgttggttaagtgagtttttgaaatatagatgtggtagttatttaatagtggtttttggtggtttttagaataaaatttatgtatggtattgaggttagaagtaattagtgtttttgatggtatttggtttttttagtttgagattagttttttttaggtcgaggtgggagtaggtagggagtggaggttattgttagttgagggtttttttaatttttttatttttggtgatgttgtaatagtgagtttgtagagggagtttttattttttggttgtattgtaatgagtttttattgttagattttaagtttttatttttttttttattgttaaataatattttgatgtttattgtttatttatttattaaatatatttatattgaatgtttattatgtgttagggtttagtatttttatatacgtaattttttttatattttggataaatttatgtatgataggttttggggtgttttgaatttaaagaggtgattttgggggtaggtgtatggggtagggtggggtgggggtacggtgagtatagtagttgttattgttatttagttgatgagttaagaaggatgtgtatttttaagatagaggttacgtaagtattatgtagattgtgttgggtgatagatatattattttttttttttgtgtttttagtatgggtcggatttttattttttagttggaatggggtttgtataatttgtttaaggttagttaaggaaaggttgggtaggtagattggtaggttgtggaggggaattagggatttttgtattttggtgtgatttgttggttttttttaaagtttttagtgattgtaggtaggtttgtttagtttggttttgtttatttttttgttttttattaattagtgggaataaagtttttaggttttgttttgaagttattatttaggtagagaggtttgtggttttgatttttttaggacgttttttgatttttgtttgtttagggttagttgttttgtcgatgttagattgttttgttttatgcgtagtttttagaggtttagtttgtgaaggtttttggggggtggatgttgtagagatagttgtgtattagtagttaattgtataggtttcgatttggagtagatttgggtggaaggagtgattgggaggggtgggggttagggtttagtttttaagttagtattttggtagggtgttaagtgaaagtaggttttgttgtcgattttttttttttttagttttcgttttagaaaattaatgtagattattatttttattataaaattgtttttgaaatgggttcgagagttgtgtaaaaatgggtattttgggggtgttgtttgtagttgtaagaaagttgaatttttcggagcggtagagttgtttcgggttttttttagtttcgttagattagtgtagtaggggatgggtcgaagtgtataaaaaggaggggaagttattattatttggtagttgggggtttttagtgaaagggtgagttatttttttgttgttttcggtggtgttattttaggtttaggagtggatttgattttatttagttagtggtttttgtgagttttttttgttaggtgttatgttggggagaatgtttatttgggggtttagaacgggggagattatgttttattgtcggtgtttaaggagatggggaagagagtaagatatagatgagaaagttagtatttagtatgtttatagtgaggtattggatagggatatgttttagtgaattagtaagtttatttgcgtgttgttggtattaattatatggttgtgttgtggaattttatagttttaaaagagtttggtcgtgtcggagtttttagaggttttaggaggggttcggtttgtttttttgagttttgttttttgagtgttttgtttttgggtggtaatttttttagtggttttgtattttaggttgatgtttgttgtgggtggggtgttttttgataggtggttgtgtttgttggattttggggattagcgatgagagagggtatttggggaatatttaatggatgagtgttttgtttttattttgagcggggattagtttagatgtgaaggttgttgtgtttgggaggcgttttttttgtggggttaggggagagtcgtggggaaggttttggtttttaaggtttagggaggttttaggtgatttatagatattattattggattgtttttttttttgtttttttagtttttatttcggttgagtttgtggtttttttgggaggtatagtattgaagaggggtatttggtttattgatggtttgttaattttgtcgggtggagaatgttttgggttcgttattgttatgttttgtgtttgtttggggttatattgttttagtttttaatttagagttgtttttttaggaaggtgttaggtaaagggtattttttgaggttttggtgggtggttttttggtttatttcggggggatgtatttatagggttagtttgggagggaggaataagtggggagaggggagtttttagattggaaagagttagtggcgggtagtgtaaaatggattttttttttttatttttttattttgatattaatgtgggttgatttgtttatggttttagtttgattatgtgtaagaaataatatagtagcgataaaaataggatagagtaaatagttcgttgtttttttgtttgtgttttgatataaaagtgagttgggataaaattaataaagtatttggaaaaagtaaagtaggatttggattataattttataatttaaaattgtagaagtttatattgttttttttataatatatttagtgagtttgtggttttttgtaatgtttttgaagttaaagttttggttaagaatgtaatttttattgatgatatggaagtatattatgttatatgatatgttaggagtatgttatatatgtgtttatttgtgtgaatatatatatatgtaattttagatggtatatatgtagatgaattttgataatttaggtatattgtattttaaaacgaatggaatggtttttttggttgagattaatgattttggggatggagaaggtgtaggagatgaggtttttttatgtatgattttttttttttttgggtagagtatattatgtatagttttagattaggatattaattttgtgtatatagtatatatagtatgttaaagtaaagttttttaggaatgtagtgtggtttttagggtaaagattatttgagttattttttttttttgaatatcgaggtgtttaataaatgtttgttgattgatttagtgatatgtagtaattttaagtagttttttgatggttggttttaaaaataaagttatattggagtttaataaatatttgtttaatgtatttggaggatgtatttgggttttttttatgtgaagagttgttaaattggtttggttttattgtattttttatgagaaatatgaagtgggtttttataaagtttaaaagttttgtgaaaagttgggtttattttggtatatagtaggtattttataaatatttgttgaatgaatgaaattagagttatatggaaaatgatgtttttatgaaaagttttgatttttattcggtatatttaatgttttagtagttgatattttgtaagatgatatgttttattggtaatagttttataatttagtaaagttattggtttatgggaatgtgtttttgatagtttatttattaagtaaatattttttgatttttattttgttttgggtttgggtttagttttggggatgttgaggaggagaggtttaaattgttgattatttgttaataaagatttattgagtgttttaagttttggttataaaatgaaggataagatagtaagggttttttggtttatttgggaggataagttatttggtagttttagtgttaggtgatttttattggttgttaattatatttaataattgttattgatggaaagttaatttttttaattattaatgtatttattttggtgatttttttatt

SEQ ID NO: 1882 - DNA, 16722 bp, Artificial Sequence
  chemically treated genomic DNA (Homo sapiens)
gataaaagaattattagaataaatgtattgataattagggaaattagttttttattaataataattattagatgtaattagtaattaataaaaattatttagtattaagattattaggtagtttatttttttagatgggttaagaagtttttgttgttttgttttttattttgtggttagagtttgagatatttaatgagtttttgttgatagatgattaataatttagattttttttttttagtatttttaggattgagtttaggtttagaatagagtaggagttaggaaatatttgtttaatgaataaattgttaaagatatatttttatgagttagtgattttattgaattgtaggattgttgttaataaaatatattattttataaaatgttagttattaggatattaaatgtatcgaatagaaattagagttttttatgggaatattattttttatgtggttttgattttatttatttaataaatatttatggagtatttattatatgttaggatgggtttaattttttataaaatttttggattttatgggaatttattttatattttttatagagaatatagtaaaattaaattagtttggtagttttttatatggaaaaaatttaaatatattttttaaatatattaaataaatatttattgagttttagtgtaattttatttttaaaattaattattaaaggattatttgggattgttgtatattattaagttaattaataaatatttattaagtatttcggtgtttaaggaaggagagtaatttaaatagtttttgttttaaggattatattgtatttttggaaggttttgttttggtatgttgtatatgttgtgtatataggattaatattttaatttgggattgtatatggtgtgttttgtttaggaggagagggggttatgtatgagaaagttttattttttgtattttttttatttttagaattattagttttaattagaaggattattttattcgttttaaaatatagtatatttaaattattaaaatttatttgtatatatattatttgaagttatatgtatatatatttatataaataaatatatatatgatatgtttttggtatgttatatgatatgatatgtttttatattattaatggaagttgtatttttggttaaagttttaattttaaaggtattgtaggaggttatagatttattgagtatgttgtaaaagaaatagtataaatttttataattttaaattgtgaagttgtgatttaggttttattttattttttttagatgttttgttaattttattttagtttatttttgtgttagagtatagatagaagagtagcgagttgtttattttgttttatttttgtcgttgttgtgttattttttgtatatgattaggttgaaattatggataggttagtttatattagtattagggtagagagatgaggggggaagatttattttatattgttcgttattggttttttttagtttgggggtttttttttttttatttgttttttttttttaaattaattttgtaggtgtattttttcgggatagattaggaaattatttattagaattttaagaaatattttttatttgatatttttttaggagaataattttggattgaaagttgaggtaatgtaattttaggtagatatagaatataatagtaacgggtttagaatattttttattcgatagggttaataaattattagtgaattaagtatttttttttagtgttatgttttttaggggggttataaatttagtcggggtgggggttggggaagtagaaggagaagtagtttagtggtaatatttgtgggttatttaagatttttttggattttaggagttagagttttttttacgatttttttttgattttatagaagagacgttttttagatatagtagtttttatatttggattggttttcgtttaggataaaggtagagtatttatttattaaatgttttttaaatgtttttttttatcgttaatttttaaaatttaataagtatagttatttgttaaaaaatattttatttatagtaaatattagtttgaagtataaggttattaaagagattattatttaaggataaggtatttagagagtagagtttagaagagtagatcggattttttttggggtttttaggagtttcgatacggttaagtttttttggggttgtggggttttataatataattatgtagttggtattagtagtacgtaagtgaatttgttggtttattaaaatatatttttatttaatgttttattgtaaatatattggatgttggtttttttatttgtgttttgtttttttttttatttttttgaatatcgataatgaagtataatttttttcgttttgggtttttaagtaagtattttttttagtatagtatttggtaaggaagatttatagaaattattggttgaatggagttaagtttatttttgggtttgaagtgatattatcgaggatagtaaaaggatgatttatttttttattaaaggtttttaattgttaggtagtggtagtttttttttttttttgtgtatttcggtttattttttgttgtattgatttgacggaattaaggaaggttcgagatagttttgtcgtttcgagaagtttagtttttttatagttatagatagtatttttaaaatgtttatttttatatagttttcgaatttattttagagataattttatgatagaaataataatttgtattaattttttaaggcgaggattggaggaaagaaaagtcggtaataaagtttgtttttatttaatattttgttagggtgttgatttgaaggttgaattttggtttttattttttttagttattttttttatttagatttgttttaaatcggagtttgtatagttagttattgatatatagttgtttttgtagtatttattttttaggggtttttataagttgagtttttagaggttgcgtatgaagtagggtagtttggtatcggtaaagtagttagttttggatagatagaagttagagggcgttttgggggagttagaattataggtttttttgtttgagtgatggttttagggtagagtttgggggttttgtttttattggttggtaggaaatagagggatgggtagggttaggttgagtagatttgtttgtagttattgaagattttgagaaggattagtaagttatattaggatataggagtttttggtttttttttatagtttgttagtttatttatttaatttttttttggttgattttgaataaattatgtaagttttattttagttgaggaatgaaaattcggtttatattggaagtatagaggggaaggatagtgtatttattatttagtatagtttgtataatatttacgtaatttttgttttgggggtatatattttttttggtttattagttgaatggtaatgatagttgttgtgtttatcgtgtttttattttattttattttatatatttatttttaaaattatttttttgaatttaaagtattttagagtttgttatgtataaatttatttaaaatatggaaaaagttacgtatataaagatgttaagttttggtatataataggtatttaatataaatgtgtttgatgagtgaatgagtaatgagtattaaagtattatttagtaatggggaaaaaagtagaaatttggaatttgataataggaatttattataatgtaattaggaagtaagagttttttttgtaggtttattgttgtagtattattaagagtgggggagttggggagatttttaattagtaatgatttttattttttgtttgtttttatttcggtttaaggagagttgattttaggttgaggagattaagtgttattagaagtattggttgtttttgattttaatattatgtatggattttattttaagggttattaagagttattgttgagtgattattatatttgtgttttagaagtttatttaattagtagtttggtaaaaacgtaaataatatttagtgttagtgagggtgtggaaaatagttatttttgtttacgttaagggggagtattataggtatattttttttggagagtaattaatttagtattaattttagtggtaattttatttttaggaatttgttttattgtagtaattaaggtattatttaaagatgtgtatatgaggatgtttattgtagtagtatttgtaatataaaatttagaagtaatttaaaagtttattaaaaggaaaatgaatgaataaaaattaaggtattatatttgtaaattaaggagtattatatggtaattaaaaagaataaggtgggtggtttatgtttgtaattttagtattttgggaggttgaggtgggcggattattttaggttaggatttttagattaatttggttaatatggtaaaatttcgtttttattaaaaataaaaaaaaaataaaaaaaaaaaattatttaggtgtgatggtgtacgtttgtaatgttagttatttgagaggttgaggtataagtttaaattaggaggtagaggttgtagtgagttaagattatgttattgtattttagtttggatgatagagcgagattgttttataaaaaaaaaaaaaaaaaaaaaagaataaggtggatgtatgtggtggtatagaaagttagttatgaagttacgatagtcgtgcgtagtggtttatgtttgtaattttagtattttgggaggtcgaggtgggcgggttatttgaggttaggagttcgagattattttgattaatatggagaaattttgtttttattaaaaatataaaataaattagttaggcgtggtggcgtatgtttgtaattttagttattcgggaggttggggtagaagaattgttttaatttgggaggtggaggttgtggtgagttgagatcgcgttattgtaatttagtttgggtaataagagtaaaatttcgtttcgaaataaaaaaaaaaaaaagaaagaaagttagttagttatgatatagttaaatgaaaaaagttagaaaatttgtaattttatgtaattggaggaaaatttttttatatatttttttatgtttatgaatggatgggaaagtatgtggaaggatataagttaatttgtaaattggggttggtttagatacgtttttggagaaggaggtttagggaaggaatgtattttaaatcgaatttttattttttgttttgttttattatttaagttgtttgtgtatattaataatttgtttaaggataaagaattttaatataaaaattagtcgggcgtggtggtaagtgtttgtaattttagttatttgggaggttgaggtatgagaattatttgaatttaaaggtaaaggttgtagtgagttaagatcgtgttattgtattttagtttgggtgatagagcgagagattttttttttaaaaaaatagtattttaaaagttaattattgtgtttgaaattgagttgtgttgtgttttaaattacgttttaaggttgttgtagtagtaatgttagaaggttatttagagtgtttatatagattgtaagaatagatttaaattatattgagatggaagagttattaggtaaggttcgtcggggtatattttatttttaggtgattattagtggtttggttattttgttagaaattatgagtaggaaagagttttttaattttagggtgtataagaattatcggaggcgtttgtttaagaagagtttgttagaagagatggaattttttttgttttattttttagtttgtgtttaataggtagggttgtttttaggtgttattgagaagtagtagtttagggcggtttttgtattaagtatttattaggttttcgtttggtagaaatatgtttttttttttgtagaggtttttttaaaaggatttaggtatgtgttaggtatggtggtttacgtttttaattttagtattttgggaggttgaggtaggaggatcgtttgaatgtaggagttcgagattagtttgggtaatatagtgagattttgttttttttaaataaaaaataaaaagaaataaatagtaataatagaaggatttaggtagatgagttttgtatttttagagagttaataattattgtaatggttgatatagggagtagggtggttatgggtttttaagatttagttaaaaatagttgggaggaaaggttttaggtttaaggaagttgttataaggaatgagtgaaataggtagaatagtagaagtatttggtatggagtaagtgtttaataaatggtagtaataattataatttattatattggatattttgtttgtttttttagatttattttttttttttttattttgttttgtgtttttagaattgattattatggattgttgtttatgggtttatgattgggtttagttttttaacgtgaggtatttgtagaagacgggagtttagggaagaatgaagtcggggtatttatttcgagtttttttttttgttaggttttagatgggtaatgattatttttttttatttaaggttatagtttttgttaagaagtttttttttttgtaggttttagggtgttaatagattagatttgatattttatttatagttttgtaaatgatgtttttattaaatttttttggattattaagtgtaagtgtgtattagatttttgtaaagacgttaattaatagagtaattataattattattattattattgttattattttatgattttgttaaggaagagagtattatggaaaagtttttggtttcgttgttttattaatattattttaggtggtttgttagggtagaattaggttagtttataggaggggtattagattagttagtgattatagaaatagtatttttttttagttttgaggattaggaaaagtaatttttttagtagaaggtaattttagttttaaaagttaatatgggggcgaatataattagtagttcgtttatatatatgtacgtatgtatatatatatattttagtatttttttttttttgttaggaagaaataatttaggggaatagtttttggtttaagttttaggatgttggtaaaggttgatggttttgtgttttggtagtaggtttgcgtatttaatgtagttgttttttttttttatttttttataatagtttcgtagtgggtagtagagttttttaggggtagtttttattttgaaatattttggtagttgggttattattagtatagttgagttttatgttgagtttttgggtttaagaggttgttgatttagggtagtttgtttatttatttattaaggggagatggtttgcgttggtagttagtatattatggtttggattttaggtatatttggggtttttatttgatttaaggtattttaagttttttggagttttattgtttggtttgattaggtagggttgagatagatagtgtttgggtaggaagtttcgggaattaaatagatttgagttttaatttattttattattttttaggtatgtgattttgggtaagtcgtaatttttttatttttttttttttagttttaatatggagaaagagagtttggattggcgttattgtgaggattgaattagttcgttaatatataatatttggtatagtggttggcgtttggtaagtagggaatatatatagtattttattataagtttttattttgtatatttattataataatggttgttaagtatgtttaaaaggttattttgaattatagggtttagagttttttatgtttataatgaggtattgtttagttgaataggttttgaaagaatgttttttattagattttagggaaaacggatttttataatagatatttagtattattgtttttgtaagaaatagaggtgattttattgtttattgttagttggttcgtatatagttatgtataagtttattttgattggtgtggaaaaataatgttttttatttgaatattaattttgattttttaaaaggtatttatatttgttagtattttgtaagggttttttggagtgtaattgtaatgtgagagtattattatttagattaggttttgaattttaattttatttttgttaggttgtgttattttatttttttgtgttcgagtttgttgatttgtgaaatggaaatatattattttttttttagggtatagggtggtgaatttaatattatagaatattcgttgagtttttagaaaggtgttgagtaagtttttaattagtaattattgtaatgacgataattatatttttatagtagataaattcggtcgggtttagtggtttatatttgtaattttcgtattttaggaggtcgaggcgggtggattaggaggttaggagtttaagattaatttggttaagatggtgaaattttatttttattaaaaaatataaaaaaattagttaggtatggtggtaggcgtttgtaatttcggttattcgagagggtgaggtagagatttgtttgaattcgagaggtagagattgtagggagtcgagattgtattattgtattttagtttgggtaatagagtgagattttatttaaaaaaaaaaaaaaaaaaaaagagagagagaaattgaggtataagatagtgatttgatttgtatgagatcgattttatggtttattagatttgtgttatgggtttaagttattttttagtgttttttttagtatagttttgagtaaagaatttaaagttttatttattttaaattttttgagtacgtggtaaaatggagaaatgcgtttagatttagttgaggagtttattggttaattttttttagtggttattataggattttatggaaaatttaaagtcgtagattatagaatttttgagtattaggaggggttgtttttaagtttcggttggtttttaattatatatgcgttttttttagttattattatcgaagatattatattacgggaaattttattaaaggcgaagtggattttagtgttttaggagtatttttttggtaagggtagaggttggatgttttttatttttttagtatggagtttattgtttatatttgtttagtgtttagtaaggttaggggtttataggtattttatttttgtatggttttttattttttgagttacgaataatttttgtttatagttttattttagaatagtaaaaataaaattaaataattaataaggagtagtttttattatttataggtaggtattttatttaggataattttagtataagttgtttatttatttattatgagggaaggggtaataggtttaatattttttgtagaattttagttatttatgttattttttttgtaagtttagaaatattagtttaataagtttttttcgggatttggaaaattagagaatgaagacgatgtgtttaaagtatttattttaagagattatatatattgttatagttttttaaatatttgtgattttttgttaggtgaggttgttttttataagtgagatgtttgtgttttttaaaaggatgtttaggatcgggtatggtggtttacgcgtgtaattttagtattttgggaggcggaggcgggtggattgtttgaggttaggagtttgagattagtttggtaaatatggtgaaatttcgattttattaaaaatataaaaattagttaggcgtggtggtgtgtgtttgggattttagatattttgtgaggttgaggtgggaggattgtttgaatttaggaaatagaagttgttatgagtcgttatggtgttatcgcgttttagatttggtaatagagtaagattttgttttaaaaaaaaaaaaagtttaggattaaaggattatggtttgggtttgtagttttttatatgtttatttaataattttataaatatttaataagtatttattatgggttatgtattggaatagtaaaattttgttagtaaagatgggtggattttgatataagagtgtatttatttttatagattttttttaagtatttattgtgtgttaggtagtattattttaggtattgaagataaagtagtatagggttttagtgttttagtttgatttttaggagttgagttggtttagagttggggtgggtagaatgaaggttggttttcggtagtttgttttggtttttttttgttttagtggagaagtttaggtaatagaggagtttttttttttatttttttaggagaggggaggttagttaaggggatagggatttcgggcggaacgggttttaaattagggtttgtttttgtatttaagatttttatatgtaaatttattgttttagtttgataatgtttatttgtaaatttataagattttttataaattaagttgaaagttatttaatatttggtatataaatgtttgttaataatagtgaaagaatgtttaaaaataggagttatatttattgaattttttttataacgttacgtgtagtaaaatggtttgcgggggatgggttggatttatttaaaaagttttaagggtgttagggtttttatttagtttttttttatatcggtattgttttaaaggttttatgttaattaatttattttattattttttaaaatttatcgaaggagaggtataattgttttcgttttatagatgagaaaacgaaggtatggggattttttagttgtgtgattttgtataaattattaagattgcgggtttttaatttaaagttaggtttcgaaatagtttttagaatgtatcgtcgtatttggcgaatgaatgaacgatcgaattagtaattatttttaagattaagaaggttatattttttttcgtggggttttttttttcgaggttaaatttttagtttaggttcgagtttcggtttttatcgtttaagtcgattttcggtcggcgcgtttcgttttagaaggttttggtataggcgggcggtgtcgggcgttagtttttgcgggcgtgggtcggttagggcgcgtgggtttggggattcggggttacggtcgttacgtgagtttattttcgaggcggtagcgtggtcggtattcgttcgttggtttggttcggcgagcgtgggcggcgaacgggttttcgtcggatgtacgttggtgggatttagggttagagggcgtcgtcggggaaggttatttagacgcgcggttcgtcgggtttttacgcggtcgtttttgtattttcgttcgtaagttcgggtcgtttttcgtcgttagtcgtaggcgtttttggattttcggtttcgcgttttttagtttagatttgttcggtattcgtttgtgcggttttttttgttcgttcgtttattagttaggttcgcgtcggtcgttcgcgattttttttcgcggtcgggttgtcggggtttttcgttcgttttttttttagcgttttttttttagttttttaggggtttggttttcgtcgtttagggcgtaaggaagtcggggttttttttcgttgcgtttattttagaggatgtggcggcgggttcggaggcggttacggcgggggttgcgacgcggaggtagggagtcgagttagggagcggagtcgagcgagcggttgggttaagggcggggcggcgcggacggcggcggcgcggattcgtttttttttttgcgcgttcggttcggcgcgtttcgtttttaggtttcgttcgggatagcgtttaggtcgggttagggtttttatttcgttagcgagtcgcgtttttattttttcgggtttcgttgtttcggtagtagatataggagtttgcgggcgtgttgcgggcgcgcgggaggatttgcgtgagtcggggtacggggaggcgtcggattgacgtgtgtatcgtgtgtgcgtgcgtagggatacgcgggtttttgttggaaatttcggttttagtggtagcgttcgggaagggggaggaggtttttcgattttttgagttgtggttcggaggtttttgcgttaatggaagacgcgcggggtttttgggttttttgtttggttttcgcgttgttagatttttcgggagttgatgtggtcggcgttggatttaagtttcgtttgggtggataaagtggttttcggttttttattaaagttcgcgtgggttttatttttcgagggtagttttaggtttagcgcggatattgggcgtttggggcggcgtagatatagagtagaggcggcgattgttgttttcgagtttcgcgtttcggatataatgtgtttggcgttttcgattcgttcgcgcggcgtttagataattttagagaaaatttttgtgcgtcgattttgtattatagattagcgatttttttttgtagtaaagttattagtagttaatttttatgtatttgagaggtaaaaagataaaataaaataaaacgtggattgggttttgcgaggtttttgttgggtttttcggcgcgaggagattacgtcggttatggtcggtcggtcgattgagggtatttcgggtaattttcgcgattagtcggggcgtgttttgcgggatttagttagtgtgtgttgagtgaacggttatttcgttgttaggtttaagcgagtggtttcgtttattattgagtgttttttgtgttacgcgcgaggtttattcgaagtaggtttcgagaattaattcgtagatggacgaagattttatatatttttcgtttttgattaataaacgttttggaaggtttgaggcgtttagggttttgtggaggaggtgtcgggttatagaattaggatattttttatagttagttgcgatattatttaaagtagtgggtaattggggttacggaggaggtaattaggattggttgttgggaaaaggcggtagattaaaagtggcgattggagttggaaaaggtgttttagtgggatagggtgttgaggaagagggtagttgatatagagtgggagtggggtgtagataggttatttaggttttgtgtaggggttgggggaggggtgattgggaatgtaaggaagagttttttttaagattttgaggagtgtaggacggattttatgatttttttaggcgtacgagttgtttgggaattttgggttttttagtttggtggtttttatttcgtatattgagattggtgggtagggggaggataagaatttagggaggtcgggcgggataaggcggggttttaggaattttatagggttaggaatagatgtcggtgtaatttagttttgaggttgggagtaaatgtcgaagggtttttttttttttagcgttattttttaatttcgttttaaagaattaatttgggtcgggtgtagtggtttaagtttgtaattttagtattttgggaggtcgagataggtagattatttgaggttaggatttcgagattagtttgggtaatatggtaaaattttgtttttattaaaaatataaaaattagacgggcgtggtggcgcgcgtttgtagttttagttatttaggaggttgaggtacgagaatcgtttgaatttggaaggaggaggttggagttagttgagattgagtcgttgtattttagtttgattgatagagtgatattgttttttttttttaaaaaaaaaaaataaaaaaaaataataatttggaaagagttttttatggtttttgttattttgggttttttcgttagtttttttaggtgttagttttagattaattatttatttagtggttgcgtgatttaggtaagaaggttggtttttaagagttttagttttagagtgttggtgtaagtttaaaatgggatatataaagagtaggtattcggtttcgtgtagtggtttatttttgtaattttagtattttgggaggttgaggcggttggattatttgaggtcgggagttcgagattagttttattaatatggagaaatttcgtttttattaaaaatataaaaattagtcgggtatggtggtatatgtttataattttagttattcgtgaagttaaggtaggagaattgtttgaatttaggaggcggaggttgcggtgagttaagattttattattatattttagtttgggtaataagagcgaaattttgttaaaaaaaaaaaaaaagaaaaaagagtaggtatttattagtaattgggttaggtttagaggtatatgtgggtaattttaattgtttgggaggttaaggaggtaggatggtttgaggttaggagttcgagggtgtagtgagttagtattttattattgtattttagtttggattatagagtaagttttcgttttaagaaatagtattagtaattttttaaaaaataaaattagttgagatttgtaggtgttataattattagaatttattgatttattataattttgagggagaggggaaattttttgagttttatttttattttatttgttatagttgattgggttagggttgggtttttgatttaagttaggttaattagatttttttttgtaaatttgaattgagaaatttagggatgagtatggtagaggggaaaatgcgggagtttttaaggtttttggggagatttgggtttggtatttttgtcggtgttgcgaagttaacgagggttttttatagaatagagaatggagtagtcgttgtagagggtggttttgggtttttgttttttgagtgtttttttgtttttgttatgcgtgggtttttttgttttattttaataattttatttgagtttgatttagttagagtaagtttttggcgaagatagttaaattttggtgggtggagaaggaggtttgtggggataggataattttaattttagtttttttttgggcgaatgattttgtttttttttttttttggttagtaagtttttatggagttgattttatttttgattttaaagtttttttgggagtggttatatggtttagtttgattaattagagttttgtatattttttttgttttcgttttttcgtttttatattttggttttttatcgttttcgattttcgtttcgtagggatggattaatgagattagatgagaatttttggggttataggaataaagattttttgaaaatgaagtaagtttataagagaaaggtagagatgaggttttgaatttagttatgtcggagattatattttgtatttattagttgtttgagttaacggttttttgttttgtttagtttagtttggattgtttttttttagatgttaatttagttttttttttttatttaagaagaataatgtaaaatatttagggaaaatgagattttttttttattgttaatattggaatgggttattaatgtaagattattttattttagggagtttttggtttttgttttatttttaatttatagttttagggtttttattgtagatatttattaaagtggaaagtagttaatttatgattagaattataaatttattttattttttttttaagaatataggatgaaatatttttaatttttttttttttagagttagatgtttttggatttttatgtggttttttagtattgtttgtgttaagtattagagtttgaagatgaagtttatgaaggtagaaatggtagttatttatgtaaattaatttttaaagagaaagatattttgtttgtaattagtattaattaattggattataaagttgtattgttataaaatttaattttttaattattttttagtgaattttttagattagagtttgggtaggaagaattaagatggcgtgtttgtggttaaggattttaggttatattttttatattgtgttttgatatttagtatttagggaaggatttagttgggtttttaggttttgagtgatagtagtaattttttggggaaataggatagaaagtattttaaggtaaatataattgataatatttttttgtatattttaaaatatgaggtgttttagatttaatttaaaataattttaagaagttttaatattatagttatgatttttaagaattttgtatatatatatatagagagataaatattggaaagaaatgtattaagtattaatgaagtatttatgggaatttattaatttttttttttttttttttttttttttttgagatggagtttttttttgtagtttaggttggagtacggtggtatgattttggtttattgtaattttcgttttttaggttttggtttaagtaattttgttttagttttttaagtagttgggattataggtatacgatattatgtttagttaatttttgtatttttagtagagatggggttttattatgttggttaggttggttttaaatttttgattttgtgatttgtcggttttcgttttttaaagtgttgggattataggtgtgagttattgtatttagttagaattgattaatttttataaattgaaatataattattaagttgtgtttttatttatgagattatgagtgatttttttttttggttttttttatattttttaaatatttttttgtttgtttgttttgttttgttttgttttttgagatagagtttttttttgttatttaggttggagtttagtggt

SEQ ID NO: 1883 - DNA, 6412 bp, Artificial Sequence
  chemically treated genomic DNA (Homo sapiens)
gtcggttttggttttggttagtttagaaaggggtttttatagtgtagtcgtatgttggatagttttttaagcgtggttagagtggtggttaaggttaaggaggtgtcgagagtgagcgagggtcgcgagggttgttagtatattgttattttttagaagtataaattaaacgttaataagatattattatatattaattagaatggttaaaatttttttatttttaaagaataaaattttaggttaggcgcggtggtttacgtttgtaattttagtattttgggaggtcgaggtgggcggattataaggttaggagatcgagattattttggttaatacggtgaaatttcgtttttattaaagatacgaaaagttagttgggcgtggtggcgggcgtttgtagttttagttatttgggaggttgaggtaggagaatgatatgaatttcggaggtggaggttgtagtgagtcgagattgtgttattgtattttagtttgggcggtagagcgagattgttttaaaaaaaaaaaaaagaataaaattttaaatttgataatattaattgtagataagaatgtggagtaattggaatagttatatattgttggtgagaatgtaaaatgatataattgttttggggaaataggttagtaattttttatgaagttaaatatgtattttgtgtttgatttagtaattttttaggtgatttttatttaagagaaataaaatttatgtttgtaagaaatttgtatattaatgtatatagtaattttataattgttaaaaattggaaataaattaatattttgtagttggtaagtagatagtatggaatatttttggtaataaaaatgagtaagttattatatattataatttggatgaattttaaatgtattatgttaagtgaaaaaaagttaaatttataaggttatatatgatacgattttgttgtgtgatattttggaaaggtaaaattatagggatataagatagatagattagtgtttgttagggattaatagtggaagtagggtttgattatgaaggagttttgggggtgataagatattttggttttttttttttttttgagatagagtttcgttttgtcgtttaggttggagtgtagtggtacgattttagtttattgtaaaaattggaaacgaagtaaatatggtaatatgttaattatatgtgatattattagtatttgttttattattgtatttgtatattttaattggtcgatatataaataaggtaaaatatattttttttagagaaaatttggaaaagatagaaaaggagatagaataagttattagttgtttttatttatttattgaaacggagtttcgttttgtcgtttaggttggagttcggtggcgttattttcgtttattgtaagttttgtttttcgggtttatgttattttttcgttttagtttttcgagtagttgggattataggcgtttattattatgttcggttaattttgtttttgtatttttagtggagatagggttttattgggttagttaggatggttttgattttttgatttcgtgatttatttgttttggttttataaagtgttgggattataggcgtgagttattgcgttcggtttatcggttgtttttagatattgtattttttatttttttttatatgtttttttgtttaatgaaaagtgtattgtaagaaaaattttgtttgtgtattttaaatttgttttttttgtaatttttttttttttttttttttttttgagatagagtttcgttttgttatttaggttaaagtgtagtgtcgcgattatagtttattgtagttttgatttttttgagtttaggtgattttttagttttagttttttgagtagttgggattataggtgtatttacgttcggttaattttttgtattttttgtagagataggattttattatgtcgtttagtttagtgtcgagttttttagtttaagttattcgtttatttcggttttttaaagtgtcgggattataggtataagttatcgtgtttggttattttttttttttaaatgatttttgaaatattatttgtagttttaaagtttgtatttatttaaataattggttttattttagggatgtaggtatttttgtaatattaaattgttatattttatttcgttagtatgggagtaaaattgaggggatgtttgtatgaattttgtgaattatgatggttttaagttattgtaatttgattaatagaagttttattttggggtttattttatttttattatttatttattttttgagtggagttttattttgttgtttaggttggagtgtagtggtgttatttgggtttattgtaatttttgtttttggggtttaagtgatttttttgttttagtatttcgagtagttgggattataggcgtaggttattatgttggttaattttttgtatttttagtagagatgggattttattatgtcggttaggttggttataaatttttgattttaagtgatttgtttattttggttttttaaagtgttgggattataggtatgagttattgcgtttggtttattttgggatttttttttatagtgtttttatgttgttaatgtagttgggggtttagtattattgttggttatttaattttgttggaggttattaggatatattatttttgtgtagtgagttgttaaggagagttttaggtaaaattatttaggtttatggtgttagtgtttttgtggagatatttaatttttgaggtttatttatattgttatttttttttaaggtattaggtgatgagtttttttgatttagtattttgattattttttttatatttttttttttttttgagatagagtttggttttgttgtttaggttggagtgtagtggtatgattacggtttattgtagttttaattttttaggtttaagtgatttttttgttttagttttttgagtagttgggattataggtgtacgttattatgtttggttaatttttttattttttatagagataggatttcgttatgttgtttaggttggttttaatttttgaatttaagtgatttatttgttttgggtttttaaaatttcgggattataggcgtatagtgttaggtttttatatttttatatatttttttgtttttttagttgtgaaatggagataatgatatagttttaatttacgtgggatgtttagtatagtgtttggtatttgatagatttttttttttttatttgaaatttatttttgagttgggtacggtggtttatatttgtaattttagtatttgggaaaattaaggtaggtagattatttgaggtgaggagtttaagattagtttggtaaatatggtgaaatttcgtttttattaaaagtataaaaattatttgggtgtggtggtatatatttgtaattttagttattttagaggttgaggtacgataattatttgaattcggtagatggaggttgtagttgagttgagattgagttattgtattttagtttgggtgataaagcgagattgtttaaaaaaaaattatttttaatttaatataaaattttttgaatttttttttttttgagttgtttttttatttgagtttattttatattattgaatagttaattatagaattgtgtattattttttttgatttttagatttttagttttttatagtattttgtttttttttgtcgtattagttatagttgtattttttttttttttttttttgagatagagttttattttgttatttaggttgtagtgtagtagtataattttagtttattgtaattttcgtttttcgggtttaagtaatttttttgttttagttttttaagtagttgggattatatgcgcgtattattacgttaggttaatttttgtatttttagtagagacgaggttttattatgttgttaggttggtttagaatttttgattttgtgattagtttattttagttttttaaagtattgggattataggtatgagttattgtattcggttatagttgttattttatttgtgtgattgattatcgtatgacgtttttattgaagtgtagtgaaggtaggaaatatgatcggtttttataatatttttaatatttattattataggtggtatatagtagggttttaataaatatttgtaaaatgaataaagttaatgagtgtttatgtttgtagttttaattgttttgaagtaaatatttgattttttaatttttattagagtgttttgtatatagtaggtttaattatttttttttttttattaattatttatgttttgtaagaatttagttagttgattttttgtattttataagcgtgatgattgggtgttttcgtgtgagatgcgttattttcgaattttgttacgacgtcggtatattgcgcgtttgatatgaagaaaaaaaaaatttagttagtttattaggtatagtggttaaggtttgtaatttttgtattttgagaggttaaggtaggaggattatttgaatttaggagttcgagattagtttaggtaatatagcgagatttcgttttaaataataaataaaaataattagtcgggtatggtggtgcgcgtttatagtattaattattcgggaggttgaggcgagacgatcgtttgagttagggaggttaaggttgtagtgagttaagttcgcgttattgtattttagttcgggcgatagagtgagattttgttttaaaaaaaaaaaaaatattaaattttagaggggcgaaaaaaaattttatagtggaaatatagtaacgagttggtttagtttcgttttcgttataacggtttacggtgttggaggatttttttgcgtacgcgtatagttttcggtcggttattttcgcgagcgcgttttattttttatcgagcgcgcgcgaagattacggaggtcgattcgggagcgcgtacgtagtttcgtttcgcgttcgattcgcggatttcgcggcgttcggttcgggtggtttggatcgcggagggaatgtttcggagggcggagaattgggacgaggtcgaggtaggcgcggaggaggtaggcgtcgaagagtacggttttgaagaagacggcggggaggagtcgggcgtcgaggagttcggttcggaagagttcggttcggaggaattgggcgtcgaggaggagatggaggtcgggcggtcgcggttcgtgttgcgttcggtgaattcgcgcgagtttttttaggttattttttgtaatcgtagttcgcgcgtcgtgttgttcgtatggtttaatttcgacggcgagtcgtagttttatttaacgttgtcgtttggtacgggtcgtcgtatttatagttatcgaggtacgggttcggcgtttaggttcgatttagtagggacgatagtacggtttgaagtttttttatcgtttcggggtttattttgtagacggggaattgaggttttttgaggtaggatatatttagggtgacgttgttcgtaagcgttagagtatttttttttttttttttttttttttgagacggagtttcgttttgtcgtttaggttggagtgtagtggcgcgatttcgatttattgtagttttcgtttttcgggtttaagcgatttttttgttttagttttttgagtagttgggattataggcgtgcgttatcgcgttcggttgatttttatatttttagtagagacggggttttattatgttggttaggttggtttcgaattgttgatttcgtgattcgttcgtttcggttttttaaagtgttgggtttatgggtatgagttttcgcgttcggtttagagtattttttataaggtcgaatagtttgtatttgaaggtggttttttttagttttttattttacgtgtattttttttttaaagaaaagttgtatttttaatattttatttgtttagtttttatgattttagtgggttagttttgcgtagtttttgttttcgtggagaatatattttttttggggagattgatagatgtaaagataggaataagttagggttatgttggcgtcggaagagtcgatcgtgtgtggcgtgggaaattgatttatttgtttgttgggagatggaggggttgcggttgtgtggttttagttaaggagtatttttcggagaaggaagagagtaggatggagtaggaattagttaattttaggtaagaggttttagatatgcgtgcgttgagatttggagttttgggagaggatgtttaaaaggtgattttatttttaggaatatgggggtattgaaatttttttttttttttgagacgggagttttgttttgtaagttggagtgtagtggtttacgttagaatgtag

SEQ ID NO: 1884 - DNA, 6412 bp, Artificial Sequence
  chemically treated genomic DNA (Homo sapiens)
ttgtattttagcgtgggttattgtattttagtttgtagagtaagattttcgttttaaaaaaaaaaaaaaattttagtgtttttatatttttaggggtaaaattattttttaagtatttttttttaagattttaggttttaacgtacgtatgtttagaattttttatttagggttggttagtttttattttattttgttttttttttttttcgggaagtgttttttaattgaaattatataatcgtaatttttttattttttagtaggtaggtaagttaattttttacgttatatacggtcggttttttcggcgttaatatgattttggtttgtttttgtttttgtatttgttagtttttttaggaggaatgtgttttttacgagggtagggattacgtagaattggtttattggagttatgaggattgaatagatggggtgttaaggatgtagtttttttttgaggggaaaatatacgtggggtgggggattggggggagttatttttaaatgtaaattattcggttttataaagaatgttttgggtcgggcgcggaggtttatgtttataagtttagtattttgggaggtcgaggcgggcggattacgaggttagtagttcgagattagtttgattaatatggtgaaatttcgtttttattaaaaatataaaaattagtcgggcgcggtggcgtacgtttgtaattttagttatttaggaggttgaggtaggagaatcgtttgaattcgggaggcggaggttgtagtgagtcgagatcgcgttattgtattttagtttgggcgatagagcgagatttcgttttagaaaaaaaaaaaaaaaaaaaagaatgttttgacgtttacgagtagcgttattttggatgtgttttgttttaaggggttttagtttttcgtttgtaaaatggatttcggggcggtagaggggttttagatcgtgttatcgtttttgttgggtcgggtttaagcgtcgggttcgtatttcggtagttgtggatgcggcggttcgtgttaggcggtagcgttgggtagggttgcggttcgtcgtcgaagttgagttatacgggtagtacgacgcgcggattgcgattgtagaagatgatttgggagggttcgcgcgagtttatcgagcgtagtacgggtcgcggtcgttcggtttttatttttttttcggcgtttagttttttcgggtcggattttttcgggtcggatttttcggcgttcgattttttttcgtcgttttttttagggtcgtatttttcgacgtttgtttttttcgcgtttatttcggtttcgttttagtttttcgtttttcggggtatttttttcgcgatttagattattcgggtcggacgtcgcgggattcgcgggtcggacgcggggcggagttgcgtgcgcgttttcgagtcgattttcgtagttttcgcgcgcgttcggtagaggatggaacgcgttcgcggaaatagtcggtcggaggttgtgcgcgtgcgtagaaggattttttagtatcgtaggtcgttgtaacggaggcgaggttaggttaattcgttattgtatttttattataaaattttttttcgtttttttaaggtttggtgttttttttttttttgagatagggttttattttgtcgttcgggttggagtgtagtggcgcgagtttggtttattgtagttttgatttttttggtttaagcgatcgtttcgttttagtttttcgagtagttggtattgtaggcgcgtattattatgttcgattaattatttttatttgttgtttgaaacggagtttcgttatgttgtttaggttggtttcgaatttttgggtttaagtgatttttttgttttggttttttaaagtgtagggattataggttttagttattgtgtttggtggattaattgaattttttttttttttatgttagacgcgtaatgtgtcgacgtcgtaataaggttcgagggtggcgtattttatacgggaatatttaattattacgtttataaagtataaaaagttaattaattgaatttttataaggtatgggtgattagtaaagagggaaaaataattagatttattatgtgtagagtattttggtggaaattggaaaattagatatttattttagagtaattaaaattataaatataaatatttattaattttgtttattttataaatatttattaaggttttattatgtattatttatggtgataagtgttgaaaatattgtaaaaatcggttatgttttttgtttttattgtattttaataaaagcgttatacggtaattaattatataaataaaatagtaattatggtcgggtgtagtggtttatgtttgtaattttagtattttgggaggttgaagtgggttgattataaggttaggagttttagattagtttgataatatggtgaaatttcgtttttattaaaaatataaaaattagtttggcgtggtggtgcgcgtatgtaattttagttatttaggaggttgaggtaggagaattgtttgaattcgggaggcggaggttgtagtgagttgagattgtgttattgtattgtagtttgggtgatagaatgagattttgttttaaaaaaaaaaaaaaaaaaagtgtaattgtgattagtacgataaaaagagatagggtattatagaaggttaaagatttgggggttaaggaagatggtatataattttgtgattaattgtttaatgatgtgggatggatttaagtggagaagtagtttagaaaaagaagggtttagagagttttatattaggttaaaaataatttttttttagatagtttcgttttattatttaggttggagtgtagtggtttagttttagtttagttgtaatttttatttgtcgagtttaagtgattatcgtgttttagtttttggagtagttgggattataggtgtgtgttattatatttaggtaatttttgtatttttagtagagacggggttttattatgtttgttaggttggttttgaattttttattttaggtaatttgtttgttttggtttttttaagtgttgggattataggtgtgagttatcgtgtttagtttaaaaataaattttaagtagaaagaaaaaaatttattaagtgttagatattgtgttaagtattttacgtgaattaaggttatgttattatttttattttatagttaaggaaatagaagggtatataagaatgtgaaggtttagtattatacgtttgtaatttcgagattttgggagtttaaggtaggtggattatttgagtttaggagttggaattagtttgggtaatatagcgaggttttgtttttataaaaaatgaaagaattagttaggtatagtggcgtgtatttgtagttttagttatttaggaggttgaagtaggaggattatttgagtttgggaggttgaggttgtagtaagtcgtgattatgttattgtattttagtttgggtaatagagttagattttgttttagaaaaaaaaaaaaatgtgaaaagggtagttaaaatgttggattagagaggtttattatttgatgttttaggagaaaatgatagtatgagtgaattttaggagttggatatttttataaaagtattgatattatgaatttaagtaattttgtttagggttttttttgatagtttattgtatagagatggtgtattttggtggtttttagtaggattaagtgattagtagtgatgttggatttttagttatattaataatatgaaaatattgtagagaaaaattttaaagtaggttagacgtagtggtttatgtttgtaattttagtattttgggaggttaaggtgagtagattatttgaggttaggagtttgtgattagtttggtcgatatggtgaaattttatttttattaaaaatataaaaaattagttagtatggtggtttgcgtttgtaattttagttattcgggatgttgaggtaggagaattatttaaattttagaggtagaggttgtagtgagtttagatagtattattgtattttagtttgggtaatagagtgagattttatttaaaaaataaataaataataaaaataagataaattttaaagtaggatttttgttaattaaattataatggtttagagttattataatttataagatttatgtaaatatttttttagttttatttttatgttagcgaggtgaaatataatagtttaatattatagaaatgtttatatttttaaaatgaaattagttgtttagataaatgtaggttttgagattgtaaataatgttttaaagattatttaagaggaaggggtggttaagtacggtggtttgtgtttgtaatttcggtattttgggaggtcgaggtgggcggataatttgagttgaggagttcgatattaggttgggcgatatgatgaaattttgtttttataaaaaatataaaaaattagtcgggcgtgggtgtatttgtagttttagttgtttaggaggttgaggttggaggattatttgagtttaggaaggttaaggttgtagtgaattgtgatcgcgatattgtattttagtttgggtaatagagcgagattttgttttaaaaaagaaaaaagaaaagaaaaagttgtaaaggaaataagtttagaatatataggtaaaattttttttatagtatattttttattaggtaaaaagatatgtagaaaagaataaaaaatataatgtttaaagataatcggtgggtcgggcgtagtggtttacgtttgtaattttagtattttgtgaggttaaagtaagtggattacgaggttaagagattaagattattttggttaatttagtgaaattttgtttttattaaaaatataaaaataaaattagtcgggtatggtggtgggcgtttgtagttttagttattcgggaggttgaggcgggagaatggtatgaattcgagaggtagagtttgtagtaagcggagatggcgttatcggattttagtttgggcgatagagcgagatttcgttttaataaataaataaagataattggtgatttgttttatttttttttttgttttttttaaattttttttaagggggatatattttgttttgtttgtatgtcgattaattaaaatatataagtataataataaagtaaatattgataatgttatatgtaattagtatgttgttatatttatttcgtttttagtttttgtaatgagttgagatcgtgttattgtattttagtttgggcgataaagcgagattttgttttaagaaaaaaaaaaaaattagagtattttgttatttttaaaatttttttatggttaaattttgtttttattgttaatttttggtaagtattggtttgtttgttttgtgtttttatagttttgtttttttagaatgttatataataaaatcgtattatatgtagttttatgagtttggtttttttttatttagtataatgtatttgagatttatttaagttgtagtatataataatttatttatttttattgttaagggtattttatattatttatttattaattgtaagatattggtttgtttttagtttttagtaattataaagttgttatatatattagtgtataggttttttgtaaatataagttttgttttttttgggtgagaattatttaggagattgttaggttaaatataaagtatatgtttaattttatgagaaattgttaatttgtttttttagagtagttgtattattttgtatttttattagtaatgtatgattgttttagttgttttatatttttgtttatagttggtattattagatttgaggttttgtttttttttttttttttgagatagtttcgttttgtcgtttaggttggagtatagtggtataatttcggtttattgtaatttttattttcggggtttatgttatttttttgttttagttttttaagtagttggggttataggcgttcgttattacgtttagttaatttttcgtatttttagtagagacggggttttatcgtgttagttaggatggtttcgattttttgattttgtgattcgtttatttcggttttttaaagtgttgggattataagcgtgagttatcgcgtttggtttggggttttgttttttaaaaataaaaaaattttagttattttaattgatgtatagtggtattttattgacgtttaatttgtatttttgagaggtgataatgtgttggtagttttcgcggttttcgtttattttcggtatttttttggttttggttattattttggttacgtttgaggagttgtttagtatgcggttgtattgtgggagtttttttttgggttggttaaggttagagtcggt

SEQ ID NO: 1885 - DNA, 5133 bp, Artificial Sequence
  chemically treated genomic DNA (Homo sapiens)
aaatttttgaggaatgtcgggtttaggggagttagttttttgtttagttgaaaatttgtttggttatgtataaattttgatttttttaaaatttaattattaatagtttgttgttgattcgaagttttattgatgatattaatagttaattaatatatattttgaattttatacgtattatgtattgtatgtatttttttttttttgagatggagttttattttgtggttttggttggagtgtagtggtattatttttgtttattgtaattttttagatttaagtgatttttttgttttagttttttaagtagttgggattataggtatgtgttattaagtttggttaatttttgtatttttagtagagatggggttttattatgttggttaggttagttttaaatttttgattttaagtgatttatttgtttcggttttttaaagtgttgggattataggcgtgagttattgtattttttttgtattgtatttttataataaagtaagttagagaaaagaaaacgttattaagataattttaaggaagataaaatttatttattatttattaggtagaaatagatggattattttataggaggaggaggaagaggagggggttggttttatagttttaggggcgaaagaggtataagaaaatttgtaaataagtggatttacgaagtttaaatttttgttgtttatagttagtggtatataggagatattaggtaagttaaaggttgggttgggtatggtggtttatatttgtaattttagtattgtgggaggttaaggcgggaggatcgtttgaggttaggagtttgagattagtttggttaatatggtgaaatgttgtttttattaaaaatataaaaagtagttgggtattgtggtatgtgtttgtaattttagttatttgggaggttgaggtataagaattatttgaatttggaaggtagaggttgtagtgagttaaaatagtgttattttattttagtttgggtgatagagtgagattgttttaaaaaaaaataaataaattaaaaagattagttaaaggttgaatttttagtgatgaattaaatagaaataattttatagagattgtggataggagaagaaataagtataggtgtagttaaaattcgtgataaatgtttcggtagaaataagtgttaggttaggcgtgatggtttatgtttgtaattttaatattgtgggaggttaagataggaggattgtttgaggtcgggggttttaagtttgtagtgagttatgattatattattgtttttttgtttgggcggtagagattttgtttaaggaaaaaaaaaagaaaggttgggcgtcgtggtttacgtttgtaattttagtattttgggaggtcgaggtgggcggattacgaggttaggagatcgagacgattttggttaatatagtgaaatttcgtttttattaaaaatataaaaaaaattagtagggcgcggtggtaggcgtttgtagttttagttattcgggaggttgaagtaggagaatggcgtgaatttgggaggtggagtttgtagtgagttgagattgcgttattgtattttagtttcggcgatagagtaagattttgttttaaaaaacgaataaataaaaaaataaaataaaataaaataaaaatttaaattaaaattaaaacgtagtatagtttatgagagaggaagagtagggtaggtttatttatttggggttgtcggggaggttgtttaggaagggattttgaagtgagtatttggaggaaggaggttagttttgagggattggaatttattttggtattgggattacgggtaaaggttttgtggtgataaggagattggtgcgagtttggtttagtattatgtgagagtagaggggtggaaaggtattaggtaagtatgttttcggatgtgaaatgagggagacggggattgggggattttgatatgagggaggaggaaaggagatgggaagaatgggtgattagagggattattagattatcgagggtgagagtttgttaatattagagttatgtgtaggagaatgaagtgtaattttggatagatttttagtgtaggtggtttagttattaatgattataattatatgtatgattgtaggtggaattagaagaattatttaggtaatttatagaattggggaattaattaagttttgttttaaatgattatattacgggtggtttgttacgtagtagtggatcgttgaaatagtttaaaatatttatttagtcgggcgtgcggtgggtagtttatatttgtaattttagtattttaggaagttgaggtaggaggatttttcgaacgtaggaatttgagattagttttgagtaaaatggtaagattttgtttttataaaaagtaaaaaaaattagttgggtgtggtagtatgtgtttgtagttttagttatttgggaggttgggataggagaattgtttgagtttaggagttcggaggttgtagtgagttgtgattgtatcgttatattttagtttggataatagagtgaaattttgtttttaaaaaaaaaaaaaaaatttataaattaggtaggagtattgaatagtttttgttttttttgagatttttgtagattttgaggtttgttatagagtttattaatttttttttggtttagaattatttaaaaagagttgagtgtagttagaaaggattgaatatatggtgttttttaattttattaaattgttgtgttttgtagatgatttttgagtttaggtgttggtgggttgaggataaggttgagggaatagaggtgggaatagtggtttaggattaggagaatgtagagtttagagtgtatgatttgtatttaattttagatgttttaggggtttgagattatttttagtagggtttggaaggtttagttattttttagtacgtatagttattattggatattattttgttttgtgagtgatgtaaaggttttgggttagtgaagtttgtgaaataaagttgggattagagtgtttttacggttgagggttgggtttatttgttttttaagtataattgtaagagtaaatagaaatatttattttttttgagtttaaaaggattaaaaagttttgatagtgttagtggtagggttagtttaggggttgtagtagtgttggtgtttataggtggaatttttttttgttttgatttttaaggattggtgttttcggaggggtttgggaggtatattttttttttataaatacgtgtataatatatgaatgagttattggatgagggaataaatgaatgaatgagtgaaaaaagtttttttttttttttttaggagttagtaattattggttagttttttattgtttattagtttgtgtagaggagggaggagtaataggttatagatgtggttgtagttgttattggatagagtggttaagatattttgtgtttgtagaggttttttttagtttttatttggatagtggagttgttggttagagaggtagtgggaagaagggtggggtttttagagtcgatttagcgggttgaaattggtgtagtttgcgttttattaggtagagaatggatgtggggtagtttgatatcgagtaggggtttatttgagttttaggggtggttgttttattaaagtgtttgtaagtaaatagttttagtgtatatttagttgtttagtgttatttcgtgtatttagggttattttagttttgattataggtttgtataggttttaggggaggagatattttagttttttgagggagggtgagtatgtgggattagagattttaagtttaaatttttttttaatttttttttaaattttgtaggtagtatgtaaatatatatttaatgtattatttttatttttatttatttttttgaggtagggtttttttttgttggttaggttggagggtagtggcgagattttggtttgttgtagttttaatttaattttttaagtttaagtgatttttttattttagttttttaagtagttgggattgtaggtgtttgttcgttatgattagttaatttttaaattttttttgtagagatggggttttgttatgttgtttaggttagattcgaatttttgagtttaagtgatttttttattttggttttttaaagtgttgggattataggtgtgagatattgtattcggtttttaaattttttttttttataaggatattagttgtattgatcggggttttatttttatgattttatttaatttttattaattttttaaaggttttatttttaaatataggtatattgggggttagggttttaatttatggatttgggggatgtaatttagtttattatagtgttaagttgtatttgttcggtgagttagaataggggtggggaaggtattaggttttggtgttttttttttatgtttgagttattttatttggttttaggagggagaggagtatgggttgaaggtagtgttgtaatatggaaggggtagaatattttaattcgttttgggtttttagtgttttttgttgtataaagtaggtgtttttatttttcgaggatgtgttttttttttttggtttattaagtatttaaatgtagatagaaaatttatttatttggggtgcggtttttttagggggaagttgaggttacgatttttgaggtattttaatttaaaggtttttagggtattggttttagagtttttagtaggtgttttttttttgaatgtttttatatggtaagattagagttataaatgttgtttcgatattgtttcggtaatcgacgttgtagatttaagaaagtttgggatggtagtggttaggaacggggtgtgttacggttttattttttagagtagggaggaggatgttgggttagtttttggggattttaggtatcgtggttataggagttagagttttgtatgtttgtattatgttttgggtttttgttttgtttatgttgtttgtttattgtataggtgagggaatttttagattttaaagatttttgtttttttttttattttgttttgtttttacggtttatatgtatttgtgttattagg

SEQ ID NO: 1886 - DNA, 5133 bp, Artificial Sequence
  chemically treated genomic DNA (Homo sapiens)
tttggtgatatagatgtatgtgggtcgtgggggtagggtaggatgaaggaaggggtaggagtttttgggatttgggggtttttttatttgtgtagtagataaatagtatgagtaggataggagtttaggatatggtgtagatatgtagagttttgatttttgtggttacggtgtttggggtttttaagggttggtttagtatttttttttttgttttgagaggtggggtcgtggtatatttcgtttttggttattattattttagatttttttgggtttgtaacgtcggttatcggaatagtgtcggggtagtatttgtggttttgattttgttatatggaagtatttagggaggaagtatttgttggagattttggggttagtgttttggaggtttttgggttaaggtattttaggggtcgtgattttaatttttttttgaggaaatcgtattttagataaataaattttttgtttatatttaaatgtttggtgagttaggaagggaggatatattttcggggggtgaaaatatttgttttgtatagtagaagatattgggggtttagagcgggttgggatgttttgttttttttatgttgtagtattgtttttagtttatgttttttttttttttagaattaagtagagtgatttaggtatgggaaagaagtattagggtttggtgttttttttatttttgttttggtttatcgagtaggtgtagtttggtattgtgatagattgaattgtattttttaaatttataggttgaagttttaatttttagtgtgtttgtatttggagatagggtttttaaggagttaatgaaggttagatgaggttatagaggtggggtttcggttagtataattggtgtttttataaaaaggggaaatttgggagtcggatgtagtgttttatatttataattttagtattttgggaggttaaggtgggaggattatttgagtttaggagttcgagtttagtttgagtaatatggtaaaattttatttttataaaaaaaatttaaaaattagttggttatggcggataggtatttgtagttttaattatttgggaggttgaggtgggaaaattatttgagtttgggaggttgagttgaggttgtagtaagttaagatttcgttattgttttttagtttggttaatagagggagattttgttttaaaaaaataaatgagaataaaaataatatattaaatgtatgtttgtatattatttgtaagatttaaaaaaaaattaaggggaaatttggatttaaagtttttgattttatatgtttatttttttttaaaaagttggagtgtttttttttttggaatttgtgtaggtttgtgattaaggttgaagtggttttgggtgtacgaggtggtattgagtagttgggtgtgtattgggattgtttatttgtaaatattttgatagagtaattatttttgaggtttagatgagtttttgttcggtgttaagttgttttatatttattttttgtttggtgaggcgtagattgtattagttttagttcgttgggtcgattttgggagttttatttttttttttattgtttttttggttaatagttttattgtttaggtgagggttggggagggtttttgtagatataggatgttttgattattttgtttagtaatagttgtaattatatttatgatttgttgttttttttttttttgtataggttggtgggtagtggggaattaattagtgattgttaatttttggagaggagaaaggaagttttttttatttatttatttatttatttttttatttagtagtttatttatgtgttgtgtacgtatttgtgaaagagaaatatattttttagattttttcgagagtattagtttttgggaattagggtaggagaaggttttatttgtgggtattagtattattgtagtttttgaattagttttattattgatattgttagagttttttgatttttttaagtttagagaggataggtgtttttatttgtttttataattatatttagagagtaaataagtttagtttttaatcgtagagatattttggttttaattttgttttataggttttattgatttaggatttttgtattatttatagagtaagatagtatttagtggtgattgtgcgtgttggggaatgattgggttttttagattttgttggagatggttttagatttttggagtatttagagttagatgtaggttatgtattttgaattttgtatttttttggttttgggttattgtttttatttttgtttttttagttttgtttttaatttattaatatttggatttagggattatttgtagggtatagtagtttgatgggattgaagaatattatgtatttagttttttttggttgtatttaattttttttagataattttagattaagagaaggttggtgagttttgtaatagattttaaggtttataagggttttaggggagataggagttatttagtgtttttgtttggtttgtagattttttttttttttttagagataaggttttattttgttgtttaggttggagtgtagcggtgtagttatagtttattgtagttttcgaatttttgggtttaaataatttttttgttttagttttttaagtagttgggattataagtatatgttattatatttagttaattttttttattttttgtggagatagggttttgttattttgtttaaggttggttttaaatttttgcgttcgagagatttttttgttttagttttttaaaatgttgggattataggtgtgagttatttatcgtacgttcggttgaatagatattttaaattgttttagcgatttattgttacgtggtaaattattcgtaatgtagttatttaaaataagatttgattagttttttagttttgtgagttgtttgggtggtttttttggttttatttataattatgtatgtggttatggttattgatggttggattatttgtattggaggtttatttaagattgtattttatttttttatatatggttttgatattagtaagtttttattttcggtggtttagtggtttttttggttatttattttttttatttttttttttttttttttatgttagggttttttagttttcgttttttttattttatattcgaaggtatgtttatttagtgtttttttatttttttgtttttatatggtgttaagttaggttcgtattagtttttttgttattataggatttttgttcgtgattttaatgttaggatgaattttagttttttagaattaattttttttttttaggtgtttattttagagtttttttttgggtagttttttcgatagttttaggtgagtaggtttgttttgtttttttttttttatggattatgttgcgttttggttttggtttaggtttttgttttgttttgttttgtttttttgtttgttcgttttttgagatagagttttgttttgtcgtcgaggttggagtgtagtggcgtaattttagtttattgtaagttttattttttaagtttacgttatttttttgttttagtttttcgagtagttgggattataggcgtttgttatcgcgttttgttaattttttttgtatttttagtagagacggggttttattgtgttagttaggatcgtttcgattttttgatttcgtaattcgtttatttcggttttttaaagtgttgggattataggcgtgagttacggcgtttagttttttttttttttttttttaagtagggtttttatcgtttaggtaggagagtagtggtgtaattatagtttattgtaggtttgaaattttcggttttaagtagtttttttgttttggttttttatagtgttgggattatagatatgagttattacgtttggtttaatatttgtttttgtcggggtatttattacgggttttaattgtatttgtgtttgtttttttttttgtttataatttttatgagattgtttttgtttagtttattattgaaagtttaatttttagttaatttttttggtttgtttgtttttttttgagatagttttattttgttatttaggttggagtgaagtggtattattttggtttattgtaatttttgttttttaggtttaagtgatttttgtgttttagttttttaagtagttgggattataggtatatgttataatgtttagttattttttgtatttttagtagagatagtattttattatgttggttaggttggttttaaatttttggttttaagcgattttttcgttttgattttttatagtgttgagattataggtgtgagttattatgtttagtttaatttttagtttatttagtgttttttgtgtattattaattgtgaataataggaatttgaatttcgtgggtttatttatttgtagatttttttatgtttttttcgtttttgagattgtaaaattaattttttttttttttttttttttttgtaggataatttatttgtttttatttaatgaatagtaaatagattttattttttttaagattattttaataacgtttttttttttttagtttattttattataagaatatagtataggaagggtgtagtggtttacgtttgtaattttagtattttgggaggtcgaagtaggtggattatttgaggttaggagtttgagattagtttggttaatatggtgaaattttatttttattaaaaatataaaaattaattaggtttggtggtatatgtttgtaattttagttatttgggaggttgaggtaggagaattatttaaatttgggaggttgtagtgagtagagatggtgttattgtattttaattagggttataaagtgagattttattttaaagaaaaaaaaatgtatatagtatataatacgtataaaatttaaagtatgtgttaattgattgttgatattattagtaaggtttcgagttaatagtaggttattagtagttaagttttgggggagttaaaatttatatatagttaggtagatttttaattgaataggggattggtttttttaaattcgatattttttaagagttt

SEQ ID NO: 1887 - DNA, 5221 bp, Artificial Sequence
  chemically treated genomic DNA (Homo sapiens)
tatttttgggaaagttatttaattattttgaggatagttttattaagattttttgaagggggtggattgtgaatatagagggttagtagttatatggggattttattgggtgttgtggggttagatttgaagagttatattttgttggatttttggtagttggaagttaggaaaattgtgatttaggttttttgataatgggtgtaatagtattttgagaagaagaaagtaagagggaagtggtaaaaaggggtaggtatattgatggaattgtttttttttttttttttttttttttgataaggtttggttttgttattgaggttggaaagtagtggtatgattttagtttattgtgattttcgttttttgggtttaagttatttttttattttagttttttgagtagttgggattgtgtatgttattacgttcggttaatttgtatattttttgtagagatgggtttttgttatgttgtttaggttggttttgaatttttggttttaagtgatttatttattttagttttttaaagtgttggaattataggtatgaattattatgtttgtttagaagagttttttttgagatgaggtagtgggggtttggttggtgaaggagaaaaatattttataaattcgtagtgtgttatttttttttttttttttttagttttatttttatgtagtttataaggggtgtagggattttttttttttttttttttttgagatggagttttattttgttgttaaggttggagtgtagtggcgcgtttttagtttattgtagtttttgtttgtcgagttttagtaatttttttgttttagtttttagagtagttggggttataggtatatattacgtattattattatgtttggttaatttttgtgttttatttgattttaggtgatttgtttgttttggttttttaaagtgttaggattatagatagtgttttttttttttttttttttttttgagacgagttttgttttgttatttagcgtggggtggagtgtaatggtataatttcggttttttgtaatttttatttttcgggttttgtgcgatttttttattttagtttttttagtagttgggattatagatgttcgttattatgtttagttaatttttgtatttttttttttttttagtagagatagggttttattatgttggttaggttggtttcgaatttttgattttaggtgatttattcgtttgggttttttaaagtgttgggattataggcgtgagttacggcgtttggcggggattttgtttttttttggaagtattgtgatagtaattacgtacgttgtgttttgtttttggttttgaagagattagcgtgcgttttttgagattagggatattggttagtgatttttttttcggtaattttgaattaggtgagaattgttatttttaattttgagatatagtagtattgtttgtattttgtaatttttttttttttgggttgttggttgtatttattttttagggattgtagttatagtttttgattttatatagtaagtttgtagggtatatttattagttttgattttattatatttagtgagtatatattttatttgttattttttttaaatttatggtttatttttattatggtaacggatgttagatgggaggttaatggtttgttaaataagtagaattttattttggttttttaatttaaattgttttatttatgtatttttgatagttgtatttttttattaattattaggtaattttttttttttcgaaaatggtaaggaaaatatttttaatttattttttttatatttgtgagagttgtatgagttgaaagtgatttttttaaaaatttttttaagtttgagaagttggagattttagtatgagattggagtgtgatagtttggtttgttttggtattagaagggagggaaagtgagtttttggaggtttttatattttaggagagattttaagagatatgtaagagtggtaattaggtttttgtttgatttttttgcggtattttggtgttaagtggggtgaagggagagaatatatattttgtttggttttcgtcgggttttgtatttcggtgttttttttttttatttatgttttttagtagaaaattgttttttattagtagttgtagaatgagattatgtttggtttgttgtaagaattagaatgaaggatggagtagaagttggattggggcggtaagaagggagtaagtagttttaggttagtacgttttatagtttggggaggagggaaaggagaggttttttttttttttttttgagcgttgtgttttttttttttttttattgggagagggatgggatgatggcgagagaaggtgttatagacgggaatttaagtcggtgggaaggagagttgtgggtttggggggcgggggagagggagaattggtaataggatgttatttttatttatagagttagggacggatttttgttttgtaattttattttttattttattagttttgggagtaaattttagtttattgtgatttattgagtaagttattaaatttttttaaggtttagtttttttatttgtgaaatagataggttgatttttaatagagatgtagtgtaggtagttagagaggtgagggaggtaaaggtacggcgtaaggtatacgggaacgtaggcgtttaattgtttatattacgcggcgtttttttaatttcggtttggcgcgtttatcggtttttagttattaggatttgttttagtaggcgcgcggtttgtatacgcgtttttaatttcggcgtttgtagtagtcgtaatagtaggtcgaggtcgttatcgaggcggatggcgtcgtatagattttgggttatttcgcggtttacggtcgtagtagttaggttttttttattagttggaagatttcggttaggtcggcgtttacggttcgcgcgtcgttcgtttgttttagcgcggataaggtttgttgtagtttcggtagcgcgcgttttagggcgttttgtatttcggtgtttgttttcggcgatattttcgcgggttcgggttattcgtagtttattatgggttcgtgttatcgtttttatttggtttaggtatcgttagtcgttcggcgtttcgtcgtgggttcgatatggcgaagaagcgatatagtttgtaggcggagagaagtagcgttaggattatgggcgcggggtcgcgggggatattttcggtttggaggcggggttacgcggagagattcgggttttgggaaaagagggattcgagaggggtcggggaaagaagatggagggggaggaatggagagaagggtattaggtaagggtgtcggttagaagtttgggggaggagtgtcggtaggatcgggggagcggttggtaaaggtgatgtaggtttagatgtagggagtgggcgaaaggagagagcgagtaggcgagggatggtttcggacgtcgtagggtagaggaggcggcggttggaataaagcgtggtttgggtacgggttcggttgagttgggagatgttcggtagtagttacgtttcggaggagtagcggttttcggtcgacgtttcgtttttgggtttcgcggggtttttttagttttttgtagttacgtttcggaggagtagtggttttcgggtcgacgtttcgtttttgggtttcgcggggtttttttagttttttgcgtagttttatttttaagtcgtttttagttacgtttacgtttttggttagttttttttagttttttagttagtcgtagttatttttttttgcgttggatttggaggaagggggtggagaatgagaggacgtttttcgtttttcgtttcgttttttcgttttacgtgatatcggtacgtgggagtaatatcgttggatgttttttttttattaaatggttaaaataattattataatttttaaggtttttttatggttgttttttagcgaaattttataatatgtttatggggtgggaattgatgttttattttatagttgattttattgaagtttatgaggaagaaattggtttaaattatagttttttttgattatagaatagaaaaagttagttaaaattttaggattattttttttaggtgatgggaggattttagaagttttgtggatatttgaaattgggtataaaattaggtgttttatgttagtgggtattttttaggtagagggattatatttttttcgagagtttaaaagtgtgttgaataagtttattttttatagatggggagattgagtttggggatagggagtggtttgtttagaaaagatttagaaattaaatttagtttagtgggttgatatttatttaaatttttagtttggggagattgatgtatttaagagaagaatttagaaatgaaattttgtttttttatgttaaaaaataaaattttttagagtgtttataatttttttttttatttttttttttttgttttaaataaataatggcgaatgagtatttagttagggatgtgtttgattaaataattatggattaatagttatgtttggagaaggaatttgtggttgttttagttattgggtattttgtttggtttagtttatgtaattttttaatattttatgaagtaaggttttgttaattttattttattgaaaatgaattaagatttagagagataaagttgttgtttaatgagttttttttttgttttttagatttacggtgttaatttttttttcgatgatttaatgattttgagtttggtaaaggttttattttttagttcgtttaggtttagtgttttaggaatgtgatttttgttgtagtagtcgttggagggggtagaggggatgggttggaggttgagtaaatagagtagtagaaaaggtagttttttttttttagtgttttttttttttgtttttgttttttttttttttttttaggtattagagcggagattttagggagattagagtttagtttgttaggtattgagttagaagttttgttatggtatttttgagatttttttttatattggttttgttggtatgggttgttttggttgattaaggtataggggagtgttggtggttatttgggttaatgtagggagggcgagggtggtttgggtttggtggtatcgattgatattttttttttataga

SEQ ID NO: 1888 - DNA, 5221 bp, Artificial Sequence
  chemically treated genomic DNA (Homo sapiens)
tttatgaggaaggagtgttagtcggtgttattaagtttagattattttcgttttttttatattgatttagatggttattaatatttttttgtattttggttagttagagtaatttatgttagtagggttagtatgagaaggggttttaggggtgttatggtagggtttttagtttagtgtttggtaagttgggttttggtttttttgaagttttcgttttgatgtttgaggaagggagggagaggtagagatagggaaggagggtattggagaagaggaattgttttttttgttgttttgtttgtttaatttttagtttattttttttgttttttttagcggttgttgtagtaaaggttatatttttggaatattgggtttgggcgagttgggagataagatttttgttaagtttagaattattaggttatcggaaggggaattagtatcgtggatttggagggtagaaagaaggtttattgggtaatagttttatttttttgagttttagtttatttttagtaaaataggattaataaagttttgttttatggggtgttgggagattatatgaattggattagataaaatgtttagtagttggagtagttataaattttttttttaaatatagttattgatttatgattgtttgattagatatatttttggttgggtgtttattcgttattatttatttagggtaggaaaaagggagtgggaggagagattgtaagtattttggggaattttattttttagtataaaagaataaagttttatttttgggttttttttttgggtgtattaatttttttaggttggaaatttgggtaaatattaatttattggattggatttaatttttgagttttttttgagtaggttattttttgtttttaggtttagtttttttatttgtaaagagtgggtttgtttaatatatttttagattttcgagagaaatatgatttttttatttggaaaatgtttattggtatgaaatatttgattttgtgtttaattttaggtgtttatagaatttttgaaatttttttattatttgaaaaaagtgattttgagattttagttgattttttttgttttgtaattagaggggattgtgatttgggttaattttttttttatgggttttagtggagttagttgtggaatggaatattaatttttattttataggtatgttgtgaggtttcgttaagaaatagttataaaagggttttaagagttatgatgattgttttaattatttagtagggagggggtatttagcggtgttgtttttacgtatcgatgttacgtggggcggggaggcggggcggagaacggagagcgtttttttattttttattttttttttttaagtttagcgtagggggaggtggttgcgattgattgaggggttagggaaggttggttaggggcgtgggcgtggttggggacggtttgggggtggggttgcgtaggaggttggaggagtttcgcgggatttagaggcggggcgtcggttcggggattattgttttttcggggcgtggttgtaggaggttggaggagtttcgcgggatttagaggcggggcgtcggtcggggatcgttgttttttcggggcgtggttgttgtcgagtattttttagtttagtcgagttcgtgtttaggttacgttttgttttagtcgtcgttttttttattttacggcgttcggagttatttttcgtttgttcgtttttttttttcgtttattttttgtatttgggtttgtattatttttgttaatcgttttttcgattttgtcgatattttttttttaaatttttgatcggtatttttgtttggtatttttttttttatttttttttttttatttttttttttcgatttttttcgggtttttttttttttaaaattcgggttttttcgcgtggtttcgtttttaggtcggggatgtttttcgcggtttcgcgtttatggttttgacgttgttttttttcgtttataagttgtgtcgttttttcgttatgtcgggtttacggcggggcgtcgagcggttggcggtgtttgggttagatgggggcggtggtacgggtttatggtgggttgcgggtggttcgggttcgcgaaagtgtcgtcgggggtaggtatcgaggtgtaggacgttttggagcgcgcgttgtcggagttgtagtaggttttgttcgcgttgaagtaggcgggcggcgcgcgggtcgtgggcgtcggtttggtcgaggttttttaattggtggaggaggtttggttgttgcggtcgtgggtcgcgaggtagtttagggtttgtgcgacgttattcgtttcgatggcggtttcgatttgttgttgcggttgttgtaggcgtcggagttggagacgcgtgtgtaggtcgcgcgtttgttggagtagattttggtggttgagaatcggtgagcgcgttaggtcggggttgggagagcgtcgcgtggtgtggatagttaagcgtttgcgttttcgtgtgttttgcgtcgtgtttttgttttttttatttttttgattgtttgtattatatttttgttaggggttagtttgtttgttttatagataaggaaattgagttttgggaaagtttagtgatttgtttagtggattatagtgaattaagatttgtttttagggttagtggggtgaggaatggagttataggataggagttcgtttttggttttatggatggagatggtattttattgttaattttttttttttttcgttttttaagtttatagtttttttttttatcggtttgggttttcgtttatgatattttttttcgttattattttattttttttttaatgagagaagaagggaaatataacgtttagaaaagagggagggagatttttttttttttttttttttaggttgtaaggcgtgttggtttgaggttgtttattttttttttgtcgttttaatttaatttttgttttattttttattttggtttttgtaataggttagatatgattttattttgtagttgttgatgggaaatagttttttgttgggaggtatgggtgggggaagaggatatcggggtgtagagttcggcggggattaggtagagtgtgtgttttttttttttattttatttagtattaagatgtcgtaagagggttaaatagaggtttggttgttatttttgtatgttttttgggattttttttggagtatgaagatttttaaggatttatttttttttttttttgatgttagagtagattaagttgttatattttagttttatgttgaagtttttagttttttaagtttagaagagtttttggaagagttatttttagtttatgtagtttttataagtgtgaagggagtgggttgggggtgttttttttgttattttcgaaaagaaaaaaattatttggtgattggtggaaagatataattgttaaaaatgtatgaatgaagtaatttaggttgggagattaagatagggttttgtttatttggtaagttattaattttttatttgatattcgttgttatgatggggataggttatgaatttggagggggtagtaaataaaatatgtgtttattgggtgtggtggggttaaggttggtaggtgtgttttgtaggtttgttatgtggagttaggagttataattataatttttggagagtgagtatagttagtagtttaaggagaggagggttgtaagatgtaaatagtattgttatattttaaggttaaaaatggtaatttttatttggtttagagttatcgagagaagagttattaattagtgtttttggttttaagaaacgtacgttggtttttttaggattaaggatagagtataacgtgcgtggttgttattataatatttttaaagaaaggtaggattttcgttaggcgtcgtggtttacgtttgtaattttagtattttgggaggtttaggcgggtggattatttgaggttaggggttcgagattagtttggttaatatggtgaaattttgtttttattaaaaaaaaaaaaaaatataaaaattagttgggtatggtggcgggtatttgtaattttagttattggggagattgaggtggaagaatcgtatagaattcgggaggtggaggttgtagggagtcgagattgtgttattgtattttattttacgttggatgatagagtaagattcgttttaaaaaaaaaaaaaaaaaaaaaaggtattgtttataattttagtattttgggaggttaaggtaggtagattatttgaggttaagtgaaatataaaaattagttaggtatggtggtggtgcgtggtgtgtgtttgtaattttagttattttggaggttgaggtaggagaattgttggaattcggtaggtagaggttgtagtgagttgagagcgcgttattgtattttagttttggtaatagagtgagattttattttaaaagaaaaaagaaggggagggtttttgtattttttgtaggttgtatgagaatggggttggaaagaagagaaggggagtgatatattgcgaatttatgaaatgttttttttttttattaattaagtttttattgttttattttaaagaaggtttttttgggtaagtatggtggtttatgtttgtaattttagtattttgggaagttgaggtgggtggattatttgaggttaggagtttaagattagtttgggtaatatggtaaaaatttatttttataaaaaatatatagattagtcgggcgtgatggtatgtatagttttagttatttaggaggttgaggtgggaggatggtttgagtttaggaggcggaggttataatgagttgagattatgttattgttttttagttttagtgatagagttagattttgttaaaaaaaaaaaaaaaaaaaaaaaaataattttattagtgtgtttatttttttttgttattttttttttgtttttttttttttaggatgttattgtatttattgttaaggagtttaggttatagtttttttgatttttaattattagaagtttaatagaatatggttttttaaatttggttttataatatttagtgaggtttttatatgattgttagttttttatatttatagtttattttttttagggaattttaatgaagttatttttagagtagttaaatggtttttttaggaata

SEQ ID NO: 1889 - DNA, 5464 bp, Artificial Sequence
  chemically treated genomic DNA (Homo sapiens)
aaaaaaatttaaattttttttaaaaagagtttgtggatatatataaacgtaataaattagttttaaattattgatgttagttaatggagtaattaaaaaatatgaatatgaaaagtgatattaaaatgattagtaaattattatagtttataatgggaaaatttattttattagggattaaaataataaaaatgtgttttaagtttttttttttttttttttttttaagagtcgacgttttgttttgttgtttaggttagagtgtattgaggtaattatagtttattgtagtttcgattttttaggtttaagtaattatttcgttttagttttttcgattataggtatatgttattatatttagttaatttttaaaaaattttttgtagagatggggttttgttatgttgtttaggttggttttaaatttttgggtttaagcgatttatttattttggttttttaaaatgttggattataggggtgagttattacgtttagtttgttttaggtttttttgttttgttttgttttgttttttagagaaaaatatatattttatatttgtttgttatttagaaataagaataggaaatatataattttaaaaaatttatttttatattttggtaacgaaatatttatttttaaatgttaatttataaaataattagtataattagtaaggttgttgtggtttatatttgtaattttagtattttgggaggtggaggagggtagaatgtttgagtttaggagatttagattaggttgggtaatatagtgagattttatttttataaaaaatatgataattagcgaggtatggtggtgtatatttgtagttttagttatttgagaggttaaggtaggaggattttttgagtttaggaggtcgaggttgtattgagtcgtgattgtattattgtattttagtttaggtagtagagtgagattttgttttaaaaataaataaatagttaaataaaataattagtagttgttttgtttatggagtagttattttttatttttttatttttttaatatatttgtttttattttattttatggatttgtttcgaatttttttttgtgtgagatttaaaaatttttttttgggtttggattaggattttttttcggtaatatttttttggtgaattacgaagggatgatattgaggagattttcgatttaaaggaaaaagattgtagtattgattggttaattttggattgattttgtttatttttgtgaattaattagtgatttgtgacggttttttagaagaaataagagggatggataatattttttgttggagtttagttatgagtggtttagttatgattgagtttttttttattttgaatataagagattttaataggtaggaatattatcgtttttattttttttgaagaagttatagaagatgaatttttttttttttaaatcgttaggattaagggtttttttgtaaaagggaagggtaaatatgttagaggcgtttgaattagagtgattttattttgaataggggttgggtaaaataaggttgagatttattgggttgtttttgggttatttttaggaggttaggtattttaagttataggatgagataggaggttagtataagatataggttataaagattttgttgataaaataggttgtagtaaagaagttggttaaaagttattaaaattaagatagtaatgaaagtaatttttggtttttttaattgtttattatatattaattatgatgtattagtatgttaagagatatttttattagcgttatgatagtgttatggtaatattaagaagttattttatatggtttaaaaaggggaagaatttttagttttcggaattgtttattttttttttggaaaatttatgaataatttattttttgtttagtatataattaagaaataattgtaagtatttttagtttagtagtttaagttgttgttttgtttatggagtagttattttttatttttttatttttttaataaatttgtttttatattaaaaataataataataatattaataattagtaaatatattagaggtttagtattttttatttaaggggatagttttggaggtcgagaaagaagtagaaaggtggagaataaaagatataaaggagtagaagaattttattttggtttttatgtggtattttatagtttgggaataataattttttttataattttttttagttttattatttataagttgtgtgatttcgggtaaggtatttaagtttttttgggttttagttttttagttagtataatggggtaatagtagtgtttacgttttttgtgtttttttttgagatggagttttgtttttgttatttaggttgaagtgtaatggtacgatttcggtttattgtaattttcgttttttaggtttaagtgatttttttgttttagttttttgagtagttgggattataggtgtgtattattatattagggtaatttttgtatttttagtagagacggggttttattatgttggttaggttggtttcgaatttttgatttcgtgatttggttgtttcggttttttaaagtgttgggattataggcgtaagttatcgtattcggttagtagtgtttattttgtggggttatttgtgaatgtgaaatgagttaataaatggaaagtatttagaaaagtttttggaattattgaattaaattggatattattattgaatttttatttaatgttttaatatttatttagtgttatttgtttaaatgttggagatacgtttagtatatattgattgtttagtgagtagtgttataatgaatacgtgtaatggttttgaaggttatatcggggtttgttttgattagtaggttggaggtgttttaggttcgaagtttagttgtgagtggggatacgggagggaggttggaattgttattgtagaaggggttttgaatttaggtttaggagagaggttttgaatttgtacgtgtgggaagttatggaagtttttaggaaggattgtaggttttaattggagatgtgtcgttttttttttaggtatttgggaatgttagttatattttagatttgtttagtttttttaaattgttgtttttgtatttgagagttttaagtttttaaatggtttattttatatatggggaaattgaggtttggggaggtcggggattgagttagtatttatttgtggaaatagtttggtattatttggagaagttagagatatgtaaattttatagtttttagattttcgtttgagagtttgtatgtttatgtggattaggagatgtgtgcgggagtgaatattgtagtgttgtttttaatagtaagaattagaagtagtttaaagggttgttataggagaatatggatatttaggttgtatatgtatattatggaatgttgtatggtagtggaaataaatgaatagttattattataggtaaataggaattatagtaatagttaagagtgaaggcgtggagggacgagattatgtatttatatttggtttgtttggttcgtatttcgggtaaaggggttagaatagtgattggtatatacgttaagtgttatgtgagtgttaagataaaattaggatgtttagtggggagaaagtaagtttttgaagattatgtgtttttataaattttaagtgtaatgaaaattaaataagatgttgtttaggtatttatatatgatataaagtttttttttttaaaaaagggatgggttgggtacggtggtttacgtttgtaattttaatattttgggaggtcgaggtaggtggattacgaggtcgagaaatcgagattattttggttaatatggtgaaattttgtttttattaaaaatataaaaaaattagttgggcgtggtggcgtgtgtttgtagttttagttatttgggaggttgaggtaggagagttatttgaattcgggaggtaaaggttgtagtgagtcgagatcgtgttatcgtattttagtttggcgatagagtgagattttattttaaaaaaaaaaagaaaaaaaaaagtatgataagtagaaagtaatttgggagttgcggggaggtaagggtaagggatggggaagtggattagaggtatatgcgttattggtagtgtttaagtatttacgataggcgtggattataggggttcgttttgtaattaaaaggaaaagggtttttgttgtgttgttgttgttgttgtttttgagataagggttttgttttgttattatttaggttggagtgtagtggtgtagttttagtttattgtaattttcgttttttgggtttaagcgatttttttgttttagttttttgagtagttaggattataggtgtgtgttattatgtttggttaatttttgtattttttagtggaaatggggttttgttatgttgtttaggttcgttttgaatttttgattttaagtgatttattcgtttcggttttttaaagtgttgggattataggtgtgagttattgtttttagttaaaaggaaaagttttattgtagtaattttttcggattagggatttcgggttttagttttaggttatttaggtgttttagaaaggaggttatttaggtttatgattattttttgttatagggagttttgtatatagatgtgttaagttttcgttgttagttagagggaggagggtttgagttagttagaaggagatgggttttagagagtaagaaagggggaggaggatttaagttgatttaaaaggtgggtttaagtagttaagtggaggagggttttaatttgatggcggagggtttaagtttagtttaacgaggaggttaggtttattaaggggtttttggaggatttgttttttttgttttttgtggttttttgtattttttgtttttttgttgtttattgcggaagtttttttttttattttgtatttagagtttcgttagagaagataagggtagaaagtattatgagtgggggtttaatgggaggaaggttcgggggtcgaggagtattagcggtttagtagaatatattttttatttttttttaggattacgagaattagcgattttttgagatgtttggacgaaaatgtttggtgagttggggattttttgttttcgtttcgtttttatcgtttttttttttttttttttttttttttttttttttttttttttcgttttttttttttttttttattatttttttttttagaatttttcgttataatttattttttttaggaagattttaatgtttatttgttttttttttggttgtagttttttttttgggtttatgattgttatgaggtaggaaggattaggtttggttttaagattttgtggttatttttgattagattttattgatttttgttttttttttttaga

SEQ ID NO: 1890 - DNA, 5464 bp, Artificial Sequence
  chemically treated genomic DNA (Homo sapiens)
tttgggagaggaaagtaggggttagtggagtttggttaggggtagttataaggttttggagttagatttggttttttttgttttatgatagttatgggtttaaaggaagagttgtagttagagggaaggtaagtagatattgagatttttttgggaagggtggattatgacgggaaattttaggagaggagatgatggagagggaaaggaggagcgggaggaggggaagagagagaaggaggagaggaagaggaagaaacggtggggacggggcgggggtaggagatttttagtttattaagtattttcgtttaagtattttaaagagtcgttggttttcgtggttttggaggagggtggagggtatgttttgttgaatcgttggtgtttttcggttttcgggttttttttttattgggtttttatttatggtgttttttgtttttgttttttttggcgaggttttgggtgtagggtaagaagaggaattttcgtaatgagtagtaagggaataggaaatgtaaaaaattataagggataagggaaataagttttttaggggttttttggtgggtttggttttttcgttaggttgagtttgggtttttcgttattagattggaatttttttttatttgattgtttagatttattttttggattagtttgggttttttttttttttttttattttttggggtttatttttttttgattggtttagatttttttttttttggttggtagcgagagtttagtatatttgtgtgtagggttttttgtggtaaggagtagttatgggtttgggtggttttttttttaaagtatttaggtagtttgaggttgaggttcgaggtttttagttcggaagggttattatagtaaaatttttttttttggttggggataatagtttatatttgtaattttagtattttgggaggtcgagacgagtggattatttgaggttaggagtttaagacgagtttgggtaatatggtaaaattttatttttattaaaaaatataaaaattagttaggtatggtggtatatatttgtagttttagttgtttaggaggttgaggtaggagaatcgtttgaatttaggaggcggaggttgtagtgagttgagattgtattattgtattttagtttggatgatgatagagtaagatttttgttttaaaaatagtaataataataatataataaaaatttttttttttttaattatagagcgagtttttgtgatttacgtttatcgtgagtgtttagatattgttaatgacgtatatgtttttggtttatttttttattttttatttttgttttttcgtagtttttaaattattttttgtttgttatatttttttttttttttttttttttgagatggagttttattttgtcgttaggttggagtgcggtggtacgatttcggtttattgtaatttttgtttttcgggtttaagtgatttttttgttttagttttttaagtagttgggattataggtatacgttattacgtttagttaatttttttgtatttttagtagagatagggttttattatgttggttaggatggtttcgatttttcgatttcgtgatttatttgtttcggttttttaaagtattagaattataggcgtgagttatcgtgtttagtttattttttttttaaagaaaggaattttatattatatatgaatgtttgaataatattttgtttagtttttattgtatttgaagtttgtaaaagtatataatttttaaaggtttgttttttttttattggatattttagttttattttaatatttatatagtatttaacgtgtgtgttagttattgttttgatttttttgttcggagtgcgagttaggtaggttaggtgtgagtgtatggtttcgtttttttacgtttttatttttggttgttgttgtgatttttgtttgtttatagtggtagttgtttatttatttttattgttatatagtattttatggtgtgtatgtgtagtttgggtgtttatatttttttgtaatagttttttgggttgtttttggtttttgttgttgggagtaatattgtagtgtttattttcgtatatattttttggtttatataggtatgtagatttttagacgggaatttgagggttgtagggtttgtatgtttttaatttttttagatgatgttagattatttttataagtgaatgttagtttagttttcggtttttttaggttttagtttttttatgtatgaggtaggttatttggagatttgaagtttttagatataggaatagtagtttgggggagttgagtaggtttggggtgtgattgatatttttaggtatttgaaggaggaacggtatatttttagttgggatttgtagttttttttggaaatttttatggttttttatacgtgtaggtttaaagttttttttttgaatttaggtttagaattttttttgtagtggtagttttaatttttttttcgtgtttttatttatagttaagtttcgggtttggagtatttttaatttgttgattagggtaagtttcgatgtggtttttaaggttattgtacgtgtttattgtgatattgtttattgagtagttagtgtgtgttaggcgtatttttagtatttggatagatgatattaaatgggtattgaagtattgaatgaaggtttagtaatgatatttaatttgatttagtggttttagaggtttttttaagtgttttttatttattaatttattttatatttatagatgattttataaagtaagtattattggtcgggtgcggtggtttacgtttgtaattttagtattttgggaggtcgaggtagttagattacgaggttaggagttcgagattagtttgattaatatgatgaaatttcgtttttattaaaaatataaaaattattttggtgtggtggtgtatatttgtaattttagttatttaggaggttgaggtaggagaattatttgaatttgggaggcggaggttgtagtgagtcgagatcgtgttattgtattttagtttgggtgataagagtaagattttattttaaaaaaaaatataaaaaacgtaagtattattgttattttattgtattgattgggaagttgaggtttagaggagtttgggtgttttgttcgaggttatatagtttgtgagtggtggagttgaggaaaattatgagagaaattgttgtttttaagttgtgaggtgttatatggaggttaagataaaatttttttgtttttttgtgttttttattttttatttttttatttttttttcggtttttagaattgtttttttgaataggggatgttaagtttttgatatatttgttggttgttggtgttgttgttgttgtttttaatgtgaaagtaagtttattaagaaagtaaaggaataaagaatggttattttataggtagagtagtagtttgggttgttggattaaggatatttatagttattttttaattatatgttaaataaggggtggattatttatgagttttttaggaaaggggtgggtaatttcgggaattgaaggttttttttttttttagattatgtggggtgattttttgatgttgttatggtattgttatggcgttggtggaagtgttttttagtatgttagtgtattataattagtgtataatgagtagttaggaagattagaggttatttttattgttgttttggttttggtggtttttagttagtttttttattgtaatttgttttattagtaagatttttgtgatttgtattttgtgttgattttttattttattttgtgatttagaatgtttaattttttgggagtagtttaggagtagtttagtaggttttagttttattttatttagtttttatttaagatagaattattttggtttaaacgtttttgatatatttgttttttttttttataaggaaatttttaattttaacggtttagagggaggaagatttattttttgtaatttttttaggaggaataggggcgatgatatttttgtttattagggttttttgtatttagggtagaagggagtttagttataattgagttatttataattgagttttaataaaaggtgttgtttattttttttgttttttttgaggagtcgttataggttattgattggtttataggaataagtagggttagtttaaagttggttaattagtgttgtagttttttttttttgggtcgagggtttttttagtattattttttcgtggtttattaggaagatgttatcggaaaggggttttgatttagatttaagagagggtttttggattttatataagaaagaattcggagtaagtttatagaataaagtgaaagtaaatgtattaagaaagtaaaggaataaaaaatgattattttataggtagagtagttgttggttgttttatttaattatttatttatttttgagataaagttttattttgttgtttaggttgaagtgtagtggtgtaattacggtttaatatagtttcgattttttgggtttaagggatttttttgttttagttttttaagtagttgggattataggtgtgtattattatgtttcgttaattattatattttttgtagagatggggttttattatgttgtttagtttggtttgaattttttgggtttaagtattttgtttttttttattttttaaagtgttgggattataggtgtgagttataatagttttgttggttgtgttggttgttttataaattaatatttaaaggtggatatttcgttattaaggtatgagaatgaattttttaaagttgtatattttttgtttttatttttaagtagtagataagtgtaaaatgtatatttttttttaaaaaataaaataaaataaaataaaaaaatttgaagtaggttgggcgtggtggtttatttttgtaatttagtattttgggaggttaagataggtggatcgtttgagtttaggagtttgagattagtttgggtaatatagtaaaattttatttttataaaaagttttttaaaaattagttgggtgtggtggtatatgtttgtagtcggggaggttgaggcgggatgattgtttgagtttaggaaatcgaggttgtagtgagttgtgattgttttagtgtattttagtttgggtaatagaataagacgtcggtttttgaaaaaaaaaaaagaaagaaaaatttaaagtatatttttgttattttagtttttaatagaatgagtttttttattatagattatagtgatttattaattattttagtattattttttatatttatattttttgattattttattgattggtattaataatttggagttggtttattacgtttatatgtatttataaattttttttaaaaaaaatttaaattttttt

SEQ ID NO: 1891 - DNA, 7204 bp, Artificial Sequence
  chemically treated genomic DNA (Homo sapiens)
  unsure 5735: n is a or g or c or t
ttagtttttagttttgaaggattttatttaaagtgtaaggtttatgttaataggaatatgtatgtatatttatgtgttatatgtattaaaaatatttgagaaggtgatttagaaattttagttttaaatttttatgggaagaattttgtttgttttgttgttaaggaaggtgaatgggttgaaaatagttttaaagttttttacgtgcgaagttatgaatttaaagaggataaataggttaggtttgttattttagaagttagaggtaagatttttatttagtttttttaatattattataagtatgtggattttgtaaaagttgtttagtaatattagttagaaataatattgggtggagaaaggaattggaaatttgaattagatacggtttggggtaggcgggtgtaatttatttttttagtatagtgtgtgttttatttagaggagcgtgaaattttaaaaattagaatagttatttaaaattttagttaggatgttgttatagttaaattataatattgtgttatgtttttagtttgaagaggtagggtttgggttttttatttttgttttgttttgttattttggtatttttgttttaaagattattggatttttattaaattattttagaaatatttattaagtatttttttaggggttaaggtatagtgttggttgttggagttttgaagataaatatagtttggattttgttttgggtagtgtgaaaattagataagtaaataaagtaagagtgttatatagttcgtgttgggtgcggtggaaagtttggagtagggaatggagagttaggaaaggttttatagaggaaatggttttagtattgagttttggttttaatttaaaaaaaaaatttttttagttaggtgtagtggtttatatttgtaattttaattttttgagaggttgaggtaggtagattatttgagtttaggagtttaagattagtttgggtaatatggtgagattcggtttttataaaaaatataaaaatttattaggtgtagtggtatttgtttgtagttttggttatttaagaggttgaggtgggagaattgtttgagtttagaaggggaggttgtagtgagtcgtgaacgtattattgtattttagtttgggtaatagagtaaatttttgttttaaggaaaaaaaaaaaaaaaattattttttttaattattttatatatttattgtgaatttattttttcgattttgtgtgaggattttaaagttttgggtttgtggattaagaatttttttttttttatttataatttaagtttttttgtttgttttagtttattttaaagattttttatttagggacgtagataggtggtaaagtaggagttgataaaataaaataaaatattgttaagagtgtttatttttaggaaggggaattgggttgggatttgaagggataggtgggagaattttgtattatttaagtttttgttattggagtggggaaaaattatggggaaaaataggaagtgtgatggttgttatttttataattttgtattaaatagagtattagagtggtgatttttgtttaattttttttttttttttttgagatagttttcggtttgttgtttaggttggagtgtagtggtataattatagtttattgtagtttttattttttaggtttaagggatttttttattttagttttttgagtagttgggattataggtatgtgatattatgtttagttaatttttaaatttttagtagaggtgaggttttattatgttgtttaggttggttttgaatttttggttttaagtgatttttttgttttgattttttaaagtgttgggattgtaggtgtgaataattattatattcgatttaaaattttaaataggtaaatttatttgtaaatgtgttaatttaggaagcgaataaattaataattatttaaataagggtttttttattatttataagggagtgaacgtttaatttacgttagaatattgtaataaataagggttttttattttcggggattttatttttttagaaggagatagtaataaattaataacgtattttgagatagaaataagtttgttaaggaaataaagttaggtgttgtgaaagagtaaagagtgagggaggggacgtgagaatagagatacggaatttttatataggaggagtttaggagtattagtttagttgtggagaggtaattaaagggttttaaagttttatttatttagaaagtatattatttttatatgtagtttatgttatagatcgataaaagtagggttttttatttttatttatgttttataataaattgagaaaatgttaattatattaaataattatatttgttattaggagtggtaggagggggtttatagtttgggtaatatggtggtttatgtttgtaattttagtattttgggagacggagacgggtagattgtttgagtttaggagttttagattagtttgggtaatatggtgaaatagagtttttattaaaaatgtaaatattagttgggcgtggtagtatatattattagttttagttatttgggagggtgaggtgggaggattttttgagtttggggagatcgaggttatagagtcgtgattgtattattgtattttattttgagatagggtggatagagtgagattttgtttcgaaaaataaaaatttaaaaaaaaggagtggtaggaggggaagtgttggagtaagggttttgaaaattattttttggttttggttattgtggattattgattaattttttttatataagtttagaatttttgttttttaagagtttaaaattaagtttgtatgattatataaaaaatatatttatatattagttagtaaatgttaggagaaaagatagttgttgattttttattgtgtttttagttgtgtgattttaggaaattttcgatttgatgtgttaagtattatcgtgtgttttaagaaaaatttagtttgagtttatttagtttttgaaaagtattagaataatatatatgataaagtgttaatatgtataaagtgttaataataagaaaaataggtaatagagataaatgtaaattattattaaatttatgataattgtttaataatatgaattaaaataataaaattatattaacgaatatttatcgatgttttgaatttatagagtgtgttttaatttattgttagtgagaatgtattgtgtttttggagggggagtttgttagtttatattttttgattgaggaattttaattttagggaggtatttaaaagagtattttaaaaaggttaggcgcggtggtttacgtttgtaattttagtattttgggaggtcgaggcgggtagattatttgaggttaggagtttgagattagtttgttaatatggtgaaatttcgtattttgtattttgtaaaaatataaaaattggttaggtttggtatgtgtttgtaatattagttattcgggagataggagaatcgttggaattcgagaattcgggaggtgggggttgtagtgagtcgagatcgcgttattgtattttagtttggggcgatagagcgagatttcgtgtcgaaaaaaaattaaattaaataaaaaatatggagaaggaagtatatatattacggggttgtttataatagaaaattggaagaggtcgggagcggtggtttacgtttgtaattttagtattttgagaggtcgaggcgggcggattatttgagattaggagttggagattagtttggttaatattgggaagttcgtttttattaaaaatataaaaattagttaggtgtggtggtagtcgtttgtaattttagttattcgggtggttgaggtatgagaatcgtttgaattttaaaggcggaggttgtaggttgtagtgagtcgagatcgtgttattgtattttagtttgggtgatagagtaagatttcgttttagaaaaaaaaaaaaaaaaaataaataaagaaagaaaaaagaaaattggaagaaacgtgtaagtgtattaagggatagattaaattagtttaacgaagtattagggaaattttttaaaattgcgtttgagtttgtcgcgagtcgggttaatcggttttgttaacgtatgtttacgtgttggcgaataaatgtaaatacggagatcgtgtgtcgggtatttggtttcgtggtgggtaattgtgttgttgttttttttggtcgcggataaggtcggtagaggtggatttttgtttgggagagtttttttcgttgtgttgatattcgtttttaatagttatttatttcggggaaataatggggttcggaggtttttttttagttagtgtttagtttaagtatatcggttttcgtagtttagaaaggtttcgaggttcgagttattattttcggtttagatttcgattcggaacgtggttgtttattgttacgtttattacgttttagtggttcgttttaggggacgaggggtaagaagcggttttcgagggtagcggtcgaaggttattcggtttttggttttttttagttcgtagagattcggaggcgttgttcggtcgtttgtttttttttagattttttagtatcggaggagtagcgaggggggtgcgtttaggtcggttttcgggtcggtttaggcgaatttagtttttttttgttttttttagaaggtttagtttcgttcgggcggtgttcgggcggcgtcgggtcgggtttttcgtcgttttaggttcgtttataggttcggaatattatagttcgtttagatttggttggcgtcgagtcgggggtggagttagcgggttttcgttaaaatcgcgtagttggtttttttttcgcgggttacgtcgcgttttttttttttttttaaattcggagttgtattgggattggtggattgggtatttacgtggttaacggtcgcgggaagtcgcggagttcgaatttgagattggatttgaggagattttagtttcggtgttcgggtcgtttcgtttttgtcggaaagttcgcgtcgtcgttgtcgttatcgttcgtagttcgagcgtttcggagtcgtagtgtcgtcgcgtagagacgtcgcggttgcgattaggcgcgtttagtcgtacgtggcggattcgtttttaggttcgtagtgttttggatttcgtaggttttcgtttttttgttttcggtttcgtttttagggtcgcgatgagttttttgagtcgatagtagtcgtcgttatttcgtcgcgtcggggcggtttgtattttgcggtagaagttgattttttcgttttgtagcgattgtgaggaggaggaagaagaggaggaggaggagggtagcggttatagtatcggggaggattcggttttttaagagttcgattcgtcgttgtcgttcgcgcggagttttacggagttcgggttcgagcgtcgtcgttcgttcgggtcggttttcgggagtttcggcgagttggaggaggatttgttgttgttcggcgtttgttcgggcgcggacgaggcgggcggtggggcggagggcgattcgtgggaggaggagggtttcggtttttcgtcgtcggttaagtcgtcggcggttttttattttttgggtagttttttttcgtcggtgcgttgcggcggtttaggagatgcgtcgtcgcggggttgcggggcgcgtcgggcgggcgaanaggcgcgtcgtcgcggtcggattattcgggtatttcgttatataagatttttcgtaagttgcgatttttcgatatttcgtatacgtttaaggtgagagcggcgggcgcgggtattcggcggtcggggtcgcggcgtcggaggggttagcgtcgttgtttgggttcggttatagaagcggtcggtcgtttttttttcgtttttttgcgtcgttttttaaagttggtagtttttgtgtttggttttgtttcgaggttgttcgttgagattatgtaattgaataatgggtttcgtttggaattttattttataaaggggtcgatcggttcgttcgggtggttaaggatttgtcgttcgttgagttcgggtcgtttcgagcgtgttagtttcgagtgcggtatcgataacgcggttcgcgaggatgttggagggtgtcggttcgttatttgatattttcgagttataggatgttttttaaacgcggcgatcgggtttgtaatttgggcggcgcgggtagaaggagtttaaagaaaaataattgtttcgttttgatcgtgtcgtgtcgtgtggcgtggatgggggaaaggtttggggtatgtagggagattacgtttggatttgggagtaaaggttggttttttaagtatttatagttttatagatttattttaagtttaggtagtattgaggtttgtttttggataaggttttggtttagtatttgtttttatcgtgggtttgcggtgtttagagtttggtcggttttcgtgtgattaggaatattttatcgtagataaggtattttaaagaaggaggtgtttagtatttgtgttttgaaaggttttcgagtattgcgtagatgattatttttaaaattgtagattttaaagttgatatttttagagattaagataagtttcgtatttgtaaggttaatagggaagatgtattttttaaagtgagtttgttttgtttttaatgtattgtttgttattagtttaggtaatttgtgtgttttcgagttgtattgtttattggtcgatttgtttaaggtaaaatttttttggaagtgaggggaggagtttagcggaggtggttatggaagttttatttagatgggggaggggagattttatggggttttcggattgttttttatttttggatgggttgaaagaatttgttaatttttagttattagaatgaatttagttttaggtagtatttatattttttttagggttagaggtagattttatttggttattttttttaagaaaagatagttaatatttagttttagtttttttaaattagttataatttattttgtttgaattttaataaaggtttgtgtgttgtttttatttacgtatttagttttatgaaaggttcgttgaaggttaggttgagaaggttgattataggatttggattttaaaaattgtatttgtatttttttttttttaga

SEQ ID NO: 1892 - DNA, 7204 bp, Artificial Sequence
  chemically treated genomic DNA (Homo sapiens)
  unsure 1470: n is a or g or c or t
tttagggaaagaaaaatataaatataatttttaggatttaagttttatagttagtttttttaatttaatttttaacgagttttttatagggttgaatgcgtaggtgaaagtaatatataagtttttgttagagtttaagtaaaataaattgtggttaatttaggaagattgaagttggatattaattatttttttttgaaaaaaatagttaagtaaaatttgtttttaattttaaaaagaatataaatgttgtttaaaattaagtttattttagtggttaaaagttaataaatttttttaatttatttaaaaatagaaagtagttcgagagttttataaaatttttttttttttatttagatagggtttttatagttattttcgttggatttttttttttatttttagagggattttgttttgagtaagtcggttaataaatagtatagttcgaaagtatatagattgtttaggttgatgataaatagtatattgaaaataaaataaatttattttaaaaggtgtattttttttgttaattttataaatgcgaggtttgttttaatttttggaagtattagttttaaaatttgtagttttaaaagtggttatttgcgtagtattcgaaggttttttaaaatataggtgttgaatatttttttttttaagatattttatttacggtaggatgtttttaattatacggaggtcggttaaattttgggtatcgtaaatttacgataaaaataaatgttgggttaagattttgtttagaaataggttttagtattgtttggatttaggatgagtttgtaggattgtaaatgtttggaaggttagtttttatttttaagtttaagcgtagtttttttgtatgttttagattttttttttatttacgttatacgatacgatacgattagggcgggataattatttttttttaaattttttttgttcgcgtcgtttaaattataggttcgatcgtcgcgtttaaaaggtattttatggttcgggagtgttaggtggcgggtcggtattttttagtattttcgcgaatcgcgttatcggtgtcgtattcggggttgatacgttcggggcggttcggatttaacgggcggtaaatttttggttattcggacgggtcgatcggtttttttgtaagatgaagttttagacgaggtttattgtttagttatataattttaacggataatttcggggtagggttaaatataagggttgttaattttggggggcggcgtaggaaagcgaggggggagcggtcggtcgtttttgtaatcgaatttaggtagcggcgttggttttttcggcgtcgcggtttcggtcgtcgggtgttcgcgttcgtcgtttttattttgggcgtgtgcggggtgtcgaagagtcgtagtttgcggaaggttttgtgtggcggggtgttcgggtggttcggtcgcggcgacgcgtttnttcgttcgttcggcgcgtttcgtaatttcgcggcgacgtattttttgggtcgtcgtagcgtatcggcgagaaagagttatttaggaagtagggggtcgtcggcgatttgatcggcgacgaggagtcgaagtttttttttttttacgagtcgtttttcgttttatcgttcgtttcgttcgcgttcgggtaggcgtcgggtagtaataggtttttttttagttcgtcggggttttcgggggtcggttcgggcgagcggcggcgttcgggttcgggtttcgtggggtttcgcgcgggcggtagcggcgagtcgggtttttgaaaggtcgagtttttttcggtgttgtggtcgttgttttttttttttttttttttttttttttttttatagtcgttgtagggcgagaagattagtttttgtcgtaaggtgtaggtcgtttcggcgcggcggggtggcggcggttgttgtcggtttaggaagtttatcgcggttttggggacggggtcgaggataggagagcggaggtttgcggggtttaggatattgcgggtttgggggcgggttcgttacgtgcggttgggcgcgtttagtcgtagtcgcggcgtttttgcgcggcggtattgcggtttcggggcgttcgggttgcggacggtggcggtagcggcggcgcggatttttcggtagaggcggggcggttcgagtatcgaggttgaggtttttttaggtttagttttaggttcgggtttcgcggtttttcgcgatcgttaattacgtgagtgtttagtttattaattttagtgtagtttcgggtttgaaaaaaaaaggagggcgcgacgtagttcgcgggggaaggattagttacgcgattttggcgggaattcgttggttttattttcggttcggcgttagttaagtttgggcgggttgtggtgtttcgggtttatgagcgagtttggggcggcggggggttcggttcggcgtcgttcgaatatcgttcggacggggttgggttttttgggaggggtaaaagagagttggattcgtttaagtcgattcgaaagtcggtttggacgtatttttttcgttgttttttcggtgttgggggatttgaagaggggtaggcggtcgggtagcgttttcgggtttttgcgagttgggaagagttagggatcgaatggttttcggtcgttgttttcggaggtcgttttttgtttttcgttttttggggcgagttattggggcgtagtgggcgtggtagtgggtagttacgtttcgggtcgaggtttgagtcggaaatggtgattcgggtttcgggatttttttgaattgcgggagtcgatgtgtttaggttggatattggttgggaggaggttttcgagttttattattttttcggggtgggtgattgttaggggcgggtgttagtatagcgagaagagtttttttaagtaggggtttatttttgtcgattttgttcgcggttaaaagaaatagtagtatagttgtttattacgaaattaagtgttcggtatacgattttcgtgtttatatttgttcgttagtacgtgggtatgcgttggtaaaatcgattggttcggttcgcggtaaatttaaacgtaattttaaaaaatttttttagtgtttcgttaaattgatttaatttgttttttaatgtatttatacgttttttttagtttttttttttttttttttgtttattttttttttttttttttttgagacggggttttgttttgttatttaggttggagtgtagtggtacgatttcggtttattataatttgtaattttcgtttttagagtttaagcgatttttatgttttagttattcgagtagttgggattataggcggttgttattatatttggttaatttttgtatttttagtagagacgaattttttaatgttggttaggttggtttttaatttttgattttaagtgattcgttcgtttcggttttttaaagtgttggaattatagacgtgaattatcgttttcggttttttttagttttttgttgtaaataatttcgtggtgtatatgtttttttttttatgttttttgtttggtttggttttttttcgatacggagtttcgttttgtcgttttaggttggagtgtagtggcgcgatttcggtttattgtagtttttatttttcgggttttcgggttttagcgatttttttgtttttcgggtagttggtattataagtatatattaggtttggttaatttttgtatttttataaaatgtaaaatacggagttttattatgttggtaggttggttttaaatttttgattttaggtgatttgttcgtttcggttttttaaagtgttaggattataggcgtgagttatcgcgtttggtttttttaaaatatttttttggatatttttttggagttagaattttttagttaaaggatataaattggtaaattttttttttagaaatataatatatttttattagtagtggattagagtatattttgtgaatttaggatatcggtggatgttcgttgatgtggttttgttgttttgatttatattgttgaatagttgttatgggtttaatgataatttatatttatttttattgtttattttttttattgttagtattttatgtatattaatattttgttatatatgttgttttaatgttttttaaaggttaaataaatttaagttgaattttttttgaaatatacggtagtatttaatatattaaatcgggaattttttgagattatataattgaagatatagtgaaggattaatagttgtttttttttttaatatttgttaattggtgtataaatgtgttttttatatggttatgtaaatttaattttaagtttttggaggataagaattttagatttgtataaggagagttagttaatgatttatagtggttaaagttaaggagtgatttttagaatttttgttttaatatttttttttttgttattttttttttttaaatttttatttttcgagatagggttttattttgtttattttgttttaaagtggagtatagtggtgtaattacggttttgtagtttcgatttttttaggtttaagagatttttttattttatttttttaaatagttgggattaatgatgtgtgttattacgtttagttaatatttgtatttttagtagagattttgttttattatgttgtttaggttggtttagaatttttgggtttaagtaatttgttcgttttcgttttttaaagtgttggaattataggtatgagttattatattgtttaggttgtgggtttttttttgttatttttgatgataaatataattatttgatataattgatatttttttaatttattatgaagtataaataaaaatagagaattttatttttatcgatttgtaatataaattgtatgtgaaaatagtgtgttttttaagtaaatgggattttaaagttttttagttgtttttttataattagattgatgtttttaaattttttttatgtaagaatttcgtatttttgtttttacgtttttttttttattttttgtttttttataatatttggttttatttttttagtaggtttatttttattttaaagtacgttgttagtttattattatttttttttagaaaaataaggttttcgagggtaggggatttttgtttattgtagtattttaacgtggattaggcgtttatttttttgtgagtgataaaagagtttttatttaaataattgttggtttattcgttttttaaattggtatatttgtagataagtttgtttatttaagattttgaatcgggtgtggtagttgtttatatttgtaattttaatattttgggaggttaagataggaggattatttgaggttaggagtttaagattagtttggataatatagtgagattttatttttattaaaaatttaaaaattagttgggtatggtgttatatgtttgtggttttagttatttaggaggttgaagtgggaggattttttgagtttgagagatgaaggttgtagtgagttgtgattgtgttattgtattttagtttaggtagtagatcgagaattattttaggaaaaaaaaaaaaaaattgaatagagattattattttagtattttatttaatgtaagattgtagaggtagtagttattatattttttatttttttttatggtttttttttattttagtaataaaaatttaaatggtataaaatttttttatttatttttttaaattttagtttagtttttttttttgaaggtaaatatttttaataatgttttgttttgttttgttaatttttattttgttatttgtttgcgtttttaaatgggaggtttttgaagtaggttaaggtaggtagaagggtttgggttgtggatgggaagggaagagtttttggtttatagatttaggattttgaagtttttatatagaatcgaagaggtaagtttataataaatgtgtagaatgattgggggaaataattttttttttttttttttttgagataagggtttgttttattgtttaggttggagtgtagtggtgcgtttacggtttattgtaatttttttttttgggtttaagtaatttttttattttagttttttgagtagttaggattataggtaagtgttattatatttggtgaatttttgtattttttgtagagatcgggttttattatgttgtttaggttggttttgaatttttgagtttaagtgatttgtttattttagttttttaaagggttgggattataggtgtgagttattgtatttggttgaaggaattttttttttaagttgaaattaagatttagtgttagagttattttttttgtgaagttttttttgattttttattttttattttagattttttatcgtatttagtacggattatgtaatatttttattttgtttatttgtttggtttttatattgtttagggtagggtttaaattgtgtttgtttttagagttttagtaattagtattgtgttttggtttttgagaaagtgtttaataaatgtttttagaataatttaatgaaaatttagtgatttttaaaataaaagtgttaaaataataaaataaaataaaagtgagaaatttaggttttgtttttttaagttgagaatatggtataatattatggtttaattgtagtaatattttaattgaaattttaagtgattgttttgatttttaaaattttacgtttttttgagtaaagtatatattgtattggagagatgggttatattcgtttgttttaggtcgtatttaatttaaatttttagtttttttttttatttaatgttgtttttaattaatgttgttaggtaatttttgtagaatttatatgtttgtggtaatgttgaaagaattgagtaaaaattttgtttttagtttttgggataataaatttaatttgtttattttttttagatttatgatttcgtacgtaaagggttttaaaattatttttaatttatttattttttttagtaataaaataagtaagattttttttatgaagatttaaaattgagatttttaaattatttttttaagtatttttaatatatatagtatatgaatatgtatgtatatttttattaatatgagttttgtattttgaatgaaattttttagaattaggaattaa

SEQ ID NO: 1893 - DNA, 12590 bp, Artificial Sequence
  chemically treated genomic DNA (Homo sapiens)
gtttaatgtgtggtcgatatgtttaaatatgttttgtttttttttatttttattttttttattttttttttttttattttttttatttttttttttttttttttttttttttttttttttttttttgagatagggttttattttgatgtttaggttggagtgtagtggtgtaattttggtttattgtagttttaaattttttagtttaagtaatttttttattttagttttttgagtagttgggattatgggtatatgttattacgtttggttgatttttaaatttttttgtggagatgggtttttgttatgttgtttaggttggttttgaatttttgggtttaagtaatttttttggtttggttttttaaagtgttgggatgataggtgtgcgttattatgtttaattagtcgtatatgttgtttttttgttgttgttttttgtgtgtgatggagtttcgtttttgttgtttaggttagagtgtaatggtgtgattttggtttatcgtaattttagtttttcgagtagttgggattacgggtatgcgttattaagttcggttaattttgtatttttagtagagacggggttttattatgttggttaggttggttttaaattttcgattttaggtgatttattttttatttttaggttttttaaagtgttgggattataggcgtgagttattatgtttggtttatgttgtttttattttattaatttagtgggttaaaaatttattgttatatttagtagtttaaattatagaaatggattttgttatagttatgaaggtcggaagtttgaaattagtgttattgggtaaaaattaaggagaatttgttttttgtttttttagattttagggattgtttgtattttttgatttgtggttatataatttttatttttaatgttagcgttttggaatttttttttgttttatgtttatattaattttttcgtgtgtggttaaatttttgtttgttttttttttgtaaggagataagttaggttaatggtttttttttaaaatttttaattatatttgtaaaaatttttttttaaataaggtattatttataggttttaggaagtgatttttttgggggttttgtatattaatagtttgtaaatcgttatattttgttgttttttaaatgataatttattaagtttttgtttttattttttttgaatatttggtatgtagtttaatgtttggaataggtaggatgttattaaatgtttatattttttaatttttatttattttattattatttttattatttttgagatagagttttattttgtcgtttaggttggagtgtagtggtatgatttttgtttattgtaatttttagtttttgggattaagcgatttttttgttttagttttttgtgtagttgggattataggtatgtgttatgacgttcggttaatttttttgtatttttagtagagatggggtttttttatgttggttaggttggtttcgaattgttgattttaagtgatttatttatttcggttttttaaagggttaggattataggtgtgagttattacgtttggttaaaagttattaaatgtttgttgagtaaatggaagtaggttttaaataggtgtagggaaggaagtgggttaagaatttgaatgtagagtttgaaaattatgggtagatattaaaggattgaattgtggggggtatatttggatgttaggttaaagagtttggatattgttttatgggtaagaaagagtttatatgaagtttttgtataggtgatttatttatttatttatttatttatttatttaatatttagtagtaatatgtagagtttagtttttgggggaatgaggataggtgttttagaaaagatagtattgaatagttggtttttttttttattagagttgtgttttaataagttttagtatttttagtagttattgttttaagtgtgtggttattagattttttggtttatttagatttatgataatgaaatttttgtggattgtgtttggtatttttatataatattatttttttcgtgaatgttttttattatgcgtttttttttattaatagtaatttgttattttttaaatgtttgttgtgattttttattttttaatatttttggtgtgttttttgtaaatagcgtttaattggattttagtttttgttttaattttatagattttggatgggaaatttagtttatttatcgtgttacgaaggcgggtagttatggttttatttattttattttattttatgtttattattattaagtttattgtttttgttattatttatttttttttttaattttgtttttttattttttttttattttttttttaatttttatttagtaatttaggagttttattttgtttttttttcgtgagttgttattttttaatttttgagagttataatttaattaatttttttttgataatgtattaaaagtaaatggtaatgaagttttttttttattattaataaggttttttttttttagttgagagttataattaaattaatttttttttgttaatgtattaaaagtaaatggtaatgaagtattttttttaattattaataaggttttttttttttatttattaaattagatttttttattttttttttttttttttaattaaatgtgattttaaaatattttgatttttttgtgataagattttatttttttttttagttttaggttaatataatttttttttgaagtatgtagtttatgttttaagaatttttatgtggtattgttagtataaaattataggtatatgtggattatttatattgtatattttgtaagggttattgtttaatattattttttgttttgagcgtttgttttattttgaaatttttattgtgattgaattgtttcggtgacgggggaattttgaatatttttttttgaaaggggatattattgaggttttttttttgttttgttatagtggatatttttttttttttgtttatatagatgaattttgtagtagttatggtaaggatttttgattttattattagagtttttggatattgttttaaagttttttaggaattattttaatttttttttttttagatgtgatttgttttttttggaattttgtaagatcgtttttttatttttggtatttgggatttttagggatacgtttttttggtattttgtttatttttgttttttttttagttttttttggagtatttgttttttgtgtaatatattttttggaattgtttttttagtttttgttttttgttttgatgatttttatgtgttttttttttatattatgaagtatttattttatattattttttagtttgtttatttgtttttatttttatttttttttttttgaatttgtttgttgtttttttagttttttagtttcgtggagtatgtttagtgttgttgtgttttgatagaggttttttaagttattttgtagattttttgttgtattttttttttttttttagatttttataggaggaattttttaatttgtttttttttttttgtttaatgagtttttgtaaagggtttgggaagtgttttagtttttttgtgattgtgtgtttatattaatatttattatttttttaaatgtgtataaattttataatgtgaatagtgattatttttgagtgatttttttttttttttttatttttagtaattttttaaattttttatagttagtgtgtgataaggtggaaagatatttttaagattttgggtaaataattatgtttgagttttaatttttatattaataaaaaatgggtttagtgttatttttttttttgggttattaggggggtttttgaaagttgtgaaagtttttaagttaatttggatagagtaggcgaggttgacggtaggtgttttttttttttttgtgagttttatagggttatacgtgaatattggggatcgggggtgggtagtgggggtagttggagaattaaatgaggtgattgatatgaattacgtcgttttgataaaagtttttcgaagtagtgtgtttagaatttatttttaaagttatttggaatatttgtttttaatatgttggtaagtattatttttgatagttatttcgagttttagtttttgttgtgataattaggataggtagtttaggttggttgtggggattagagatagagtaggtagggttttacgttttttagggttttttaaggatagattttcgtttttatttttaaattacgttttttagataggaattaaatttttagagtttttaaattgtttgagttttgtttattttttgggttaatatatattttaaaggaattttatagttatcgtgtgaaaagtttgttatattgtatttgattttgggtattgaaagtagtatttggttgtagatattcgttttaaataggttttatttttttatttttgttgttgttattaggggagtttttagatttttttgtagcgtcggaataggcgtttaagacgtgtgttaatattgtaatagtaaatataatgaatttgtagttggggacgttgaggtcggagtggtggatgaaaggtggtcggagttttttttacgggtttaaattatttgttataggagaaggcgagcggtttcgttaagtaattggacgtttcgcgggcggggcgggggcggggtcggggttcgagttcgttcggaaattttcgttgtgggcgagtcggattcgttttttggtttttcgggtttaattacgtagggggagtgtcgggtcgtagttaggcgaggcgtatcgtgattggcggagatgtggagtgattggcggttatatcggttatttagtaggtcgagttggcgtcgtattcggggggtcgcgtttggagtggagggaggtcgaaggtttcgtttttgtttcgttttttcgtgtagaaggtcgcgttagtcggttttttagtagcgagtgtagattgttttttcgcggtcgtagatttttcgtttgcgtcgcgtttagttgttttcgaataatttttttgtcggtttagaggttttagggcgtcgtagcgtcgcgtgcggtttatttacgggtcggtgagtatttcggcgttggggtagtggcgcggtggttgtgggtagcgcgtaggaggcgggtaagagttttgaggtattgtttttttcgggttttagttttttttttcgagttgatgggtggttggttttaaagtttcgataaggttttcgaagttggagggtcgggggtttcgttcgttttgtaacgcgtaaggcgatttttgtttcgggttcgaacgggttattcggggggcgcgtttcggtttttcgcgcgttgtcgtttggagtttcgtcgcgggcgggatagtaggttcgagaggcggagcggtcggcgggtaggtttttttttcgcgtttcgcgttatttttttcgagttgtttcgttatgtttttttttcgcggtttcgggatttacggtcgttttcggtgttcgttcggtcgttggaacgcgtttgggttttcgggaggtgttgtgggggggaaggggggtttagttttttagggggattcggttcgttcgaggggtagtttaggggttattttgaatttttatagtttatttaggagcgttgtggtagtttttttttttttcggggttttttagtagagagttgaggggttttagtggtagtatttggattttgtttcgtatgaattttattttttggattattagttttttgtttgattaacgaaaattttttggagaattttatttagtttttttggatgtgatggcgttttggttttttatttatttagtagatgatgttatgaattttaaggaagtcgtatttgtgtaattttttattatttagatttaatttttttagtagttttaggcggagaagttatagttttcgtttgatattttaggaagttgaggtttagtagggtttggtgttagtttaggattacgaagttgatggggtagagtttggtgtgaggtttttgttttatttttttagaagtagtttcgtttttttttattttggatagtgatttttggtatttggtttagggttttgtagtttgtaaagggtttttttttatgttagtatttattatttaaggagttgtgttttgggtattttatgtgttggttgtttgttttttgtagtaggagagggagtttacgggaagtttagaggttatttttgttattgtcgttatttgtttatttttgtgtttaagggtttgtgatttttatggggttttcgttgtatttaattagggatttggagggaggtttttttatattttagttttttttttttatttgttggtttgtttttttttcgtagatataggaaaagttggttgggagattttattttatttttttttttaggatggaagagtatggagggcgtttttgatttaggttttttttgtttatttcggattagtgttggataggtttttggggttggttatagaggggattttagtttagttttaatttttagagatgtttgtattgttagatagattcgaaatatttatttttgacggtggtaataagaattataataggtcgggagttttatgtttatacggtttttttttttttttatttttttattttcggaagtggtattattatagttagttagttttagttataaattagattattttttgtgttttttattttttatttttagttgggttttttttggtttttgagttttattcggatgtttgttttggtttaggattttcgtttttttttggacgatttttaggtttttttttggtttcgattcgggtttggttgtacgtagttttgttggttttttagttgttatttttttttgggttatcgggttaggttcgtttttcgagttaggagtcggtattttttcgggtttttagggattcgtttcgttgtttatttagttttttttttttgtgttttttttttagtagttattttttagttatttgcgtgtttttggttataagtttggtttattgtttttttgttgtttttttttttgggtataatttttgttggaatgtttagttattttttagtttgtttggtttttgtttgtttgtttagaaggtttagttaagtttttttgtaggatttttggtttgtttttttttatagtggagtgagggtttttttttgtgtcgtttttgtgggtgtttgtttaggtgttaattttttttatttagatgaagttgttttaatgttggttttggataagatttttttagggtaggggggtttagtatagtgtttggtataagatggatttatttttagtttatatttgttgtttatttaggttaggtttggagtaggtgttaggtgtgtggtgggggtttggttattatggtcgttatgaatgttgtttggggtagttttaatttaaatttttttgtttttgtgaatgtgttatattggatagagttggaatgttttttggtttgttttttaatattttgagtaaaaataggtatttgggatttattaagggttttgtgtttttgttttgaggagtagttttgtgttagggggttgggttaggttaggttagagtagatattttagggttaggattttttgggtttgtttttttagagtttgtttatagatgggttttaaaataatatttgttttaattttaaaaatattatatatttattatagaaaattagggaaatatgtttaaaagaagaataaaatgaaatcgcgtataagttttatttttagagataataagtattttttttagggggcgttttttttcgttttttggtagataaattttgtttttattttaaatagatttcggttaatattttttgttgttttaaattttgttttaatagtgttaggtttattttttttttgttttaaaacgtttatgtacgaggttacgtttattagttgtatagcgttgtattatatggaggggtgtaggttttatagttagtttttttttggatagtgttgaaagtgttatatgatggatattgtgtgtgagtttcgagggtatttttagtgatttttttggattggtattttggaggtagaggtattgattagagagagtgaatattattttggttttttataggggttgtttttgaggtattggtttgggagatggggttgtttttttagagagaatagaatgggggtggtttgggtgagggttagagtttttagggtagaaggttacgtgtggttattttgttgcgggtttgagtggatgtatggtgtttgtagttttttttaggtggcggttttttagttgaattttttggtgtcggtgtttgtgtttggacgggataaaaatatgttttattgtttatgaggaaagaatgttagtaattttggttttgtggattttatatagtgacggtttttaagttattgttgtggttattagtagggagttggggttgagtgttttatcgtgtaggtggggatttgagggtgtagagtggatgtagttggagatgtttggatgttggggtttgggggagggatttgttaaggttttatagtattattgtttggatggtgtttttgttttaggttaggttgttttaggtttttgtttatatgtattaagtgtttaacgtatttttggtaaggtagtcggtttttcgagtggataagttgtagttttgtttttagggtttatagtggttgtaatatgtaggaagatttagagagggaaggattagatagtaggtttttttatcgggagattttttttgatttttattgtttttgtgattaattatgattaggaattgttgtgtttgttttgaaataataagttttttgatttaaattagatttggttaatttttagggaatttgaaaattaatttttttgtatttatttatttttattaattagagattttattttaaatagtttttttttaattgtagtgtgatatatatggtatataggttagttagaatttgtttttttgaaattttttttatgaagtgttttttaattgaatatgtttttgtttagtatttgggagtaatggtttagggtttttttttttttttttttttttttttttttttgagacggagtttcgttttgttatttaggttggagtgtagtggcgcgatttcggtttattgtaagttttattttttgggtttatattatttttttgttttagtttttttagtagttgggattatcggcgttcgttattacgtttggttaatttttttgtatttttaatagagacggggttttattgtgttagttaggatggttttgattttttgattttgtgatttgttcgtttcggttttttaaagtgttgggattataggcgtgagttatcgcgtttggtcggtttagtttttttttaatgtttaatagtttgtttttttttttgttatatacgtaatttttatagtatttttatgtgggaggtgttatttttattttatatatggggaaatagatatagtgaggttatgtggttattagtaagggtaatcgacgttttatattatgttgtttttagttgtaatttttagtagagggagggttttgatggagaggtgatcgtttgagtgttgtgtgtttatttgagtaggtgaggaagatagggattcgggatagatatagtttggaagtttttataaaggaggtatcgttggagtttttgatttgaagggtgtttagggtttaggttgggggaggggggtaagaaggtatttcgggaagagggttttgtagaaatagaagtgtggaggttagtatttgtatgttgatgttgaagggtagttagtgttttgtagtgaatgggtttcgggagagagggtgtagtggtatggcggtttgattttaaagtcgttttttttagaaatgagtttgtagaagtattagaattgggtaggtttggatttgaattttaggtttggtatttggagttgtttgattttgagtaggttttttttttttttgtatttgggtttttgtttgtgaagtggggtgaggttgaaggataaaatatttttttatttataattttgggatgataataggatttattttttaggtttatgcgaggaatttacgataataggatttattttttagggttatacgagaaatttatgagaaaagataagtatagagaatagagtcgttggttttgatggtagagatgttttggcgtaggttagtttttagtaaaggtgttttttttttttgtttgagaaagtgatatttgatttcggggtagtgggaattatgggagagaaggtagataaggttacgtgttatttgaagatttgattttttattattttaggtggttcggtggtttgtaggatcgtggttttgtttgtttatagcgtgtgggttttacgtgcgattttgtatttttttgttatagttgattaaggggatatttaggtttgtacgtgtagttaaatggttgtttttgtggaaggtgttagttttcgggagttgggaatttggaaataggatggagtaggtttttaagtttgattatgtatggtttgtatttgggggatgtattcgggggtgtttgattatgtatggtttgtatttgggggatgtacgggggtggggtggggggggggggtgtgtttgattatgtatggtttgtatttgggggatgttttatattaagggtttagtttttttgagggaggaacgtgtggattgaaatttgtagagtttttgagcgatattagtttgatttttaggatttatttgtagcgggaatggagtagaaattgttgtgtgtggagtttggggttatttttgatttttttagttatagttgtttttaaaagtgatttttgggtatttatttagatttggttgtttagtgttaagcgttgggtgtttagaggtggttaggggattttttcgtgttgtttatggtgtttggttttattggtttttatagttgtttcgtttttatttttagatgaggaggttgaggtgtagagcgggatgtgggttgtttaggattatatagttggtgggtatagagttaggagtatagcgttgcggtagtttggggttgggagcgagattttttgttattagtttttttttgttttgtgttttagaggatggttgtggttttgagtttgggagggttatttgggaatttgaggaaaagtttttatagttttatatagtagtaggtttaaggtttagtagtgttaggggtttgtattttatttttaacgtcgtttatttagggtttattcgggttcggggttcgggattttgtagcgtttttagttttgtgtttgtggtcggtggttgttttttattatagggatggtggtgtttttttatgttgttaagtagtatgtgagggtttttgttgaataaaataaagtttttgtttcggcgtgatacgggttacgggatttttgtttattttagttttttttgatgtttttatcgtattgtttgttttagtttgttttttattttttgtgttggtttttggggtattagttttttgatttcggtgttgtggtttgggtttggggtgggggttgtggagcggtagatttgggtatgaattttagttttatttatttggttttttttttttttttttttgttttttttttttttttttagtttttttttttttttatatttatttaattttatttagtattagcgtattagttttttagggttttcgtaagaaattattggaaatttggtggtttaaaataatagaggtttgttttttgatggttttggaggtagaagtttgaagttaaggtgtgggtagggtgggttttttttggaggttttgagggaggtttagtttttcgtttttgtttagtttttggtagtggttagtggtttttttgttttttggttattgttattcgttttcgtatggttttgttatatttttttttttataggttattagtttttggagttagggtttttttattttaggttgattttattttaagatttttaaatatatttttaaagatttgtttttttaaataagggtatatttatagatattggtgggtatatgatgtggggtttaatttagttttttgtagttaggttttatatgggtgggttttgggtgttgttattattattttcgttttttggatgagggaaggttagggttgtgtggtttatgtttagtgaggtagggattttaggtttcggtatgtgtaggtttgagattgtaagtgttatgttatttgtagagttacgtgggtgagtgtttttttatggttttttttttggaagcggtgttggtttatggggattgtattgagtgttagcgagattttgtatggagtgtttggtagtttttatttgtttttttttgtttttttgtttttagtagatattaagtgttagagcgggttttgtcggtgttggatgtgtttgattttgattttttttttagg

SEQ ID NO: 1894 - DNA, 12590 bp, Artificial Sequence
  chemically treated genomic DNA (Homo sapiens)
tttggaagaaaagttaaggttaggtatatttagtatcggtagagttcgttttggtatttagtgtttgttggagatagaaaagtagagggaggtaggtgggagttgttagatattttatataggatttcgttgatatttagtatagtttttatgggttagtatcgtttttagggaggaaattatgggaggatatttatttacgtgattttatagatggtatggtatttataattttagatttgtatatgtcgaggtttggagtttttgttttattgggtatgagttatataattttggtttttttttatttaagaaacggggatgatgatagtaatatttagagtttatttatgtggagtttggttgtagggggttgaattgggttttatattatgtgtttattaatgtttgtgaatgtgtttttatttggaaaaataggtttttgaagatgtatttaaggattttgaaatgagattagtttggagtagggaagttttggttttaagagttgatggtttataggaagagaagtgtaatagagttatgcggagacgggtgatagtggttaaggagtaggaggattattggttattgttagaagttggatagaggcgaggaattgagttttttttagagtttttaggagggatttattttgtttatattttgattttagatttttgtttttagaattattagagaataaatttttgttgttttaagttattaagtttttagtagttttttacggaagttttagaaaattaatacgttggtattgagtaaagttaagtaaatatgagaggggaagggagttggggaggggagaagagggtaggggagagaagagagggagttaaatgggtggagttgggatttatatttagatttgtcgttttatagtttttattttaggtttaagttatagtatcgaagttagaggattgatgttttagaaattaatatagagagtaaaaagtaaattaaggtaaatagtgcggtgggggtattagaagagattagagtgagtagagatttcgtgattcgtgttacgtcggagtaagggttttattttatttaatagaggtttttatatgttgtttagtaatatggaaaaatattattatttttgtaatgaaggataattatcggttatagatatagagttgaaagcgttgtaggatttcgagtttcggattcggatgggttttggatgagcggcgttaggggtgggatgtaaatttttggtattgttggattttgaatttgttgttgtgtgaggttgtggaaatttttttttagatttttaaatgatttttttaagtttagggttatagttattttttgaggtatagagtagggagaggttggtaatagagagtttcgtttttagttttaagttgtcgtagcgttgtatttttggttttgtgtttattagttgtgtggttttgagtagtttatatttcgttttgtattttagtttttttatttgaaaatggggacggggtaattgtgaggattagtgagattagatattatgggtagtacgagggagttttttggttatttttgaatatttagcgtttggtattgagtagttaggtttgagtaggtgtttagaggttatttttgggggtagttgtgattggaagagttaggagtggttttaggttttatatataataatttttgttttattttcgttgtaaatgagttttaaagattagattggtgtcgtttaagaattttgtagattttaatttatacgttttttttttagagggattgagtttttagtgtaaaatattttttaggtgtaaattatgtatggttaagtatattttttttttttattttattttcgtgtattttttaggtgtaaattatgtatggttaagtattttcgggtgtattttttaggtgtaaattatgtatggttaagtttgggagtttgttttattttgtttttaagtttttagttttcgggaattggtattttttataaaagtagttatttaattgtacgtgtagatttaagtgtttttttagttagttgtggtagagaaatataggatcgtacgtagaatttatacgttgtgggtaaatagaattacggttttgtaggttatcggattatttgagatggtgaaaagttaggtttttaaatgatacgtggttttgtttatttttttttttatggtttttattgtttcgaagttaggtgttatttttttagatagagagagagggtatttttattgagggttgatttacgttagggtatttttgttattaagattaacggttttgttttttgtatttgtttttttttatgagtttttcgtatggttttggaaggtaggttttattgtcgtgagtttttcgtatggatttggaaggtagattttattgttattttagagttatagatggggaaatgttttattttttaattttattttattttatagataggaatttaggtgtagggaggggagggatttgtttaaggttaaatagttttaggtattagatttgaaatttaaatttagatttgtttaattttaatgtttttgtaagtttatttttgaaaaagacgattttgaaattagatcgttatgttattgtattttttttttcggggtttatttattgtaaaatattggttattttttaatattagtatataaatgttgatttttatatttttgtttttgtagggtttttttttcggaatgtttttttattttttttttttagtttagattttaagtattttttaagttaagagttttagcgatattttttttgtgggagtttttaagttatgtttgtttcgagtttttgttttttttatttatttaggtaaatatatagtatttaggcgattatttttttattagagttttttttttgttagaggttatagttggaagtaatatggtgtggggcgtcggttatttttattagtggttatatgattttattgtgtttgtttttttatatgtaaaatggggatagtattttttatataggggtgttatggggattacgtgtgtggtagaagagaaagtaaattattgggtattaaaaaaaaattaagtcggttaggcgcggtggtttacgtttgtaattttagtattttgggaggtcgaggcgggtagattataaggttaggagattaagattattttggttaatatagtgaaatttcgtttttattaaaaatataaaaaaattagttaggcgtggtggcgggcgtcgatagttttaattattggggaggttgaggtaggagaatggtgtgaatttaggagatggagtttgtagtgagtcgagatcgcgttattgtattttagtttgggtgataaagcgagatttcgttttaaaaaaaagaaaaaagaaaaaggaaaagaaaaattttaagttattatttttaggtgttaaataaaggtatgtttagttggaaaatattttataaaaggaattttaggaaaatagattttagttggtttatgtattatgtatgttatattgtagttaaaaaaaaattgtttaaagtaaaatttttggttagtaagaatggatgaatataggaggattaatttttaggttttttgggggttggttaagtttggtttggattaaagggtttgttattttaaaataagtataataatttttggttatggttggttatagggataatgaagattagaaaagatttttcggtggaaggatttgttgtttggtttttttttttttgagtttttttgtatgttatagttattgtgagttttgagggtagggttgtagtttatttattcggaagatcggttgttttgttaggaatacgttaagtatttaatgtatgtgggtagaagtttgaggtagtttggtttagggtaggagtattatttaggtaataatgttgtgggattttagtaagttttttttttagattttagtatttaggtatttttagttgtatttattttgtatttttagatttttatttgtacggtggggtatttagttttaattttttattggtgattatagtaatggtttagaagtcgttattgtgtaagatttataaaattaaagttgttagtattttttttttatgagtaatgaggtatatttttatttcgtttaaatataaatatcggtattaaggagtttagttgagaggtcgttatttggagagggttgtaggtattatgtatttatttagattcgtagtagaatgattatacgtggttttttgttttaagggttttggtttttatttaggttatttttattttgttttttttgggggggtaattttattttttaagttagtgttttagaaatagtttttgtgggaagttaagatgatgtttattttttttgattagtgtttttgtttttaggatgttagtttaggggagttattggagatgttttcggggtttatatataatgtttattatatggtatttttagtattgtttagaaaggggttggttataaagtttatatttttttatatggtgtaacgttgtatagttggtaaacgtgatttcgtatatgaacgttttgagataaggaaaaggtgggtttaatattgttaaggtaggatttaaagtagtagaagatattagtcggagtttgtttaggatgaaaataaaatttatttgttaaaaaacggaagaaaacgttttttaaaaaagatatttgttgtttttggggataaagtttatgcgcggttttattttattttttttttaaatatatttttttagttttttataatgaatgtgtgatgtttttgaaattaaagtaaatgttattttaaaatttatttgtgagtaagttttaagggagtaggtttaggaggttttggttttgggatgtttgttttggtttggtttgatttagttttttggtatagggttgttttttaagataagggtataaagtttttgatggattttaggtatttatttttgtttagagtattaagggataaattaaggaatattttagttttatttaatgtggtatatttataggaatagaggggtttgaattgggattgttttaagtagtatttatgacggttatagtggttaagtttttattatatatttggtatttgttttaggtttggtttggatgggtagtaggtgtggattgagggtaggtttattttgtgttaagtattgtgttgggtttttttgttttagagaagttttgtttagggttagtattggagtagttttatttagatgggaagggttaatatttaaatagatatttataaagacggtatagaagggggtttttattttattgtgggaagaggtaggttagaaattttgtaggaggatttgattgagttttttggataagtaggtaggagttaggtaagttgggaggtggttgggtattttagtaggggttgtgtttagaagaggaggtagtagagggatagtgagttaggtttgtggttaggaatacgtaggtggttgggaggtgattgttggagagaggatataggagggagaggttgagtgagtagcgaggcgggtttttgagggttcgaaagaatgtcggtttttggttcgggaggcggatttgattcgatagtttagagggaagtggtagttgaagaattagtagggttgcgtgtagttaggttcggatcgggattagggaggagtttgggggtcgtttagggagaggcgagggttttgaattagggtaggtattcgagtgaggtttaggagttaggagagatttaattgggagtgaggaatgaagggtatagggggtggtttggtttgtggttggggttggttggttgtggtggtattattttcggaagtagggaagtgggaggggaggggagtcgtgtaggtataaagttttcgatttattatgatttttattgttatcgttaaggatgggtgtttcgggtttgtttggtagtgtagatatttttgggggttgagattgagttgaggttttttttgtgattagttttagaagtttgtttagtattggttcgggatgggtaggggaggtttaagttagagacgttttttatgtttttttattttgggaaagaaggtgagatggggttttttagttaattttttttgtgtttgcgaagggaggataaattagtaggtagggaaaagaggttgaaatgtggagaagtttttttttaaatttttggttggatataacggagattttatgggaattatagatttttggatatagaagtaaataggtggcgatagtgataaaggtggtttttgggtttttcgtgggtttttttttttgttgtagagaataggtagttagtatatggggtatttagggtatagttttttgagtgatggatgttggtataagagaaagttttttataaattgtaaagttttgggttaaatgttaggggttattgtttaaggtgaggagagacggggttgtttttggagagatagggtagaggttttatattaggttttgttttattagtttcgtggttttgggttggtattaaattttgttgagttttagttttttggggtgttaaacggggattataattttttcgtttaaggttattgagagggttaaatttgggtggtggggggttgtataaatgcgatttttttggaatttataatattatttgttaagtgggtgagaggttagggcgttattatatttaaaagggttgggtaggattttttagaaagttttcgttgattaaataaaaagttaatgatttagagggtggagtttatacgaggtagggtttaggtgttgttattgaaattttttaattttttattgaggggtttcgagagagagaggaattgttatagcgtttttaagtgggttgtggggatttagaatgatttttaagttgtttttcgggcgggtcgggtttttttgggggattgaatttttttttttttttataatatttttcgggggtttaggcgcgttttaacggtcgggcgggtatcgagggcggtcgtgggtttcgggatcgcgggggaggggtatgacggggtaattcgggggggatggcgcggggcgcggggagggggtttgttcgtcggtcgtttcgtttttcgggtttgttgtttcgttcgcggcggggttttaggcgatagcgcgcgggggatcggggcgcgtttttcgggtgattcgttcgggttcggaataggggtcgttttgcgcgttgtagagcgggcgggattttcggttttttaatttcggggattttgtcgggattttggggttagttatttattagttcggaaggggaaattgaggttcgaagaggatagtgttttagggtttttgttcgttttttgcgcgttgtttatagttatcgcgttattgttttagcgtcgaagtatttatcggttcgtgagtgggtcgtacgcggcgttgcgacgttttggggtttttgggtcggtagaaaagttgttcgggagtagttgaacgcggcgtaaacgggagatttgcggtcgcgggggagtaatttgtattcgttgttgaagagtcggttagcgcggttttttgtacgagggggcggggtaggggcggggttttcggtttttttttattttagacgcggtttttcggatgcggcgttagttcggtttgttgagtggtcggtgtagtcgttaattattttatattttcgttaattacggtgcgtttcgtttagttgcggttcggtattttttttgcgtggttgggttcgaggggttagaaggcgggttcggttcgtttatagcgaaagttttcgagcggattcgggtttcggtttcgttttcgtttcgttcgcggaacgtttagttgtttagcgaggtcgttcgtttttttttgtaataggtggtttggattcgtggaaaaggtttcggttattttttatttattatttcggttttagcgtttttaattgtagatttattatatttgttgttgtaatattaatatacgttttgagcgtttatttcggcgttgtaagagagtttaagggtttttttaataatagtagtagagatggaaaaatggggtttgtttgaaacgagtgtttgtagttaagtattgtttttagtgtttagaattaaatgtagtgtagtaagttttttatacggtgattgtgggatttttttaaagtgtgtgttagtttagggagtgggtaaggtttaggtagtttggagattttgggagtttggtttttgtttgggaggcgtggtttggagatgagggcgagggtttatttttgagaggttttggggaacgtgagattttgtttgttttgtttttggtttttataattaatttgagttatttgttttagttattatagtagaaattggggttcggagtgattgttagagataatgtttattaatatgttgggagtaaatattttagatggttttggagatgagttttgaatatattatttcggaggatttttgttaaagcggcgtagtttatgttagttattttatttgattttttagttgtttttattgtttattttcgatttttaatgtttacgtgtgattttgtgaggtttatagaggaaggaagaatatttgtcgttagtttcgtttgttttgtttaggttggtttaggggtttttatagtttttaagggtttttttagtgatttaaggagggaggtggtattgagtttattttttattgatgtgaaaattgaggtttagatatagttatttgtttaaagttttgaagatgtttttttattttattatatattaattgtagaaaatttggagaattattaaaagtagaaaggagaaaaaaaattatttaaagatgattattgtttatattgtgagatttatgtatatttaagaaaataataaatattaatgtgaatatataattatagagaggttgaagtattttttaaattttttgtaggggtttattaagtagagagaagaggatagattgaaaagttttttttgtggaggtttaagggaagagaggaagtgtaataaaaaatttataagatggtttaaggagtttttattagaatatagtaatattgaatatattttacggagttaagagattgaaaaagtaataggtaaatttagaaagagaagagtggaggtgaggataaatgagtaaattggaagataatgtggagtaaatgttttatgatgtagaggaaaagtatatgaaaattattaggataaaaagtagagattggaaagatagttttaggaggtgtattgtataaaggataggtattttaggaagagttggaggggaaatagaggtgagtaaagtgttaggagaacgtgtttttggaaattttagatgttaaggataaagagacggttttgtagagttttagaaagaataggttatatttaaggggagaaaagttgaagtggtttttaggggattttggagtaatgtttagggattttgatgataggattaaggatttttattatggttattataggatttatttatgtggataaaagagagaaaatatttattgtggtaagatagagaaaggattttagtgatgtttttttttagaggaagatatttagagttttttcgttatcgagatagtttaattatagtagagattttaagatagagtaaacgtttagaataggaagtggtgttaagtaatgatttttgtaaaatatatagtatggataatttatatgtgtttgtgattttgtattagtagtgttatataaggatttttaaaatataagttatatgttttaagagaaagttgtattagtttggaattaaaaaaaaaaatagaattttattatagagaagttagaatattttaagattatatttggttgaggggagaaggaggaagtaaaaggatttgatttggtgagtggggaaggaaagttttattggtggttgggaggggtgttttattattatttatttttaatatattagtagggaaagattggtttaattatgatttttagttggggaaggaaagttttattggtggtggggagggggttttattattatttatttttaatatattattagggaaagattggttgaattatgatttttaggaattggaaagtagtaatttacgggaaagaagtagagtagaatttttgaattattaggtagaagttgggggaggggtggagggagagtaaggaagtaaaattaagggggaaagtaaataatagtaagaataataagtttaataatagtaaatataagatgagataaaataaataaagttatggttattcgttttcgtaatacggtgaatgggttgaattttttatttaaagtttgtaagattggggtaaaaattaaagtttagttaagcgttatttataagaaatatattaaaaatattgagaagtagaagattatagtagatatttgaaaaatggtaaattattattgataaggaagaacgtatgatggaaagtatttacgggaagagtggtattatgtaagggtgttaggtataatttataaagattttattgttatgaatttgaatgagttagaaaatttagtagttatatatttaaagtagtaattgttagaaatattagaatttattaaaatataattttggtgggagaaagagttagttgtttaatgttattttttttaggatatttgtttttatttttttaagagttgagttttgtatgttgttgttgagtattgaatgaatgaatggatggatggatggatgaattatttatgtaaggattttatataagtttttttttgtttataggatagtgtttaaattttttaatttgatatttaaatatattttttataatttagttttttgatgtttgtttatgatttttagattttgtatttaagtttttggtttatttttttttttatatttatttaaaatttatttttatttatttaataaatatttagtgatttttggttaggcgtggtggtttatatttgtaattttagttttttgggaggtcgaggtgggtggattatttgaggttagtagttcgagattagtttggttaatatggagaaattttatttttattaaaaatataaaaaaattagtcgggcgttatggtatatgtttgtaattttagttatataggaggttgaggtaggagaatcgtttgattttaggaattggaggttgtagtgagtagagattatgttattgtattttagtttgggcgatagagtaaaattttgttttaaaaataataagaataataataaaataaataaaaattaaaaaatataaatatttagtgatattttgtttgttttaggtattggattatatgttaagtatttaaagaaaatgaggatagaggtttggtgagttgttatttgaaagatagtagagtgtggcggtttataggttattggtgtataaggtttttaaagagattattttttggagtttgtgaatggtattttatttagaaaagggtttttgtagatgtgattaaggattttgagaaggggttattagtttggtttatttttttgtaggagagaggtagatagagatttgattatatacggagaagttgatgtggatatagagtagagagagattttaagacgttggtattgaagataggaattatgtggttataagttaaggaatgtaggtagtttttggaatttggaagagtagggaatagattttttttgatttttgtttagtgatattgattttagattttcggtttttataattgtggtagaatttatttttgtggtttaagttattgagtgtggtaatgagtttttagtttattgggttaatgagataagaataatatgggttaggtatggtggtttacgtttgtgattttagtattttgggaggtttggaggtggggggtggattatttgaggtcgggagtttgagattagtttgattaatatggtgaaatttcgtttttattaaaaatataaaattagtcgggtttgatggcgtatgttcgtaattttagttattcgggaagttgaggttgcggtgagttaagattatattattgtattttagtttgggtaataagagcgaaattttattatatataaaaaataataataaaaaaataatatgtgcggttggttgggtatggtagcgtatatttgttattttagtattttgggaggttaagttagggggattgtttgggtttagaagtttaagattagtttaggtaatatggtaaaaatttatttttataaaaaaatttaaaaattagttagacgtggtggtatgtgtttatagttttagttatttaggaagttgaaatgggaggattgtttgaattggggagtttgaggttgtagtgagttaagattgtattattgtattttagtttgggtattagagtgagattttgttttaaaagaagagaagagaagagaagagaaaagaaaagaaaaagtaaaagagataaggaaagaaaaagtaaaagagataagaatagaaaagaatagaatatgtttgggtatgtcggttatatattggat

SEQ ID NO: 1895 - DNA, 11523 bp, Artificial Sequence
  chemically treated genomic DNA (Homo sapiens)
attgtttaagacggaaagattttaagattgtgtgattttttttttttttttttttttttttttttttttataggtgtagaataattttttttttttttttcgtggttttttttttttttattttttttttttgttgtttgtaaagttgaatttggggttaggagttttaattgtaattttagattggaattttagatggtgcgtttaggattggaagtaatttttagtttattaattttatgggtttacgtatttgttttggttacggtttggtttttatttttattgtggtattaatgtagaataaattgagatatattttttatataattagttttagaatttaaaaagatttacggtataataatagaggtagtgtcgcggaatttttttattgaggattttcggggagttcggggattatttcgcggtggtattagaatagacgagtaattttagcggttttaggtattgcgaattgggggagagggggaaattttgtatcgtattcggtagtatttaacggtttcgggtttttagatagggttagcgaggagagttaggatagtaagtggggattggttaaaaaaaatcgatttaattttgaaatgattagaagaagttgggagtagttattataaagttttttttttgtttttttttttttttaattgaaggaatgacgttgaaatttttatcgttagcgcggggttgggaattattttaaatatttgttttgtagtttcgagtgggtagatttcgaagagttggagtcggcggggaggggaggaatagttgttgggttgttttgcgcgtggggttcggggcgcgggtttcggggagaggcgttagtcgaaagtttgtttttttttcgcgataggtagtagcgaggtcgagttattttttattacggtttgcgggtttcgcgcgtagtgtggttgttttcgtttttgatcgatcgtagcgttttggggtgtttatttagttgttcgcggtcgttgggtgattttcggagggcggtttaggcgtgcgtattggtttttggggttgcggttgtagtagtttagtttcgcgttttgttagatgtagtggatagcgtcggggtgaaagtaagggttgagaaatttttattgttttgtttttatttagtttcgatttttttatattgtaataattatgtattttcgaggtcgggatgtttgcgttttgttagtgtattaacgttatatggttttttaggggttgttttcgtttttgtattttattagttttgaagaggtagaggggtggtgggtaaaatttttaattggacgttgagagattcgggttttagttcggcgttgttattaatttgttttttgtttttaaatagtagtagtaataaaaattgtaaagttgattgagttaaaggtttatattgtttttttatttaatttttagaataattttatgaggtgggcgttagtattttattatttcgtttgattagtaaggaaattgaggtttagagagattgcggaattcgtttagggttatatagttgttggttatttggtagagttgaggttttattttggggttattaattttttgttttttatcgttgcgttttatagattgtttttttttcggttgtttgggttttagtttttttttttgtaaaacgagaagtttaatttgtagttttttttgttaatcggtggtttagattaggaatttttgttatagatttcggcgttgataggggtaagaaggtgggtgaaagaagggggcgtttagttttttatagtttgtttttttttgggatttcgcgaagggcgggtttcgcgagttaaaggaggtataggagagcgtttatcgttcgcggcgggtgaaggtgttatttgttttcgtgttaggttgtgagttttggtgtttagtttagggcgttaaggttagtgtagttggtatgttttttttggaaaattttaggtttttcgtagagaacgttatttataataaagaagaggatagagaggtatggagcgttttgcgattgtaggagtacgttagttttttagcgttggtttagtgtcgtttgggttttcgggtatgtggattcgttggggtcgtacggagattttttgtcgggtttttggggtttttcgattgcggttttttagtttagtattttttttttggtttcgtaggttgtagggaattttttttatttttttagtcggagaagtttaagtcgggcgagggggtatttcggggttcgtatcggtgtttttttttttttcgtttttataaggattttgagaaaataaatggtagaggagagaggagttttatatttgtttggtttttttttttttttatttatttttatattttttatttcggggtaaaaatttatttttgaaaaatgttggtagagatttacgtgtttttgttttatttgggttttataaatataacgatttatatttaagttagtttttttttagataatttttttttttttcgttaaaagtgttaaggatggtaaaagaagaaataattttaattttttcgtttggaaatgaaagttttcggttttttataaagggtttttcgttttttatagttgagttttagttaagaaaaacgatttttaagtagaaataataggcggggagaaggaagggagatatagggatttggggggtttttagggtaattggtagtgaattttgtttcgagagttttttttttatttaaaaaattaaacgcgcgagtttcgcgaaaggtttagggatagatcgtgtgggagaggattgagtagagagcgtgggggtagtgttttgtagaatttttttttttttaataataattttaaaagtttttgagtggagacgacgtaaagttaagtagtaaaggtggtttgggaggtaagcggagggtttaagtgtcgtatttttatttttagggttttttgcgtttacgggatgcgtatttttaagaagtgcgtttttcgagtaagttttgggttcgtatatatttcgggttcgtagttagaatttaatggcgataacgtttatgtaatgtaagttaaaaattaaagcgtaaaaaattattatgttatttattgaaacgttattttttgttaaattgtaattattttgttttatataagtttggttggaaagtttgtagttttagttcgggttagttaggtataggaggtcggattgtaatcggttgtttttttttcgtcgcgtttggtcgttttacgttgcgtcgtcgttgttgttttttggcgtttttgggattttatacgtatttttgaaatacgtttcgtttcggttttcggtttttttttttgtttaggggttgttttttaatagatattgatttttttagaagatttaaaaattaaattaaaatattttttattcgttttaaatatttgttttggggcgcgggggttgttaaatagagattagacgaagggagttagatttagcgaagtttttcgagtttttaaagattcgaatattaattcgcgttcgtgggtcgatggaggttttttttattttattttttggtttttttaattggttttcgttttttggttaattattgagtaattagaatggtattttcgattagggttataggtagtgttcggcggagtggttttaggagttattcgttttttgtcgggtttcgtatttaaatttttttttttattttttttttttaaattgggcgttaggatgtttcggtcggaatatacgtaggttttgggcgtttgtttaagggttttttttttttttaaattagtcgttgttttttcggtttaatcgtagaagaattagatattttttattggaaagggaaattaagtgttgttgattttaattttaggtaggcggtaatcgtttttcgtttggcgtaaattttattaagtaaataattattagtcgatcgaaatacgttcggtttataattggtgtaattttcggttatttaattgagggacgttcgtttttagtttcgatttttggaatttataaagggttatttttttttttagtgattttaagattatggttatttttttattcgatagttttagaagtaagagttagatttaagggtgtaaagtaagggtatacgtttttttgaagtttgattgagttttttttgcgtttttttgaagttttcgtttttttggagtttatttgtttttttttttaaattatttttttagattaataattttatttttatttttatcgtattcgattttgttcggatttattgtttatttgaacggattttttagtgagacgaggtttttatattggcgaaggttaagaaggggaggtggggggagggttgtgttatatcggttagttgagagcgcgtgttgggttgaagaggagggtgttttcgagagggacgttttttcggattcgtttttattttagttgcgagggcgtttttaaggagtagcgcgcgttgtttggtcgggtttgggttgttgagtgaatggagcggtcgagttttttggttttttttttttttcgcgtcgtcggttttttttatttgagttttgggaagttgagggtagttaggtagttggggtaaggagtttaaggtagcgtttatattcgggggtttttcgtaattcgatcgtttgttcgtttttttatttttcgtttttttttttatttatttatttatttatttatttatttagagtcgggacggtagtttaggcgttcgggtttcgtcgttttttcgtcgcgattttggatttttttttgttgtaggattcggtttttacgtgtgtttcggagtcggcgttttagtatacgtttcgtttcgggtttgggtgtttatagtagttagagtagtagggagttcgggattcgggcggtatttgggttaagttaggcgtcgtcgaggttagcgttgaacgtttttagggtcggaggagtcgcggggcgttcgggtttgagtcgtagtaaatgggtttcgacgtgcgggatttgaacgcgttgttgttcgtcgttttttttttgggtggcggcggcggttgtgttttgtttgtgagcggcgcggcgtagtgggcgtcggtgttggattttgcgttttcgggcgtttcggtttacgggtcgttgggcggtttcgcgtcgttatcggtttcgtcgttattttcgtcgtcgtcgttttatttttttattaaataggagtcgagttggggcggcgcggagtcgtacgaggagtagtgtttgagcgtttttattgtttattttttcggttagtttattggtatagtcggagtttgtcgttacgggtttttcggttttttttcgtttagttaggcgttattcggttaggttaggatgttttttaacgcgttttatttgtttagttgtttcgagagttagttcgttattcgtaattagggtaagtaggtcggggagcgttttttacgcgcggggtagtggcgttagggatttttcgttttaggatattttttttttttattttttttgatcgtagtttttatttagttgttttttaagggtcgtgaggatagcggaagcggcggttggggaggaggtcggagagtgggagtgtacgtaggtattggttttcgatattttttaaagttaggtagagttaggagtttgattgttcgtaagagtcgggagggcgtttggggttttttagagttcgagagatttcgggattgttagtttttacgggagtggaattaggagatcggcgtagtgtttggttttgttttggggagagttttgttaattaaggaaacgttaaattgttattaagcgtagcgttttttagacgtttggattttggattcggagtgggattagcgcgggggtgagcgtttgtgttgtgttgttttcgtagcgttaaaatgtttaggagtatttttagtttttataatacggtgttggtatatatttaggtgtatattaagtatcgtagagaattagaatgagtatatgtatttttagtaattaaatggttttttggaatagcgtcgtgttcgtggatagttttcgcgtatggtaatatagaagtggatttttattgggtttcgtttaggcggcggttacgtaggttttggggatggaagagaatttgatttattcgagtttaagttatgcgggattaggttttatcgtaggtagtggaaggaggtacgagttttggttttttttttagcgtatttggggcgtttttttattttgtaaacgcggggtttagttgggatagtatttttttaagatttggggttagaataaggatagggttattcgttgtgtttagttaggatataaggagggaattcggtatacgataagtattaggttggttttttatttcgcgtcgatgttcgtttatttttttttcgtttgggcggcgcggattcgaatttgcggagtttttgtagtttgttttttttatttatttttagtggatttttacgttattgagaatttaagttagttcggtttgattcggtaatttagtaaacgttttattaatataatggcggatgttttttttggagtaaaattattcgagggtttagggatcgggatgtttttggaatgcgtgggaagtagagtgtattttttgtaggaggtattttcgtttaaggttcgggagaagggttttgtttttgttgttcgtttttattcgcgttttttaaacgcgcgtttttaggtcgtttttattttagtttaattaggagtattcggttttcgcgaagttttggagaaatcgaaatcgttttttttttcgggagaatttgggattattgttttgtggaggaatcgtaagtagatttaagggttgtttttattttatgtttttagttagtgaaattagtgttttgtatttaaggggcgttgggataatttattggtcgttgaggtttgtgttttttgattagatcgcgttatttttgtttagtaggttggtgttatttttggggagtttttaggttttagtgttttcgtttataagaggatagttgagatgggtaatttggagattgggttcggtttgaagttatattttatagatgtagaagcgttatttattatttttttggggttttaaatatggaattcggtaatttatttaaatatttgtgattgagaaataatgaattcgagagtattgtttgtatgtgtgttatttggaggcggttgagaaattatcgaatttatgtttttggggtataaaatattattacgttattatttttttagtatttttaggggatttttgaaatttgggttttgtcgtttcgtttgggttttttgtttagttttttttagggtaggtttggtgtttgggattttattatatgtcgtggggggtgggattgtgggttttgtagttagtaggtattatatttttggaaaatatttggatttttttgtaatatataggcgtggttgttatggagaaaaagttaaaaggggattaggattagtaggtgaatgtattttttttttttattttggagaaaaagtttaatggagagagggttttagatttaagttatatagtttggaagtattatttttaggtttaagttttgttttgtagtgaaaatagatgggtttattttatttagtttttgaggtttattgggtagtttggatgtgagaagcgtttcggttgttattttggagtgggtaagggtggttttcgagattttgggtttattttttggatttttagggtttttgttgtttttttaggaatgtagggtttggtttaagatttgggttgtgagaggtaagggtattaatttttaaaaatgtggaaatggttattagagcgttaaggttaaattttaggggagaggaattaaggtcgtttttggatttttagggtagtttagttatggtgtataggtaggggtaattgttggtatttatttataatcgtttaaaattttataagtatgtttatattttaaatttttaaatattatattttgtattttaattttgtaaatattaatttagtaaatattaatcgtttatttggttaggtattgggttttgaatattaattaagataatggtttcgagaatttttgtaagaagtttattagttaattttggagaggttttttgttttggatgaggaaatttaggttttatgagattaggtggtagaggtgggatttgaatttagattatgttagggtgtttttattttttttttagggattttggttttatcgttgagatggattttttttggtttgcgggaggggtattaaatttttagtttatgtgtgggggttgacgggtttgtgagggtagatgtggggtgaggatttgagtagttttagattagatgtaaggtttaaggaggaggggaaaaaagtttgtttgggtcggacgcggtggttcgaggcggttggattatttgaggttaggagtttgagattagtttggttaatacggtgaaattttgtttttattgaaaatataaaaaaaaaaattggtcgggtttggtgacgggcgtttataattttagttattcgggaggttgaggtataagaatcgtttgaattcgggaggttgaggttgaagtgagttgagatcgcgttattgtattgtagtttgggcgatagagcgaaatttcgtttcggaaaaaaaaaaaaaaaaaagaggttgtttgttagtttattgatttcgtagtttcgtaggttcgtagaattttaaggtatgattaggtttgggattattaggttattttagggttaggtgcggaggtttgcgacgttcgagggttaaaggttttttttttcggttatataggagagggtattttgttgggggataggttttttttaattatagtgtagttgtagttatcgtttttagttttttgagtatttttttggttgagtttgttgtttattttattttttagtttttacggttcggttaggttaggcggttttcggtttttttgtagtcgtcggcgggggaggagggtatagagcgcgtttcgttttttagcgtacggttaaggttgcgtttttttttcgggtcgggattaatcgtgggaaaggcgttattttggttattcgattttttttttttaaggtttgtataaggagtttttgaatacgttgttttttttagtcggtagttttattttttttggtttttgttttcgtatttttcgcgttaggttaagcgttgggtttagggatagcgcgttttaattaaattcgtgttcgataagtttttaattaaaagagattttttttcgtttcgtaggcgtttttattattgtttttttcggggggatttgaaggagagggtttgaggtcggtttttgttcgtcgaggtttgcgtgttcggtttgggaggaggtttaggagggttcgcgggttacgggtatttttgggttcgagttttggggtgcggacggacgtttcgagagtgggtgtcgcgattcgggatttacggttttcgtcgggtacggatagttgcggagtagggttttgaggattgtgtagtgttttgggtttttgtttatttttgggtttaggaatggagaagggttcgtttagagaaaattttttcgtagtttttatttcgtttttttttttttttttttttttttttttttttttttttttttttttttttttttttttgtgtttgtttttttttttttttttttttttttagtgtttttttagaaattcggtttttatttcgggtaatagtgggtgttttgagttaaatttcgtttgtaagtttatttataggttttaaagaaggttaggttttaggttttaaaaggaagtttgtggaagtttaaacgtgttcgtttatgtaggagagttaacggggtcgggggttatttttgtttatttagtaggagagaaatggaggttttcgaggttatatgataaaagttagtggttttttaaatttttagtgtgtggtgttgagtagtgtgtgagatttaagtttggatttgtattattcgggagttaggatttgtttttttttttttttttttgtattttgttatattattttttaggtttatgtttttgttgttttagagaagttttttttttttttttttttttttttttttttttgggcggggggtggtggtgtgtgtgtatgagcgttcgtgtgtgtttcgaaaatggaggtaacgatgttttgggttttgtttatcggttgagttttgtttaagtttttggaggtattttggttaaatagtgtaagagtgggagaatgggtgttgtttgatttaatttatttttgagaattttgtgaagtttggagatttagggtagttttgggttaggaggatttgaggttgttggggtggttttgttaggattttataggagtagttttttttagttattgtgtttggattttaggttatagatttcggaatttgtagaggaatgagattttatttttgggtttcggggttaatgacgtatttttagtcgaaggatttttttttttagaggtagtaatagttttttagaagtttgtggggtataagtttaaagtaatttaataataaaaattataaaagattatgttttttaattgaggttttacgtttttttttttattttgggggggggggggaatgttaggatttttttagggggaaattgaggtaaaggatcgaagtattattatggagggaaagggagatatagtgttaggtatattttaaaggaaattggttgtttagtttggggagtgaggaagttggtttttatagtagtggttagggtcggatttttgggcgtaaggtgggttttataggggggaggaggaggagagcgtagggtcgttatttgaaggtttaattggaaggggtttttgtttttttttttattagtttttttttgggtgttatggtgttaggtcgggtagttttagatagataatattattcggtaattattttttttatttttaagattaggttatttaattggtttcgagtaattaatgaaagttggtgcgcgggtttttgatttatagttcggagttaacgcggggttagtttagtagatttatttcgtttgttcgcgttgtttttgcggaagagttgtagtttatttttggggggtgaataattttttttgtcgattaggtaacgagttttatatttaatttgttaggggttcgttgtagaagcggtagagatcgtagaagattgcggtataaataaattgggaaaaagcgaggtgggggttttagttagaaaaggatggagaagtttgttttaaggttatatttagggatttgggtcgtttttttgtcgaaagttttggaggtttgtggggttggattttttttcgttgggggttcgaatgcggggtttagcgtatatttttttcgttcgtggttggtttagatttattgtttcgttttgcgagagtatcgttgatattgtgttttttttcgtcgttttcgtagg

SEQ ID NO: 1896 - DNA, 11523 bp, Artificial Sequence
  chemically treated genomic DNA (Homo sapiens)
tttgcgggagcggcggagagaagtatagtgttagcggtgttttcgtaagacggggtagtgggtttgaattagttacgggcggggggggtgtgcgttgaatttcgtattcggatttttagcggaggagaatttagttttataagtttttaggattttcggtaggaagacggtttaagtttttggatgtgattttgggataggtttttttatttttttttgattaaaatttttatttcgtttttttttaatttatttatgtcgtagttttttacggtttttgtcgtttttgtagcgaatttttggtaaattaagtataaaattcgttgtttgatcgatagagaaggttgtttattttttaaaaataaattgtagttttttcgtaggagtagcgcgggtaagcgaaatgaatttgttgggttaatttcgcgttgatttcgagttgtaaattaggggttcgcgtattaatttttattaattattcggagttagttaaatggtttggttttaaaaatgggaagagtaattatcgagtaatgttatttgtttggggttattcgatttgatattatgatatttaagggaaagttggtgagggggaaaataagggttttttttagttgggtttttagatggcgattttgcgttttttttttttttttttttatgggatttattttgcgtttaggggttcgattttgattattgttgtaggagttaatttttttattttttaggttggataattaattttttttagagtgtgtttgatattgtatttttttttttttttatggtagtgtttcggttttttgttttagtttttttttagggaaattttagtatttttttttttttttaaagtgagaaaaagagcgtggagttttagttggaaaatatagttttttataatttttgttattaaattgttttaaatttatattttataagtttttggaaagttgttgttgtttttggggaaaaggatttttcggttaaagatacgttattggtttcggaatttaaggatggggttttatttttttataagtttcggagtttgtggtttgaagtttagatataatggttaaggagagttgtttttatgggattttggtagggttattttagtagttttagatttttttggtttaggattgttttgggtttttaaattttataaaatttttaggagtaaattgggttaaatagtatttatttttttatttttgtattatttgattaaagtgtttttaaagatttaagtaggatttagtcgatgagtaggatttagggtatcgttatttttattttcgaaatatatacggacgtttatgtatatatattattatttttcgtttagaaaaaaaaaaaaagaaaaagaaaaaaaaaaagtttttttggggtaatagaggtatgagtttggagggtggtgtggtagagtgtaagggagggaaggagggggtaaattttaattttcggatagtataggtttaggtttaagttttatatattgtttagtattatatattggggatttgagaagttattagtttttattatatgatttcgagggtttttattttttttttgttaagtgggtaaagataattttcggtttcgttagtttttttgtatgggcgagtacgtttgggtttttatagatttttttttgaaatttgaggtttggttttttttgaggtttatagatgagtttataaacgaaatttggtttagggtatttattattgttcggagtgaaggtcgaatttttgaaaggatattaaaaagagagagagagaaagagagatagatatagagagagagagagagagggagggagagagagagagagagagagagagagagagagagacgaaatagaagttacgaagaagttttttttagacgaatttttttttatttttgagtttaggagtaggtagggatttagggtattgtataatttttagagttttgtttcgtaattgttcgtgttcggcgagggtcgtgggtttcgagtcgcggtatttattttcgagacgttcgttcgtattttagaattcgggtttaaggatgttcgtggttcgcgagtttttttaggtttttttttagatcggatacgtagatttcggcgggtaaagatcggttttaaatttttttttttaggttttttcgggaggggtagtggtgaaagcgtttgcggagcggagggaggttttttttaattagaagtttatcggatacgggtttgattagagcgcgttgtttttgggtttagcgtttggtttggcgcggagagtgcgggggtaggggttaggggaggtaaagttgtcggttggaaggagtagcgtgtttaaaggttttttgtataggttttggagggagagaatcgagtggttaaggtagcgttttttttacggttagtttcggttcgggaggggagcgtaattttgatcgtgcgttaagaggcgagacgcgttttgtgtttttttttttcgtcggcggttgtagagaagtcgggaatcgtttggtttggtcgggtcgtgagagttgaggggtgaaatggatagtaggtttagttaggaaggtgtttagaaggttgaaaacgatgattgtagttgtattgtgattggggaaaatttgttttttaataaaatatttttttttgtgtgatcggaagagggagtttttggttttcgggcgtcgtaggttttcgtatttgattttagggtggtttgatgattttaggtttaattatgttttagggttttgcgagtttgcggggttgcgggattagtggattagtaggtaatttttttttttttttttttttttcgagacggagtttcgttttgtcgtttaggttgtagtgtagtggcgcgattttagtttattttaattttagtttttcgggtttaaacgatttttgtgttttagtttttcgagtagttgggattataggcgttcgttattaagttcggttaatttttttttttgtatttttagtagagatagggttttatcgtgttggttaggttggttttaaatttttgattttaggtgatttaatcgtttcgagttatcgcgttcggtttaagtaagtttttttttttttttttttaagttttgtatttagtttggggttatttaagtttttattttatatttgtttttataaattcgttaatttttatatatggattaagagtttggtgtttttttcgtaggttagaagaaatttattttaacggtggggttaagatttttggaaaaggagtagaaatattttagtatggtttgggtttaaattttatttttgttatttaattttatagaatttggatttttttatttaaaataaggggtttttttaggattagttggtgagttttttgtaaaggttttcgaggttattgttttaattaatatttagaatttagtgtttgattaagtaggcgattgatgtttgttaaattaatgtttataagattaggatgtaagatataatatttaagaatttaaaatatgaatatgtttgtgaagttttgggcggttgtgagtgggtattaataattgtttttgtttgtgtattatggttagattgttttagggatttagagacggttttgattttttttttttggggtttggttttggcgttttgatggttatttttatatttttgagagttgatgtttttgttttttatagtttaagttttgggttaggttttgtatttttggggaagtagtaggaattttggaaatttaaagaataaatttagaatttcgagggttatttttgtttattttaggatagtagtcggagcgttttttatatttaagttgtttaatgagttttaagggttgggtaagatggatttatttgtttttattgtaagataaaatttaaatttggagatggtgtttttaggttatatgatttgaatttagggttttttttttattgggttttttttttagggtggagaagaaggatatatttatttattagttttggtttttttttaattttttttttatggtagttacgtttgtatattatagaagaatttagatattttttagaagtgtaatgtttgttggttgtaaaatttatagttttattttttacgatatgtgataagattttaggtattagatttgttttgaaaagggttggataagggatttaaacgaagcgatagaatttaggttttaaaaattttttagaagtattaaaaagataatggcgtagtagtattttgtgttttaggggtatggattcgatggttttttaatcgtttttaaatagtatatatgtagatagtgttttcggatttattgttttttagttatagatgtttagatgggttgtcgagttttatatttaaagttttaagagggtggtgggtagcgtttttgtatttatggagtataattttaagtcggatttaatttttaggttgtttattttagttgtttttttatagacggggatattgagatttagaaattttttaaaagtaatattagtttgttaaataaaggtggcgcgatttgattaaagaatataagttttagcgattagtaagttgttttaacgttttttgagtataaaatattaattttattaattaaaagtatagagtggaggtaatttttgggtttgtttgcggtttttttataggatagtgattttagattttttcgaagaaaagggcggtttcgatttttttaaggtttcgcgggggtcgggtgtttttggttaggttaaggtaggagcggtttgaagacgcgcgtttagaaggcgcgggtgaaggcgggtaataagggtagagtttttttttcgagttttgggcgaaggtattttttgtaaaagatatattttgttttttacgtattttaaaaatatttcggtttttaggttttcgagtaattttgttttaggaaaagtattcgttattgtattagtaaagcgtttattaaattatcgaattaaatcgaattggtttaggtttttaatagcgtggaaatttattgaaaataaatgaagagggtaaattataggggtttcgtaggttcgggttcgcgtcgtttaggcgaaagagaggtgggcgggtatcggcgcgggatgagaaattaatttgatatttatcgtgtgtcgagttttttttttgtattttgattaagtatagcgaataattttgtttttgttttaattttaggttttgaagaaatattgttttagttgagtttcgcgtttataagatgaagaggcgttttagatgcgttgaaagaaaggttaaagttcgtgtttttttttattgtttgcggtagaatttggtttcgtatagtttggattcggataagttaagtttttttttatttttagaatttgcgtggtcgtcgtttgagcgaagtttagtgaagatttatttttgtattattatacgcgggagttatttacggatacgacgttgttttagaaagttatttagttattggaggtgtatgtgtttattttagttttttacgatatttaatgtgtatttaagtgtgtgttaatatcgtattataagggttggaggtgtttttggatattttagcgttgcggaggtagtatagtataggcgtttattttcgcgttggttttatttcgaatttagagtttagacgtttgaaaagcgttacgtttggtgataatttggcgtttttttaattaataaaattttttttaaggtagagttagatattgcgtcggttttttggttttattttcgtggggattagtagtttcggaatttttcggattttaaggggttttagacgttttttcggtttttgcgaatagttaggtttttagttttgtttggttttggaggatgtcgggggttagtgtttgcgtgtatttttatttttcggttttttttttagtcgtcgttttcgttatttttacggtttttgggaagtagttgggtaagagttgcggttaaaaggggtaggagaggggggtgttttagagcggagagtttttggcgttattgtttcgcgcgtagggggcgtttttcggtttatttattttgattgcgaatagcgggttggttttcgaggtagttgggtaggtagggcgcgttaggaaatattttggtttggtcggatgacgtttggttgggcggaggaggatcgaagggttcgtagcgataggtttcggttgtgttagtgaattggtcggaaaagtggatagtgaaggcgtttaggtattgtttttcgtgcggtttcgcgtcgttttagttcggtttttgtttgatgaaggagtgaggcggcggcggcgggggtggcggcggagtcggtggcggcgcggggtcgtttaacgattcgtaagtcgaagcgttcgggggcgtaaagtttagtatcggcgtttattgcgtcgcgtcgtttataggtagggtatagtcgtcgtcgttatttagggaggggacggcgggtagtagcgcgtttaggtttcgtacgtcggagtttatttgttgcggtttagattcggacgtttcgcggttttttcggttttggagacgtttagcgttggtttcggcggcgtttaatttggtttagatgtcgttcgggtttcggattttttgttgttttggttgttgtaggtatttaggttcggagcggagcgtgtgttgagacgtcggtttcgggatatacgtggaagtcgggttttgtagtaagaggaagtttaggatcgcggcgaggagacggcggggttcgggcgtttgggttgtcgtttcggttttgggtgggtgggtgggtgaatgagtaggtgggagggagggcgggaagtgggggagcggataggcggtcgggttgcggagagttttcgggtgtgggcgttgttttgaattttttattttagttgtttggttgtttttagttttttaaagtttaaataagaggggtcggcggcgcggggaagaggaggagttaggaggttcggtcgttttatttatttagtagtttaagttcggttaggtagcgcgcgttgttttttgggggcgttttcgtagttggggtgagggcgggttcgagggagcgtttttttcggagatatttttttttttaatttaatacgcgtttttagttggtcggtgtggtataattttttttttattttttttttttggttttcgttagtgtgggagtttcgttttattggagagttcgtttaggtaagtagtgagttcgggtagggtcgaatgcggtgggagtagagatggggttgttaatttaaaagagtggtttggagggaggggtaggtaggttttaagagggcgggaattttaggaaagcgtagaaagaatttagttaagttttaaagaagcgtatatttttgttttgtatttttgagtttggtttttgtttttagaattgtcgggtaggggagtggttatgattttggggttattggggaaagaggtggttttttgtgggttttagaggtcgggattgaaagcgaacgttttttagttgggtggtcgggagttgtattagttataagtcgggcgtatttcgatcggttagtagttgtttatttggtgaggtttgcgttaggcggaaggcggttgtcgtttatttaaaattggagttagtagtatttagtttttttttttagtgaggaatatttaatttttttacggttaagtcgggaaaatagcggttagtttaggagggaagaaaatttttgggtaaacgtttaaagtttgcgtatatttcggtcggagtattttggcgtttagtttggggaggaggggtgaaggggagggtttggatacgaagttcggtagggagcgggtaatttttggagttatttcgtcgagtattgtttgtggttttggtcgaggatattattttggttgtttagtgattgattaggaggcggaagttagttaaggggattaaggagtggagtagggagaatttttatcggtttacgggcgcgagttagtgttcgaatttttgggagttcgaagagtttcgttaaatttgatttttttcgtttagtttttgtttggtagttttcgcgttttagagtaggtgtttggggcgggtagggggtgttttggtttggtttttggattttttaaaggagttagtatttattgggaaataatttttaggtaaggagaagaatcgggggtcggagcggagcgtgttttagaggtgcgtataaaattttaggggcgttaggaggtagtagcgacggcgtagcgtgggacggttaggcgcgacgggagggaagtaatcggttgtagttcggttttttgtatttggttggttcgggttggggttgtaagttttttagttaaatttatgtgaagtaaagtagttgtagtttgataaagaatggcgttttaataaatgatatagtaattttttacgttttggtttttagtttgtattgtataaacgttgtcgttattaaattttggttgcggattcgaagtgtgtgcgggtttaggatttattcgaagggcgtattttttgggaatgcgtatttcgtaggcgtaggagattttgagggtaaagatgcggtatttgagtttttcgtttgttttttaggttatttttgttgtttgattttgcgtcgtttttatttagaagtttttaaaattattattaagaaaagaaagattttataagatattgtttttacgttttttgtttagtttttttttatacgatttatttttaaatttttcgcggggttcgcgcgtttggttttttgagtggagaaaggattttcgagataaaatttattgttagttgttttaagaattttttagatttttgtatttttttttttttttttcgtttattatttttatttggaagtcgttttttttaattaggatttaattgtgaggggcgaggagttttttatgaaaagtcggggatttttatttttaaacgaaaagattgagattgtttttttttttattatttttggtatttttagcggggggagaggaggttatttgaagggaggttggtttgaatgtgagtcgttgtgtttgtgaaatttaggtaaggtaaagatacgtaaatttttgttaatattttttaaaaataagtttttgtttcggggtgagggatgtaggggtggataggaggaaaggagagttaagtaaatgtagaattttttttttttttgttatttatttttttagaatttttgtgggggcggggaggggaagagtatcggtgcgaatttcggggtgttttttcgttcgatttggattttttcgattaaagaggtgggaggagttttttgtagtttgcggggttaagaagaaagtgttaagttgaggagtcgtagtcggaggattttagggattcgataggaagttttcgtacgattttaacggatttatatgttcggaagtttaggcgatattaagttagcgttggggaattgacgtatttttgtagtcgtagggcgttttatgtttttttgtttttttttttgttgtgggtaacgttttttgcgggagatttgaggttttttaagggggatatgttagttatattggttttggcgttttgagttaagtattaggatttatagtttagtacgaaggtaggtagtatttttattcgtcgcggacgataggcgtttttttgtattttttttagttcgcgaggttcgtttttcgcgaggttttagagaaaagtaggttgtggaaaattgggcgttttttttttttatttatttttttatttttgttagcgtcgagatttgtagtagaggtttttggtttgaattatcgattggtaaagaaagttgtagattaaatttttcgttttatagagaaggaaattgaggtttagatagtcgaaggagaggtagtttatggagcgtagcggtaaagagtaaggggttggtggttttagaatggaattttagttttgttaggtaattaatagttgtgtgattttagacgagtttcgtagtttttttgagttttagtttttttattggttaaacgggataatgggatattagcgtttattttatagagttgttttgaggattagataggagagtagtgtgggtttttgatttaattaattttatagtttttgttattattattgtttaaggataggaaataagttagtggtaacgtcgagttgaaattcgggttttttaacgtttagttggaggttttatttattatttttttatttttttagagttaatgggatgtagaggcgaggatagtttttggaaaattatgtggcgttgatatattggtaaagcgtaggtatttcggtttcgaaggtgtataattattgtaatatgaaaaaatcgaggttgggtaggagtagggtagtgaggattttttaatttttatttttatttcggcgttgtttattgtatttgatagagcgcggagttgggttgttatagtcgtaattttagggattagtgcgtacgtttgggtcgtttttcgggagttatttagcggtcgcggataattgaataaatattttaaagcgttgcggtcggttaagggcggggatagttatattgcgcgcggggttcgtaggtcgtaataaagagtggttcgatttcgttgttgtttgtcgcgggagaggaataagttttcgattagcgttttttttcggggttcgcgtttcgagttttacgcgtaagatagtttaatagttgtttttttttttttcgtcgattttaatttttcggaatttgtttattcggggttgtagggtaagtgtttaggatggtttttagtttcgcgttggcggtgaaaattttaacgttatttttttaattaaaaaaaggggggggtaagggaggggttttgtgataattatttttagttttttttgattattttaaaattaagtcgattttttttaattagtttttatttattgttttaatttttttcgttgattttatttgggagttcggaatcgttaggtattgtcgaatgcggtgtaaaattttttttttttttttagttcgtagtgtttggagtcgttggggttattcgtttgttttgatgttatcgcgagatggttttcgagtttttcgagagtttttagtgaaaggatttcgcggtattgtttttattattatatcgtaaatttttttaaattttggaattaattatatagaggatatgttttaatttgttttgtattaatgttatagtggggatggaggttaggtcgtggttagagtagatacgtaggtttatgaaattgatgaattgagagttgtttttagttttgagcgtattatttggaattttagtttgaggttataattagaatttttgattttagatttaattttgtaaataataggggaaaaaaatggggaaaagaaaaattacgagagagggaaaaaaaattattttgtatttgtaaaaaaaaaaaaaaaaaaaaaaaaaaaaaaaaagttatataattttaaaattttttcgttttagataat

SEQ ID NO: 1897 - DNA, 6384 bp, Artificial Sequence
  chemically treated genomic DNA (Homo sapiens)
tttttttaatttagtttattttttcgttttttttaagggatatttttagttaatttaatatttatagaaataatgttaatgattggtttgttgttaataaatatgtgggtaaatttttgtttagggtttttagttttgaaggttgtaagatttttgattttttattttatatttttatattttttttttttttttttttttttttgagatagagttttattttcgtttaggttggagtgtagtggtacgatttttgtttattgtaagtttcgtttttcgggtttacgttattttttcgttttagtttttcgagtagttgggattataggcgttcgttattacgttcggttaattttttgtatttttagtagagacggggttttatcgtgttagttaggatggttttgattttttgatttcgtgattcgtttgtttcggttttcgaaagtgttgggattataagcgtgagttatcgcgttcggttttatatttttatatttttgtgtgtgtgtttttaatttttttagtattgttgggttagggtttttttgatcgagttggtttcggtagataaggttttattatgttggttaggttggttttaaatttttgattttaggggattttcgttttagttttttaaagagttgggattacgggtatgagttatcgtgtttagttaatttttttttgtttttttttttgagataggattttattttgttatttaggtttgaatgtagtggtattatttcggtttattgtagttttaattttttgggtttaaatgatttttttattttagtttttcgagtagttggggttataagtgtatattattaagtttagttaattttttttttttttttttttttttgagatagagttttgttgtgttttttatttaggttggagagtagtggttcgattttggtttattataatttttgtttttcgtgtttaagtaattttcgtgttttagtttttttagtagttgggattataggtacgtgttattatgtttagttaatttttgtatttttaatagagacggggtttcgttatgttgattaggttggttttgaatttttgattttagttttttaaagtgttgagattataggtgtgagtcgatatgttaggtttatatattttaaaattatgttgttatgtttataaagatgtatatatggtaatttgtatttttaattaatatgaaatatttttttttgtttttttaatgtttttatgataaattttgttttatattaatattgttatatatgttttttttttataaatatttttataaatataaaaatggttggtaagttattttttttttttttaaaaaaatttttgttttttagaggtaggagtttattttgttttttaggttggagtataatggtttaattatagtttatagtttattgtagtttcgaatttttgggtttaagggattttattattttcgtttttcgagtagttgggattataggtgtaagttattacgtttggttaatttttttaaattttttgtagagataaggttataatatgttttttagtttggttttgaatttttggttttaagtaatttttttgttttgagaaatatagtaaataaaaaatgtgaaataatatggtagaaataagtttaaataaataaataattaaaaataaatataaatgatttatattttttttttaaaagagagttttgagaaattttaaagttagttatatgttgtttataaagagatatatataaaataaaatagtatgattaagaagataatataatttatttatatttatgttttattatttatatatttggatttatttttgttatgttattttttgttttttgtttattagtgtatagtatttttttgtttttttttttttggaatgtttatttatttttgtttttgttttgtttatttttttttgattgattttttttgaataatgattttttttttttttttttttttttttgagaaagttttattttgttgattaggttggagtgtaatggtataattttggttaattgtaatttttgttttttaggtttaagatattattttgttttagtttttttagtagttgagattataggcgttttttattatgttcggttaatttttgtatttttagtagagattgggttttattatgttggttaggttggtttcgaatttttgattttaggtgatttgtttatttcggttttttaaagtgttgggattataggggtgagttatcgcgtttggttttaaagatcgagaattttgtaatttatatattttatagtttttattataggtgtttagtaaatatttttaaatatttatggtatttgatgtaagaattattaggtttattttatagagaggatatgaaattgtttaagggtttggatttatatgtttaagattgtatggatagtaatttgtagtgggttaaattattgtttttagtatgatttaaagtgtttgttaaaaatataaaagttttgaaaataagttggggaagtgaattttaatatcgtattaattaagattaaagtgtaatttattaattttttttttttatttcgtattttgtgttttttttatttagttatttattatattttgttggattaaaagggttttttagtatttttttttttatatagtgaaagatatttttttggtattaataaatgtttatttaataaataaaaagggtcgggttttgtggtttttgtttgtaattttagtagtttgggaggttaaggtaagaggatcgtttgagtttaggagttttagtttaggtaacgtggcgaaatttagttttaaaaaaaaaaaaaaggaaaaaaaaggtattaaaaaataaaacgtaataggtggtatgatatgatatgatttttttaatagttttttatagttttttaaggttttttaatatgaagttataggtttcggttagaagatatttttagattttttttaaaatattttagaggttcggagtaagtttttttatatttgaaggtatattagaatttaggtggtttaagttgatgagagttaaataggaagttggttttttggttcggtagagattttaattatttttattttttttttaatttataggatagtacgtgtttaggaggttttggagttgggatagtttagttaaaaaaaaaaaaattattgattttttttttaacgaagagggagaaaatacgttaggagattcgtggtttagttttggtaaaaattaaaattatgtttttttagagggtttagatattaagagatggatttgtttttagtttttttttttattttgttttttttttattaaaataaaattgattagttaattcgatttaataatattaaagaattatttaggaatttgttattttaatattttattttttgtatattttttaaatattaggtagtagttttattattgtttgtatttttagaatttggaatagtgttgttcgtagaggaggaagtaataattatttgttagagaaggtattgttgtgtatttttggggaattttatattttgtaatttgttttaaaaaaagtggataggtatatttacgggggtttttcggatttttttatgttaatattcgtgtgtataaatcgttttcgtgttgttttttgggggttttttttttataaatatttggttatttttacgttataatggttaggtaggaatttcgattttttttcggagagggggtttagggttaatttcggggttttagtttttatatgtgacgtttttttgtttttttatttaaaataataagaggttgggcgtagtggtttacgtttgtaattttagtattttgggaggtcgaggcgggcgattacgaggttaggagatggagattattttggttaatacggtgaaatttcgtttttattaaattataaaaaattagtcgggtgtggtggcgggcgtttgtagttttagttattcgggaggttgaggtaggagaattgtttgaattcggaggcgaaggttgtagtgagttgagatttcgttattgtattttagtttggtgatagagtttgatttcgttttaaaaaataagaaaaaaaaataaaataaaaataatagaggtcgaagcgggaggtttatttgagtttagaagttcgagattagtttgggtaatatagtgagatttcgtttttatttaaaaaataaaataaaattaaatttaaaaaaatgtacgtttatagtataaattttagaaatggaacgaaaaattaaaattgaaggtatttttttttaatttagagataatatttatcgtttattaagtttttattattgttaaatttagttttaaagggtacgattttattttttaaagatttttatttcgtagaatttttttttaggtttttttttttttttttttttgagacggagtttcgttttgtcgtttaggtcggggtgtagtggcgcgatttcggtttattgaaatttttgtttagttttttcgaatttaaggtttaattgcgttttatttcgattttcggttttattcggatttcgaagtggcgtacgagataaaatgttgttaggttgaggtaattttttgttagtttcggtaaaaattcgttagtttggaaagttttcggtttggaattaaattttgttatttcggatggaaataagttcgtttaaggggggaaaattcgtttgtggaggatacgttttcgtacgtaatttttcgcggaaaatgattttaagtatttttggttagggattgtcgttgttacgtcggattttatagttacggttttgaaacgtttcgtcgggtaggtcggattaatggacgtcgagttcggtcgtgcgttacgcgacgttggttaatcgcggagggttacgatcgtagaaaggtcgggcgcggcgaggttgggcgttgggcggttgcggcgcgcggtgcgcggtgcgtagtttggagttatggtggtggtggtagtcgcgtcgaattcggtcgacgggatttttaaagttttgtttttgtcggggtagttcgttttcgtcgtcggagtttcggtcggttaggttttgtcgtttatggtgttagtttagagaggggttagttcggaggtagcgagcggggggttgttttaggcgcgtaagcgatagcgttttacgtatttgagtttcgaggagaaggcgttgaggaggtgggcgaggggtcggggtttggggttagatttgaagtcgggattagggataggggtaggggtaggggttgggagcggggatttagtattggtcgtttcgtagggtttcgtcgtttttggtttggcgggtcggtgttagcgtggcgcggggcggggtaggaagttcggattgatcggattcgttacgttgggaatttagggcggtttagggtttttttttgtattttttaattttttcgttagagatgattagagttggggatgcgggtatttgttttttaggtttttttgttgtgtggtcgtagattggtggtttagttttttaattcggatatgaggtcgaataatttgttttggtttattgttatttttggagaggcgcggagttgaaataatagagttgttgaaagggttgggaattttgcgaggtttattggtttagtttagtatttgcgtttttaaaatggaatttattttatgaggtttttggggagattgagatttggatataatgtgtttagtatttagtttttcgtaaatgtttatttttttgtgattattgtgttttttgtgatttatgaagtgttttttttgagttaatttttttaaaaaaaaaagtgttttttttaatagatacggatttattagtaggttattgtttaggattttaatattagagattagggagtggtattagttttttttttttttaaattggattgggggacggagggttgatgttatagtaagattgtagtttttattagattaatgaggttaggttggattttgtttaagagaattggagataggaagtagcgggggaatagatggggaaagaggaaagttttttatgatgtaagatgaatagtgtgtgtgtttagttttagtgttgtgacggggatgagtttgaggtggacggatgatgtaatataggagagaataaagtaggttttcgagttagattgatagaagattgtattttttattttgttttattgaggggaggagtttgaagtgtattttattattagtttgttttatattgtaaataaaaatgaaagtattagttggtaaagtttttaaataaagatataaataaggtttgatatgatttagtgtggtatgttttttttttttttagg

SEQ ID NO: 1898 - DNA, 6384 bp, Artificial Sequence
  chemically treated genomic DNA (Homo sapiens)
tttaggaagagaaggaatatattatattgagttatattaaattttatttatgtttttatttgaaaattttattagttggtgtttttatttttatttatagtataagatagattaatgataaaatatattttaggtttttttttttaataaaataaaataaaaaatatagttttttgttaatttagttcgaagatttgttttatttttttttatattgtattattcgtttattttagatttattttcgttatagtattggggttggatatatatattatttattttgtattataaggaatttttttttttttttatttattttttcgttgttttttgtttttagtttttttaaataggatttaatttggttttattaatttagtgaaggttgtaattttgttatgatattaatttttcgttttttagtttaatttagaaaagggagaggttgatgttattttttgatttttagtgttgagattttaggtagtgatttgttgatgggttcgtgtttgttggaggagatatttttttttttaaaagaattaatttagaagagatattttataaattatagaaggtataatgattataaaagagtgaatatttacggaggattaagtgttaggtatattatatttaagttttaatttttttaaagattttatgaagtaggttttattttaagaacgtagatattgagttagattagtgagtttcgtagaatttttagtttttttaatagttttgttattttagtttcgcgtttttttagaaatagtagtaaattaaaatagattattcgattttatgttcgagttaagaggttgaattattagtttgcggttatatagtaagagggtttggaagataggtgttcgtatttttagttttggttatttttaacgagagagttaaaaagtatagaaaagagttttgggtcgttttaggtttttagcgtggcggattcggttagttcgggttttttgtttcgtttcgcgttacgttggtatcgattcgttaggttaaaggcgacggagttttgcggggcggttagtgttgggttttcgtttttagtttttgtttttgtttttgtttttagtttcggttttagatttggttttagatttcggtttttcgtttatttttttagcgtttttttttcggggtttaggtgcgtgaggcgttgtcgtttgcgcgtttggggtagtttttcgttcgttgttttcgggttggtttttttttgggttggtattatgagcggtagggtttggtcggtcggggtttcggcggcggaggcgggttgtttcgatagaagtagaattttaggggtttcgtcggtcgggttcggcgcggttgttattattattatagttttagattacgtatcgcgtatcgcgcgtcgtagtcgtttagcgtttagtttcgtcgcgttcggtttttttacggtcgtggtttttcgcgattggttagcgtcgcgtgacgtacggtcgagttcggcgtttattggttcggtttgttcggcggggcgttttaggatcgtggttatggagttcggcgtggtagcggtaatttttggttaaaggtatttggggttatttttcgcggggggttacgtgcgggagcgtgttttttataaacggattttttttttttaagcggatttatttttattcggagtgatagaatttaattttaaatcgagagttttttagattgacgaatttttatcgggattaatagagaattattttagtttgataatattttatttcgtgcgttatttcgggattcgagtggagtcgaaagtcgagatagagcgtagttgggttttgggttcgaaaagattggatagaggttttagtgagtcgagatcgcgttattgtatttcggtttgggcgatagagcgagatttcgttttaaaaaaagaaaaagaaaaaagtttggaaagaaattttgcggaatagaagtttttaagaaatgagatcgtgttttttaaaattaagtttaataatagtgagggtttaataaacgataggtgttatttttgggttggaggggaatatttttaattttagtttttcgttttatttttaaagtttgtattatgagcgtgtatttttttaaatttagttttattttattttttaaatagaaacgaggttttattgtgttgtttaggttgatttcgaatttttgagtttaagtgaatttttcgtttcggtttttattatttttattttattttttttttttattttttgagacggagttaggttttgttattaggttggagtgtagtggcgagattttagtttattgtaattttcgttttcgggtttaagtaatttttttgttttagtttttcgagtagttgggattataggcgttcgttattatattcggttaattttttgtagtttagtagaggcggggttttatcgtgttggttaggatggtttttattttttgatttcgtgatcgttcgtttcggttttttaaagtgttgggattataggcgtaagttattgcgtttagttttttgttattttaaatgaggggataggaaaacgttatatgtagagattgagatttcggggttgattttgagtttttttttcgaggggaggtcgaggtttttgtttggttattgtggcgtgagggtggttaggtgtttgtgaaagaggggtttttagagagtagtacgggagcgatttatatatacgaatattaatatggagaagttcgagaaattttcgtaaatatgtttgtttattttttttaaagtaaattataaaatgtgaaattttttagaaatgtatagtaatattttttttaataagtaattattgtttttttttttgcgggtagtattattttaggttttaggggtgtaaatagtagtaagattgttatttggtatttggaggatatgtaaaaagtgaaatgttaagatagtaggtttttaagtaattttttagtgttattaagtcggattagttggttaattttattttggtagggagggaataggatgggaaaaagaattaaaagtaagtttattttttgatatttaagttttttaaagggatatagttttggtttttgttaggattgggttacgagttttttaacgtgtttttttttttttcgttgggagggaaattaatgatttttttttttttaattgggttgttttaattttagagttttttgagtacgtgttgttttgtgggttggaaaagaggtgggggtgattggagtttttgtcggattaagaaattaattttttgtttaatttttattagtttgggttatttgggttttgatgtgtttttagatgtggggagatttatttcgggtttttgaaatgttttgggagaagtttggaggtgttttttagtcgagatttatagttttatattaaaagattttggaaagttgtaagaggttgttagaaaagttatgttatgttatgttatttgttacgttttattttttgatgttttttttttttttttttttttttttgagattgggtttcgttacgttgtttaggttggaatttttaggtttaagcgatttttttgttttggttttttaaattgttgggattgtaggtaggaattatagagttcggttttttttatttattaagtgaatatttattaatgttaagagaatgttttttattgtgtaagaaagaaaatgttggaggatttttttagtttagtagggtgtagtgagtaattgagtagagaaagtatagggtgcgggatggggaaaaaaggttgatgaattgtattttgattttagttaatgcgatattgaaatttatttttttagtttgtttttaaaatttttatatttttgataaatattttaaattatattaaaaataataatttgatttattatagattgttgtttatgtagttttgaatatgtgagtttaaatttttggatagttttatattttttttataaaatgaatttggtaatttttgtattaggtgttataagtgtttaaaaatatttattagatatttgtgataagagttataaaatatataaattataaagttttcggtttttgaggttaaacgcggtggtttatttttgtaattttagtattttgggaggtcgaggtgggtagattatttgagattaggagttcgagattagtttggttaatatggtgaaatttagtttttattaaaaatataaaaattagtcggatatggtggggggcgtttgtaattttagttattggggaggttgaggtaggataatgttttgaatttgggaggtagaggttgtaattagttaagattgtgttattgtattttagtttggttaatagagtgagatttttttaaaaaaaaaaaaaaaaaaaaaaaaagttattatttagaaagaattagttaggaaagggtggataaaataggaatagaaataaataggtattttagaaaagggaaaatagaaaaatattgtatattggtaagtagaaaatagaaaataatatggtaggaataagtttaaatatataaataataaaatataaatgtgaatgggttatattatttttttaattatgttgttttgttttatgtatgtttttttataaataatatatagttggttttggggttttttagagtttttttttaagaagagaatataaattatttgtatttatttttgattatttatttatttggatttatttttgttatgttattttatattttttgtttattatattttttaaggtaggaggattgtttgaggttaggagtttaagattaggttgggaaatatattgtgattttgtttttataaaaaatttaaaaaaattaattaggcgtggtgatttgtatttgtagttttagttgttcggaagacggaggtggtaagattttttgaatttaggagttcgaggttgtagtaaattatgagttatgattgaattattgtattttaatttgggagatagaatgagtttttgtttttaaaaaataaaaatttttttaaaaaaaaggaaaatgatttattagttatttttatgtttatggaaatgtttatggaaagaaagtatatgtagtaatattaatatgagatagaatttattataaaggtattaaaaggataaagaagggtattttatgttgattgaaggtataagttattatatatatatttttatgaatatagtaatataattttgaaatgtataggtttagtatgtcggtttatatttgtaattttagtattttgggaggttgaggttaggggtttaagattagtttggttaatatggcgaaatttcgtttttattaaaaatataaaaattaattgggtatggtggtacgtgtttgtaattttagttattgaggaggttgaggtacgagaattgtttgaatacgggaggtagaggttgtagtgagttaagatcgaattattgttttttaatttgggtgagggatatagtaagattttgttttaaaaaaaaaaaaaaaaaaaaaaaattagttgggtttggtagtgtgtatttgtagttttagttgttcgggaggttaaggtgggaggattatttgagtttagaagattgaggttgtagtgagtcgagatggtattattgtatttaagtttgggtgatagagtgagattttgttttaaaagaaaaaataaaagaaaattggttgggtacggtgatttatgttcgtaattttagttttttgggaggttggggcggggattttttgaagttaggagtttgagattagtttggttaatatggtgaaattttatttgtcgagattagttcggttagggagattttaatttagtagtgttagaggaattaaagatatatatatagaaatatagaggtgtgaggtcgggcgcggtggtttacgtttgtaattttagtattttcggaggtcgaggtaggcggattacgaagttaggagattaagattattttggttaatacggtgaaatttcgtttttattaaaaatataaaaaattagtcgggcgtagtggcgggcgtttgtagttttagttattcggaaggttgaggcgggagaatggcgtgaattcgggaggcggagtttgtagtgagtagagatcgtgttattgtattttagtttgggcgagagtgagattttgttttaaaaaaaaaaaaaaaaaaaaaggaaatatagaggtgtgaagtgggaaattagggattttataatttttagagttgagaattttgaatagagatttatttatatatttattaatagtaaattagttattagtattgtttttatagatattaaattaattaaaagtattttttaagggaaacgaagggatgggttgaattaaagaaa

SEQ ID NO: 1899 - DNA, 13427 bp, Artificial Sequence
  chemically treated genomic DNA (Homo sapiens)
agattgatttaaggagagttaatatcgtatatgaattaaaagttaatatttagttattagatagattttagtgaaaggatatgtttaagttaagttgattaagtttattaaatttatttattaagtttgattaagtttattaaaatttttgttaggttgaagttattagtaattatttgtagaagataatagttatgagttttataaatatagtagtagtgtttgttagaattgtgttgtgagttacgaatgtaaattatatatgtaatttttaaattttttagtagttattaaaaaggtaaaagaaaaagatgaaattaattttaataatgtatttgatttagttttatatatttaaaatgatagtattttaatatgtaattaatataaaaatatgaatgagttattttatatttttgtattgagtttttaaattttagtgtgtattttatatttattatatatttttagtttcgaagtagttatattttaagtgtataagagttgtatgtgagttggttattgtattggatagttttatttttgttttttagtattgataaagtttttttattttttttcgttgttatgggagaaaatgtaaatagaatttgtttattatacgagagttgtaatatttttttaaatgtagtttagtagtattatgagttgttttgtggaaaaatttaatttgtgattaaataagttaggaaagttttattattttatttttttttgaagattatatggtatattaatatattaaagattgagtaaatttttttgggtaaaaaaatttgtttgacgttgtttagttgttgagttttgtgtttataagaattttagaaattgttataagtgtttttttataagaaaaattttgtgtttttttttttttttttattttttttggggtttatttttatttatttttgtatttagaattattcgagagttataatattttttttgttttagaataattattttttaaattgaaattaatagatggttttaaagttttgtatttggatatagatttttagaaagtattaaaatatatattttttttttatttttttagaaacggtgaatattttaaaaagatgtgggggtgtggtgggggatatgtgaatgtgtatatgtgtaaatattaaatatatatagttttttaagtagagtaatgtaatttttgttgatgttttatttttatttttatttttttatttttttttttttttgagacggagtttcgttttgtcgtttaggttggagtgtagtggcgggatttcggttcgttgtaagtttcgtttttcgggtttacgttatttttttgttttagttttttaagtagttgggattataggcgttcgttattacgttcggttaattttttgtatttttagtagagacggggttttatcgttttagtcgggatggtttcgattttttgatttcgtgattcgttcgtttcggttttttaatatttttatattttgtgtgtggtgataatgtatatgttttaatgtgtattgttttagtaatatgtatgaagtagttgtgatatagtagttagttttaaagatatagattataattgattattgttaatttttaataagtgatttttttgtaatttggttttagtggggtttttgacgttgtttttataagttttattttaaaatttatgtttaagtggtagttattaatataattaattttgttgttgaatttggtttatattgaatgtggtaatttttatatgtggatatatttaaatatgtggattgatttagattattcgttttgtttttgttttttaggattttgttattttaatattaaagatgttttttgaatattgtagtagtagtagaatttttatgtttttgaaaatgtaaaatgtaatatgagttgtatatagattttttagtagtagaaatggaatattttaagtgtagaagtttggttttagaatttgttaaggaaggacggtttaatttttgaaaaggtatagtttttttaattttgaatatttgggggaattttttttggaagtttgaattttaatatttttaatttaatggttttaaattaataaatattaaaaaatggatttcgtagaattaaattattagggggagtattttgtaaagttatatattggtgaatatatattgggttaagtattatatgttagttttggaatgtgtattttttagcgaatagaatttattgttttaaaaagtttttttggtataaattataatatttatagaaatataattgtattattgaaaaaaataaagtttatttttttaatgatatattttataaattgtatattagggtaattttttatttatgaggaggtataaagaaatattttgttaatatagtataattgtttattttaaattgtatttaggaatgaataattattattatttaaagtattattgaattttgaggaattgattaaagaattagtattattaataaaattgtattatttgtaatatatttgttttggtataaatgtagagttaaaaatataaaattataaaaaaaaataatagtgattggttgttattattttaaaattttattaatttttattagtattaaattaaatagtatttatttgttgtatataagtaaaattttgaaagattcggatataaaatgaaaggttttttaaaaatgtttttgttataataggttatatgattttttgttaattgttatatttttttaggggtattttgaggtttttttaaagatatttgtagtaattaggtttaaatttagagtagaatattttgttagatattttattatattataaaatgttatattattgtattttataataaaattaaatttttaagtattttggtatgttatatattaatatattaaaatattattttttataagtttattattatgtatataatatttttaaaaataatgggtattttggttttagtgaaaaagtataatgtaatatatgatattaatttttagttaaaatttattgaggtgtttgatagggaaattagtaattataagttataagatatatattatttttaaggataaaatggtaaatgataatatagaaagacgtgattattggagtaagttagttggtgtgtagattaagaaggattaatttgtaaatgtttattagaatttagtttttgttattggttgttttgtaggggatagtattagttagttgatattgttttttttttatgtgggagtttgtttatagtttattgtatggtataatgaaatttttataagtaagatagagttagaagtttagagatgtattttatggtttttataattgttgttataatgttttaaatattgtgatttttttaaatgtgttttttgtattcgttttgtattgtagaaaataattcgttataaattggattttatagtgtttaaagcgatgttatttattggtttattgtttttttttataatatatttatgtatagtatatttaatgtaaaatttgtgataattttttgttttaaaataaaatttaatgttaaatatttagtgttttgattaataattttaagttattaattttttttttaaagttaattatgatgttaagtaaaatattatataaatattttgtggagtgttgttgttgattttgtatttgtggtagtgtatgtattttggtttaggatatggtggttttttgggttttataaatagatattagtaatttttttagggaaagggtttgttattttttagttgttggttgaatttgttttttaatttataaatggatttttttatgttatataaaaaatagaaaaatagtttattatattttttttttgtattttttttttggtttgattttttttgaatttttatattttatttgtgtttatattatttttttaaatagaaaaatgttagagatgtttgaagattgaaattatttaattttaataggggaagagattttataattatttaagtttaatttttttatggaatttgagttttagaaagatttagtgatttgatcgaggtttgagggacgggggtggattgagtatattttgatattaagaagatggtggaaagtttaatgggttaaaaggagttgtgttagttttggtattggtatattaataagtagaggtttgttttggaataaaaaaaattatttttttattaggttttgatttttgttttgaattatttatagttatagaggaatatattttgtaggtagtttttttgggaggtaaggataggtttttagagacgatttttgacgtttttttattattggaagtaatgttttagattattgtatttggaagataaagggatatgtttatatggtatagtgaaaagtgaaatttttttttatttggtggtgggtgtatgataatatatttgtattttgaaaagtttttgtgtggtttggttatttttaaaaggttagaaatgttggttttttgaagaattacgcgttttttcggtttagaaaatagattgggttagaaaggcgttcggattttaattttgggttcgggtggttgtagttttttaaagggatgtgaacggttttttaagataggatttaagggattttaggatttagaggttgcgcgcgacgttcgtagggcgaattgtatttttttgagttttcgttttatggtttgagtcgtcgtagggcgcgggttcgcggttcgttaggggacggttattatagagacgtagtcggtattggcgagcgagcgagtaggcggcgtacggagcgcgtgggcgtgtttcggcggggttgcgtagttcgttttattttattttattttagttaggtcggtcgtttttattaggtttagttttagagtttaggtcggtcggtcgggttcgcgtgttttcggcgggttgcgtagagcgcgggagcggtttggggttgggtatgttgggagtttttcgggtaacggtcgtcgtcgttatagttatatagtcgtcgttattgcgttcgttttcggtgagcgtcgttgacgcgcggagatgaaattttcggtttcggtgttggcgttcgtgtttttgttcgtggtcgagataacggcggcgtttagtttgagtagtatttatcgttcgggcggggatcgtatgtggtaggcgttgacgttgtttttttcgttattgttttgcgcgttcgtgtagtttacgttttttttcgtatatcgcgattttagtcgcgatcgttcgttcgtattgttgttgtatttgttgtaatttgggtttttttttaggtgcgtgtagaagtttagagttagttttaggtcgtagtttcggttttgtagtttgatttttttatttgttcgagtggagggaggcggtttttttgtggagataggtggttgagttttaagtcggttcgttatgttttttagttttattattttagttaggaacgcgacgaattatggtataatggttataaagttggggtatattgaatttttgttaggtttcgttaaatgaaatagttaatatttaattgaaattgattaataaaaatggtagttttttgtggtttaattttattaaagatattggtttttttggggttaagtaggttttgataggattggtttgtgttgttataaatttttgggaagtgtgttttaagttgtggttacggggatagtatgtataggtgatttaattttaatttattaaatatatggagtttattgtgtgttaagtattgttttaaaagttttaatagtatttaatttttatagggaagttaagaaatttatgtattattttttttttttggtggcgttacgaatattatgggatatggaaatatatggggttttagaaatgtttttcggttttggtaaatttataaacgtagttattaaagttggtgtataatgtattatgaaaataaaatttgttgtgtgttaagtaaagaaaaattgttggtgatatttttggaaattaatttttattaatataaagtaagtagaaatatatggtaataaaatagattggtttatttaaggagtttaaaatgtgttgttttagtattttttattattataggaaaagtaaaataaaggtcgtttatttggattagaaataagtttataatattgaattttagatataggcgatagaggaatttgaagagatggaaaggttagagagatattttagttgttagaaaatttagttagttttattaggaaattttttttttttttttttttttttttttttttttttatatatatatatatatatatatatatatatacgtatatatatatattgaggagtaagataaattttataaagttataatttttttttttttgagataaggttttgttttattagttaggttggagtgtagtagtaagattatagtttattgtattttttattttttgggtataagtgatatttttgttttagtttttagagtagttaggattgtaggtaagcgttattatgtttggttaatttttttttttttttttttttttttgtattttttgtagagatagagtttttttatgttgtttaggttggtttcgagtttttgagttttagtgatttttttgtttgggttttttaaagttttttttatgttgtttagtatggtttggaatttttgagttgaaatgatttttttgtttaggttttttaaagtgttggaattataggtatgagttattacgtttggttataaaatttttgtattttatattaaagaaaattgttttagttgatatataaattattgatttgtagtttgtatatagttatagtaaatttggtgaataaattttttagtttttagaagttgtagaattttagaaaggaaaataaataggtatattggtaggagtgggaggttgttgttgattttttgatagttggggaagagtttggggaaaaagaaagggagggaggggaattttaaaagttttgtaatttggagttatttagtgaggagagagttagttttttttagttaggtaagttttgtggtttggattgtatttttgtttagtaaaataagtgtgatttgattttgggtagggtatttattatttttttttttttttttttttttttttttttttttttttttttttttttttgagacggagttttgttttgtcgtttaggttggagtgtagtggcgcgattttagtttattgtaagtttcgttttttaggtttacgttatttttttgttttagttttttgagtagttgggattataggcgttcgttattacgttcggttaattttatttttttgtatttttagtagagacggggttttatcgtgttagttaggatggttttaattttttgatttcgtgattcgtttgtttcggttttttaaagtgttgggattataagcgtgagttatcgtgttcggttttattattttttaatattatttgtgagaagaaaatagataatgtttaagtggagtaataggaaaaaggggaattgatattttttaaaagttttttgtgttagatggtttgatatgtatttatatgttttaatttattgaatttttattatgatatagacgtaattgtttttattttgtaggtgaagaaaatgaggttttagattatgtttttaagtttttttaaaaagagttaattatattttttatgtttagtggaagaaagtagaggattgtgtagtatattttattagtagttttattttaaattaagaaaaagtttggttattttggtaatttaataaatgataatattttattattgttgttatttaaagtgtttttaaatacgaagagtaatttaagataaagttaatgatataatatatataaaaataggatgataagtataaatttgaatttaaggaaatatattaagatgttaagaataataatttttgaatagtggggttatgagtgataatattttggaaaatatataaaattatataataaaataattatttatttttttatattttttagtttttattataaaaatattttaattttattaaggaaagaaaatttttggtgttttgaagagataattttttagttatatataaagttttaatattataaaaagatttatttttagaaagttttgaatgggttattgtttttttggagtaaaaataaaataaaagataaaaaataaaataataggtaaattttttttattaataaggagttattgattttaatgtagttgatttattttaaggagttattggatttatgattttagagttgagatataaaatgtggttttaagttttttagtttttagattaaaagaaaagtagtttgtttttgtgtattagtttgatttaatattttattggaatttttttttgttgattgtttgattttgttttaattttaagatattagttttatataaagataaaaattattttttttaaataaaggagaggtatggtgatttttatttttttttttatggattggatttaataatatttttaaattgttttttgatagtttaattttttttgtttttggatgagtattagttaaattcgtgtttttgttaggtagatgttgcgtttgagtttatgtagtacgatggtttagttaaattgtaatatattatattaatgattttggattaaatattattaattaggttttgtttttttttttttttagggaggtatagggagagtattatattttatttgtattagttttgtatttaaaatggtagttatagtttttatgattgtttttatattaagtttgagtttgaatgatacgaattttggataatgttttgaatttatttataattttaaggaaaattttattgcgtattataatagatattttagtaaattagagtagggaaaagattttttatttaaaatataaaaatattttaaaaattttgtttattatttttttatatttatgttaatttttataaattaattgggaggaataaatataaatgagttataattttaaggaattttttttattttttttttattattggtatagtgaggaaaaaatggtatatgaaaaatttgagtttataaaataaaggttaagaagttttcgaaatttttttagaatattgtaaaatgatttattatagtatatttttttatattaaattttataaagaatttaaaatattaatagtttatatttgaagagaattttttttttatttgtaaggtgtttttatatatagtatttaattttatttatggtaaaattttgtgagttaattgttattattttatttttatagtttaggaattgaggtttagtgagattaagtaagtggttttttaaaggttttgtagtattttttatttaattaatttgggttttgtgtaggtttatagagtatgtgtgttatgtgaagataatgtggtttattggaaattatagtatttttttggaaaaagtattttaattagggtttttggtattatagattatttatgtttatattagtatgtatgattttagttaaggaataagttttttttgttatgatatttgaaaagtgggatatatgatgtttgaaaatgggataaagtaaaaaataaggattaatttattgattatttatattggggttagtaaattgtattttataggtttaatatttttattatttgttttagtaggtaaagttttattggaatatagcgttgtttattggtttatgtattggttataattgtttttatattgtagagatagatttgagtagttgtaatagagattatggcgtgtgaattataaaatatttatttttttataaatattttatagaaaatttgttgttttttggtgtagatgatattgaaaaattattttgagtatttagttttgataaaagtatttaatttttggttttatttagattttttaagtaataaataaataaaaaattaaaaaataagaatagattttgagtaattagatgagttttgtagaattttaagaatagtagtttgttttttattagtttttttaattaatagtggtaggaggttttggggttttttataaatgtattaaatatttatgattatatgtaaaattttatgttaatataaatgtattatttgggaaaaaatagtggtttataagaggtttcgtttgagttttaggatttttttttatttttattaattgattatggaagttttattttgtttataattttgtagaaagtttttagttttatatagttttttttttcgtattaagaaaattatttttttttttgaatttttatttcgtttatttagtttttagtatatgttggtatttaatttgtatgttttagttttttaaaattttaagtttgattttattatgtaagtaaaatattttttgaaatgatagaagagtagaaaatagatttgtataatgaggaaaataaaagtttttatttgattgtttagatagaataatttttaatgtttttgttgtatatttttattaatatttttataatggtatgttagtaaattgttggggaaaataagttttgatttttagtgtttgttgattttttaaatgcgtatatttttattatgattgattaagttattagttgtttaataattggtttataaaatttttattttaatagtttgtttttttgagttagtatgagttagtttaaatattttattgtttatatgtatgtgtgggtatgtgtgtgtaatttgtatatattttttatatatgtgattttttttttataaaaaatggaatttaaaatatatgattttattgtaatttgttttttttatatattaaatatggtaaaaatacgtagtttggttaatatagtgagattgtttttttataaaaaataaaattagttgggtatagtggtatgtatttggagttttagttatttaggaggtttaggagtgagggttttttgaggttagtagttggaggttgtagtgagttatgattatattattgttttttaacgttggtgagagagtgagattgttttttaaaaaaaatttatatattggtatatgtatttttatattattgatgttaaggaatgtataatgttttattgaattgatatattagggtttatttaattatttttttatttttgggatttttagagtatttttagtattttgttattatatataatgttatgatttaaattgttgtaatacgtttttttttaagtgagattatacgtgataatatgttataattaaaagtgttatataaatattaattttcgtttattattattattattgtgtatatgttttattattttatttagattgtgagtgtttttaaatgaggtaggggtatttagttgtttgtattttttatagtatttagtaaattatattcgtatttattttatatttgagaataaagatgattattagtttattttgtttttgttttgttttagtttgtttttttgagatagagtttcgttttgttatttaggttggagtgtagtggcgtaattttcgttttttgtgtttaagtaatttttttgttttagtttttcgagtaggtgagattataagggtgtattattatgtttggttaattttttaatttttagtagagatgtggttttattatgttggttagattgattttaaatttttgattttaggtgattcgtttgttttagttttttaaagtgttgggattataggcgtgagttattgttttcggttagtttattttgttttttaatttttgatgtgattagtggtttaatagtgtaaagttgttaggttttatatagtttttagttattaatttgagtttttttttagagaaaatttaattggacgtgtttgggattgaatttatggtttgaattttattgatattatttttaattgaaaaaattggtttgtgtggttttatattgtttttatgtaatatattaaagtgtttttgattttatgggataaaatgtcgtatataaattaatttttttttatatatatatttatatatattatatatttttttttttttagtaataaatgaataatggtattaattataaaatatgtttattttgagtttattagaaaggtttttgtatttttttttttatattaagttttattttattattttaaattataaatatattttagttgtcgtagttattttaggatgagagtataaagttaatattataatataaatatttaatgaaatagattaagttattaaaattttttggtagtattataaggttgttataaaagtgtatgttagaggagggataaaaagttttttaataagttataaatttacggttatgaatattttttttatttttagggaaaatatatttttaattagtattttattatgaaaatttttaaatatatagaagataagtttaaggaattttatagtgaatatttaagtatttattatttagattttataattaatattttgttttatatatttatttatttattaattcgtgtgtgtgtgtgtgtgtgtgtgtgtgtgtgtgtgtgtgtgtgtgtatgtattttaaagttaattatagatattagtattttttttattttagtatttatatttttatttagagaggaaatttaaattttaaaagttaggtatttttttagtttggaaaagttattgattaagtttgggattgattttagtttcgttttgtaaggatttatgaaaatagagataggtaatatgttgtggttttttagtgaaatgttagatggtaagttgttttgtgttggaggattttcgagttatagtttttgttttaattggggtggtttggggtattttttggatgtggaatatatatacgtgtgtgcgtgtatgtatgtatgtagttatattatataattattattttttatagtaatatgataaagtgggtattatatttgttttatagtggagggaatgtgttggggtggggatagtaggtgattcggttatggttatatagttagtatgtgttaggaagggaaattgtatattttttttgtggttttggagtcggaattattttttattttttaagagatttttttgttttagtggtttttggtattatttttttatttggtttttatttaatttttattggtttgttggaaagtattaagaggattgtatattgagaattggtttttggagtagttgatttagaagagtgattatagtttagagtagttaagttaaggttttaagaattaggttaaaggtaagtaggatgagtatggaaagttagaattttgtttgtttttaattattatgattttttgatttgtttttagg

SEQ ID NO: 1900 - DNA, 13427 bp, Artificial Sequence
  chemically treated genomic DNA (Homo sapiens)
tttgaaaataaattaggaaattataataattagagatagataggattttgattttttatgtttattttatttatttttagtttgatttttaaagttttgatttggttattttgaattatagttatttttttaaattaattattttaaggattagtttttagtatgtagtttttttgatgttttttagtaggttaatgggaattgaatgagaattaaatgaagaggtaatattaaaggttattgaagtaaggaaattttttagagaatggaaagtggtttcggttttagagttatagaaaaaatgtgtagtttttttttttgatatatattagttgtgtagttatagtcgagttatttattatttttattttagtatattttttttattataaagtagatataatatttattttgttatattgttgtgaaaaatggtgattatatagtgtgattgtatgtatgtatgtacgtatatacgtgtgtgtgttttatatttaaaagatgttttaaattattttagttaaagtagaagttatggttcggaaattttttagtatagggtagtttgttatttagtattttattgggagattataatatgttatttatttttgtttttataagtttttatagggcgggattaaagttagttttagatttaattagtgatttttttagattgagagaatatttggtttttaaaatttggattttttttttaggtaaaaatatggatgttgaagtgggaagaatattgatgtttgtgattaattttgaagtatatatatatatatatatatatatatatatatatatatatatatatatacgaattgatagatggataaatatgtgaaataaaatgttaattgtagaatttaggtggtgagtatttgggtgtttattatagaattttttaaatttgttttttgtgtgtttgaaaatttttataataaaatgttggttaaaaatgtgttttttttaggagtaagaaaaatatttatggtcgtaggtttgtaatttgttaaaggattttttgttttttttttaatatgtatttttataataattttatgatgttgttagaagattttaatggtttaatttattttattgaatgtttatgttataatgttaattttatatttttattttgaggtgattacggtaattggaatgtatttataatttgaaataataaaataaagtttgatgtaagagaggaaatgtaggaatttttttggtgagtttaaagtggatatattttgtgattaatattattgtttatttgttgttaggagaaagaaggtgtatggtgtgtgtgggtgtgtgtgtgggggggggttgatttgtgtacgatattttgttttatggggttaagaatattttaatatattatatgaaaataatgtaaaattatatagattagtttttttagttggaaataatgttaatgaagtttaggttatgagtttaattttaagtacgtttaattgaattttttttgaaggaaaatttaaattaatgattgaggattgtatgaggtttagtaattttatattgttggattattgattatattaaagattagaaaatagaatgaattggtcgggggtagtggtttacgtttgtaattttagtattttgggaggttgaggtaggcggattatttgaggttaggagtttgagattagtttggttaatatggtgaaattatatttttattaaaaattaaaaaattagttaggtatggtggtgtatttttgtagttttatttattcgggaggttgaggtaggagaattgtttgaatataagaggcgaagattgcgttattgtattttagtttgggtgatagagcgagattttgttttaaaaaaataaattaaaataaaataaaaatagaataaattgataattatttttatttttaaatatgagatgaatgcgggtgtggtttattaagtgttgtggggaatgtagatagttggatatttttgttttatttgggggtatttataatttaaatgggatagtgggatatatgtataataataataataataaacgaaaattaatatttatatagtatttttagttatgatatgttattacgtatgattttatttagaagaaaacgtattgtaataatttaaattatagtattatgtataatagtaaaatgttgggaatattttaaaggttttaaaaatgaaagaataattaaataaattttaatatattaatttaatgaaatattatatattttttaatattaatggtatagaagtatatatattaatatataaattttttttaaaagatagttttatttttttattaacgttggagggtagtggtgtgattatagtttattgtagtttttaattgttggttttaagggatttttatttttgagttttttaagtagttgggattttagatgtatgttattgtgtttagttaattttattttttgtgaggaaatagttttattatgttgattaggttacgtatttttattatatttggtatgtgaaagaagtaaattataatagaattatatattttaaattttattttttgtaaaaagaaaattatatatataaaaaatatatatagattatatatatatatttatatatatatataaatagtgaaatgtttgagttggtttatattgatttaagagagtagattgttaaaataggaattttgtgagttagttgttaaataattggtagtttgattaattatgatgagaatatacgtatttgagaaattagtaaatattgaaaattagggtttgttttttttaatagtttattagtatattattataaaaatattagtaaagatatataataaaaatattaggaattgttttgtttgagtagttaaatgagagtttttattttttttattgtgtaaatttgttttttgtttttttgttattttaaaaaatgttttatttgtataataaaattaagtttagagttttgaaagattaaaatatataaattaaatattagtatatgttaagaattgaatgaacgaaatgagggtttagaggagaaagtaatttttttgatgcgaaggaaggggttatatgaaattggaagttttttgtagaattgtagataaagtaaaatttttatgattagttgatggaaatgaaagaaggttttaaagtttaggcggaattttttgtaagttattgtttttttttaggtgatatatttgtattagtatagagttttatatgtagttataggtgtttaatatatttgtaaaaggttttaagattttttgttattgttggttaggaaaattgataagaaataaattattatttttggaattttgtaagatttatttaattatttaaaatttgtttttattttttggttttttatttgtttgttgtttgagaggtttaaataaagttagaaattagatatttttattaaaattgaatatttaaggtagttttttagtattatttatattaagggatagtaaattttttgtgaagtatttataaaaaagtaaatattttatgatttatacgttatggtttttgttgtaattgtttaagtttgtttttgtaatgtgaaagtagttgtagttagtatataaattagtgagtaacgttgtgttttaataagattttatttattaaaataggtgatgggggtattaggtttgtggggtatagtttgttaattttaatgtagataattagtaggttgatttttattttttattttattttatttttaagtattatatattttattttttaagtattatagtagaaggagtttattttttagttgaaattatgtatgttgatgtgagtataaataatttgtggtattagagattttaattaaaatattttttttaaagaaatattataatttttaataagttatattatttttatatgatatatatgttttgtaagtttatataaaatttaaattggttaaatagaaaatgttgtaaaatttttgaaaagttatttgtttaattttattgaattttaatttttggattgtaaaaataagataatgatagttaatttatagggttttattatggatgaaattaaatattgtatgtaaaagtattttgtaaatgaaaaaaaaattttttttaaatgtagattattaatattttaaattttttataaagtttaatatagaaagatatattatggtgaattattttgtaatgttttggaaaggtttcgggaattttttagtttttattttataagtttagattttttatgtattattttttttttattatattagtaataaaaaagaaatgaggggaattttttgaaattgtaatttatttatatttattttttttaattaatttataaaaattagtataaatgtaaaagaatgataaatagaatttttaaaatgtttttgtgttttaggtaagagattttttttttgttttggtttgttagagtatttattataatgcgtaataagattttttttaaaattataaataaatttaaggtattatttaaagttcgtattatttaaatttaggtttaatgtgaaaataattataaaaattgtaattattattttaaatataagattgatataaatgaaatatggtgttttttttatgtttttttaaaggaaagaaggagtaaagtttagttagtagtatttagtttagaattattagtgtaatgtattgtagtttaattgggttatcgtgttgtatgaatttaaacgtagtatttatttagtaaaaatacgagtttggttagtatttatttaaaggtaagaagagttaaattgttaaaaaataatttagaaatattattaaatttaatttataaggaagggggtaagaattattatgttttttttttgtttgagggaaataatttttatttttatgtaaagttgatgttttagagttaaaatagaattaaatagttagtaggaagaaattttagtaagatattaagttaggttaatatataagaataaattgttttttttttaatttggaagttaagagatttggaattatattttgtattttagttttaaggttatgggtttaataattttttgaaataaattagttgtattagaattagtgattttttgttgatggaaggggtttgtttgttgttttgttttttattttttattttgtttttgttttaagaagataatggtttatttagaattttttggaaataggtttttttatagtgttgaaattttatatatagttgagaagttatttttttaaagtattaaaagttttttttttttaataaagttaaaatatttttatggtaaaaattgaaaaatatagaaaagtagataattgttttattatatagttttatatattttttaggatattattatttataattttattatttagaaattattatttttaatattttggtatgtttttttgagtttaggtttatatttgttattttgtttttatatatattatgttattagttttgttttgggttatttttcgtgtttagaaatattttaaatggtagtaatgatagggtattattatttattggattgttaagatgattaaatttttttttaatttaaaatggaattattaatagaatgtattatatagttttttgtttttttttattgagtatagggaatataattagttttttttaaggaggtttgagaatatagtttgaggttttattttttttatttataaaatggggataattacgtttatgttatggtgaggatttaatgaattgaggtatgtaagtatatattaaattatttagtataagaagtttttgagaaatgttagttttttttttttttgttattttatttaaatattatttgttttttttttatagataatgttaagaaatgataaggtcgggtacggtggtttacgtttgtggttttagtattttgggaggtcgaggtaggcggattacgaggttaagagattgagattattttggttggtacggtgaaatttcgtttttattaaaaatataaaaaaataaaattagtcgggcgtggtggcgggcgtttgtagttttagttatttaggaggttgaggtagaagaatggcgtgaatttgggaagcggagtttgtagtgagttgagatcgcgttattgtattttagtttgggcgatagagtaagatttcgttttaaaaaaaaaaaaaaaaaaagaaagaaagaaagaaagaaagaaagaaagaaatgataagtgttttgtttaaagttagattatatttattttattgagtaagaatatagtttagattatagggtttatttggttaggaaggattaattttttttttattaaatggttttaggttgtaggatttttaaaatttttttttttttttttttttttttttagatttttttttagttattaagaagttagtagtaattttttatttttgttagtgtatttgtttatttttttttttaggattttgtagtttttggaggttgagaaatttgtttattaagtttgttgtgattgtgtgtaaattataagttagtagtttgtgtgttagttggaatagttttttttaatatgaggtgtaaaaattttatggttaggcgtggtagtttatgtttgtaattttagtattttgggaggtttgggtaggaggattattttagtttaggagttttagattatattgggtaatatagagagaattttaggaggtttagataggaggattattggaatttaagagttcgagattagtttgggtaatatagggagattttgtttttataaaaaatataaaaaaaaagaaagaaaaaagaaaattagttaggtatgatggcgtttgtttgtagttttagttattttggagattgaggtaggagtattatttgtgtttaggaggtggaggatgtaatgagttatgattttgttattgtattttagtttggttgataaagtaagattttgttttaaaaaaaaaaaaattataattttgtaaaatttattttgttttttaatgtgtgtgtgtgcgtgtgtgtgtgtgtgtgtgtgtgtgtgtgtgtaagagagagagagaaagagagagagagagagagagattttttggtagggttagttgaattttttggtagttgaggtgtttttttggtttttttatttttttaaatttttttgtcgtttatgtttaaaatttagtattataaatttatttttaatttaaatggacggtttttgttttgttttttttatagtgatgaaaggtattaaaataatatattttaaattttttagataagttagtttgttttattattatgtatttttatttgttttgtgttaataaaaattaatttttagaaatgttattaatagtttttttttatttaatatatagtaagttttgtttttatggtgtattgtgtattagttttaatggttacgtttataagtttgttagggtcggaagatatttttagaattttatatgtttttatattttataatattcgtaacgttattaagagaaaagaatggtgtatggattttttgatttttttatgagaattaaatattgttaaagtttttagaatagtgtttggtatatagtaagttttatgtgtttgataaattaaaattaaattatttgtatatgttgttttcgtaattatagtttagaatatattttttaagggtttgtgataatataagttaattttgttagagtttatttgattttagagaaattaatgtttttaatgaggttgaattataagaaattgttatttttgttggttaattttagttgaatgttggttattttatttgacggaatttaataggaatttagtgtgttttaattttataattattatgttatgattcgtcgcgtttttgattggaataatggggttgaggggtatggcggatcggtttggggtttagttatttgtttttataggaaaatcgtttttttttattcgagtaggtggggagattaggttataggatcgaggttgcggtttggggttggttttgggtttttgtacgtatttgaaaaggggtttaagttgtagtaggtgtagtagtagtacgagcgggcggtcgcggttgaggtcgcggtgtacgaagagaagcgtgagttgtacgagcgcgtaaggtagtagcgagaaaagtaacgttagcgtttgttatatgcggttttcgttcgagcggtaggtgttgtttaggttgagcgtcgtcgttgtttcggttacgaataggaatacggacgttagtatcgaggtcgggaattttattttcgcgcgttagcggcgtttatcggggacggacgtagtggcggcggttgtgtggttgtggcggcggcggtcgttgttcgaggggtttttagtatgtttagttttaaatcgttttcgcgttttgcgtagttcgtcgagggtacgcgggttcggtcgatcggtttgggttttggaattggatttggtgggggcggtcgatttggttggggtggggtggggtggggcgagttgcgtagtttcgtcgggatacgtttacgcgtttcgtgcgtcgtttgttcgttcgttcgttagtgtcggttgcgtttttgtggtgatcgttttttggcgggtcgcgaattcgcgttttacgacggtttaggttatggagcgggagtttaaaaggatgtagttcgttttgcgggcgtcgcgcgtagtttttgggttttagagttttttgggttttattttgggaaatcgtttatatttttttgaaaaattgtaattattcgggtttagaattggagttcgggcgtttttttagtttagtttattttttgggtcgaggaaacgcgtgattttttaaagggttagtatttttggttttttaaaaataattagattatatagaggttttttaaagtgtaagtatattgttatgtatttattattaagtgggaaaagattttattttttattgtgttatgtgagtatgtttttttgttttttaaatatagtggtttgaagtattgtttttagtggtgaaaaggcgttaaagatcgtttttaggaatttgtttttattttttagaaaaattgtttataaaatatatttttttgtaattgtaagtaatttagggtaaagattagggtttaataaggaagtagttttttttattttaagatagatttttgtttattggtgtgttaatattaagattaatataattttttttagtttattgaattttttattatttttttgatattaggatgtatttagtttattttcgttttttagatttcgattaagttattaaatttttttgaaatttaggttttataaagggattagatttaaataattataagatttttttttttgttgaaattgggtgattttaatttttaggtatttttggtatttttttatttaggaaaataatgtaaatataaatagaatataaagatttaaaaggaattaaattaaaaaagaggtatagggagagaatgtggtgggttgtttttttgttttttatgtggtatgagaaaatttatttatgagttaaggggtagatttagttagtagttgagaggtagtaggttttttttttaaaaggattattaatgtttatttatagaatttagaaggttattatgttttgggttaagatatatatattgttataaatatagaattagtagtaatattttatagagtatttgtgtaatgttttatttgatattatggttagttttaaaggaaaaattggtagtttagaattattaattaggatattgaatatttagtattagattttattttaaggtaaaggattattataggttttatattaagtgtattgtatataaatgtattataaggaggggtaataagttaataaataatatcgttttaaatattataaagtttagtttatagcgaattattttttatagtataaaacgaatatagaaaatatatttggaaagattatagtgtttagaatattgtaatagtagttgtaaaaattataaagtgtatttttaagtttttgattttattttgtttatagagattttattatattatgtagtgggttgtgagtaaatttttatatgaaagggaagtaatattaattgattagtattattttttgtagaataattaataataaaagttaaattttgatgagtatttgtaagttgattttttttagtttgtatattagttaatttgttttagtgattacgtttttttgtattattatttgttattttgtttttgaaaataatatatattttatagtttatgattgttaatttttttgttagatattttaatgggttttgattaaagattaatgttatgtattgtattatatttttttattaggattaaaatatttattatttttaaaaatattatgtatataataatagatttatagaaagtgatgttttggtatattaatatgtaatatattagaatatttgagaatttggttttattataaaatatagtagtatgatattttgtgatatagtaaaatatttggtaaaatattttattttaaatttagatttaattgttgtagatgtttttgaaagagttttaaagtgtttttaaggaaatataataattagtaagaggttatataatttgttatggtaaagatatttttaaaaagttttttattttgtgttcgagttttttaaaattttatttgtatataatagataagtgttgtttgatttagtgttaatggaaattagtaggattttaaagtagtaataattaattattattatttttttttataattttatgtttttaattttgtatttgtgttaaggtaaatatattgtaaatagtataattttattaataatattaattttttgattagttttttaaaatttagtagtattttaaataatagtagttatttatttttagatataatttgaaataagtagttatattatattgatagagtatttttttgtatttttttataagtaagaaattgttttaatgtgtagtttgtgaaatgtattattaggaaggtgagttttgttttttttaatgatataattatatttttgtaagtattgtgatttatgttaaaaaagttttttggagtagtaaattttattcgttgggaaatatatattttaaaattaatatgtggtgtttgatttagtatatatttattagtatatggttttgtaaagtgttttttttaataatttgattttacgaaatttattttttaatgtttgttaatttagagttattggattaaagatattaaaatttagatttttaagaagagtttttttagatgtttaaagttgagaaagttgtatttttttaaagattgggtcgtttttttttaatagattttaaaattaaatttttgtatttagaatattttatttttattgttagagagtttatgtgtaatttatgttatattttgtatttttaagaatatagggattttattgttgttatagtatttaaaagatatttttaatattgaaatagtaaagttttaaaaaataaagataaaacggatgatttaaattaatttatatgtttgaatatatttatatataagggttattatatttaatatgaattaaatttagtagtagaattaattatattggtaattgttatttaagtatagattttaaaatgaaatttgtggggataacgttagagattttattaaaattaagttgtaaaaagattatttgttaaagattgatagtagttaattatagtttgtatttttaaaattgattgttatgttatagttattttatatatattattagaatagtatatattaaagtatgtatattgttattatatataaaatataaaaatattgggaggtcgaggcgggcggattacgaggttaggagatcgagattatttcggttaaaacggtgaaatttcgtttttattaaaaatataaaaaattagtcgggcgtagtggcgggcgtttgtagttttagttatttgggaggttgaggtaggagaatggcgtgaattcgggaggcggagtttgtagcgagtcgagatttcgttattgtattttagtttgggcgatagagcgagatttcgttttaaaaaaaaaaaaaaataaaaaaataaaaataaaaataaaatattagtaagaattgtattattttatttaagaaattgtatgtatttggtgtttatatatatatatatttatatattttttattatatttttatatttttttagagtgtttatcgtttttgaaagaataagaggaaggtatatattttggtattttttgaagatttatgtttaagtgtaagattttaaagttatttgttggttttaatttaggaggtggttgttttagaataaaagagatattgtggttttcgggtgattttgaatataaagataaatagaaatgggttttaaaaggagtggagaaagagaggaaaatataaagttttttttatggagagatatttgtggtaatttttaggatttttatagatatagaatttaataattaaataacgttaaataggtttttttatttaggagagtttatttaatttttaatatgttaatgtattatgtaatttttaaaagggggtaaaataataaaatttttttaatttatttaattatagattaaatttttttatagggtagtttatggtattgttgggttgtatttggggaaatattgtagttttcgtgtaataggtaggttttgtttatatttttttttataataacgaaggaaggtaggaagattttattaatattaggaaataggaatgggattgtttaatataatagttaatttatatgtagtttttatatatttgaaatgtggttatttcgagattggagatgtatagtaagtataaaatatatattagagtttgaagatttagtataaaaatgtaaaatagtttatttatgtttttatattgattgtatattgaaatgttattattttggatatataaggttaagttaaatatattattaaaattaattttattttttttttttatttttttggtagttattagaaaatttgaaaattgtatatgtggtttgtattcgtggtttatagtataattttagtagatattgttgttgtatttgtgaaatttatggttgttattttttatagatggttattaatggttttaatttagtagaagttttaataagtttagttaagtttaataaataagtttaataaatttaattaatttagtttgaatatatttttttattgagatttatttaatagttaaatgttggtttttgatttatatgcgatattgattttttttaagttagttt

SEQ ID NO: 1901 - DNA, 6801 bp, Artificial Sequence
  chemically treated genomic DNA (Homo sapiens)
atatattatattttgtttatttatttattagttgatgggtagttgggtagtttttagtttttggttattgtgaatagtgttacgtgaacgtttgtgtgtaagtttttttttatatatttgtttttagttttgtgggaatatatttatgagtggaattattgatttatatggtaattttatgtttcgtgttttgagggataaattgtttttcgtggtagttgtattagtttatatttttattaataatgtatgagggttttaattttttttatatttttgttaatattttttttttttttttttttttgttttttttttaaattttagttattattattaaagattataaaggttattttgattaagtttttttgggaggtttgagggttattttttagttttttaagttttttttagacgttgggggttgattgggaaatgaagtgtaaatgggtaggtagattttgtttttattggtattagggtttaaggtggtataattagttatggtttttgaaatgcgggagaagaaaagagtagggtttttattggggttttgagtgattttttttatttttttagagtttatagttttaagggtagttttatttatgttagttaggaggtatgatattatatagtttcgtttttgtttgtttgaggaaattgttttataattttaattggggttagttttggggatagttagggtttttataaggttatgggtagtattttgttggtggagggtgtttgtatgggtttgggtggttgtttggatatattttttgttattcgggatgagggaggagtagaggatgatataaacgttatgttaggtaaggttataagatttagtgatatatagaaattttttgtgggaggagttggggtcggtggaaaaggagttaagtttttttttaagttgggagaggttggttagggagaagggaatatgaatttggattatgttttcggttttaatattttttttaagggaaggattttgtaagatttttggtagtgggagtgatttttggtagaagggggttgggtgtaagatcgggtgtgtagtggagaaggaaggttgggatggaggattaggataagggggtgggggagcggagtcgaaggagaaggaggaggggatggtggtgggagggggattgagagagggggtttgttggtagggttgaaattataggaggaaggtttgtttggaggtgtgaagtggtattttattgtgttttaatttgtatttttttaatgattaatgatgaatatatttttatgtgtttgttggttattagtatatttttttcggaaaaatgttaatttaagttttttgtttatttttaaattgggttgtttttttgttgttgagttgaaagtgtttgttataaattttggatattagatttttattggatatttgatttgtaaatatttttttttattttgtggggtttttattttaattttttttatagtgttttttgacgtagaaaagtttttaatttttttttgatttttgaattttttattggttttttgttttttaaagtgtattttgtttttgttggtttaatgttttagaattttggtgtcgttggttagatattattttgttatttattattcggcgggtggtggttttttggatggtttgtatggagttgttgttgtttagggtattattaagattgaagtttttgttattttttagtaggtagtagtaggtagtgtttttagtttttagtttgattttgatgtttagtagggttttgtatttttgagtttggtattgtttttttgttcgggtttgtgttagttttgattttaggtgtagtaggatttcgttgagttgttttttttgtaaggtatagcgggtttcgattttttttaggttgttttttaagttggtttttagattttttatggagtttaggttgatttttaaggattggattatatattttagtttcgtgagtattattttagtagttttaatttcggtggattgcgtggtgattattgaggtgttttttttaatttgttgagattagtatttgtttagttttttttagttttttcgagttagtttattatattggggtcggatgtttgttatgattttggtaaggtttcgagattgggggtatttatttttatggttaatttagagttggtaatttaggtttgtaggttttttgtaatgtttaattttatttttttttttttatttaggtttgtttttatttgaatagatttttttttagttaagagaattagataaattttattttggtttttttattggtagttttttttttaaggatttaatttgtgtaagttgatttttagtatatttaagaatgtaattaattgataagatattgtggtaagttatatttatagtttttaagaatttatttgtttgataacgtttaaagttttgtatttataattttgtaatagttttaaagtttttgtatttggaattgtttatttttttgtaattatttatttttttaattttttgattatttaatttttgtaaaattgttttaattagacgattttttttttttaaattaaggtataaaagttaattaagtttttttttcggggtcgagagaattttgagcgttagtcgtttttcggtcgtcggttaataaaggatttttaatttattttaaagtgtggcgtttttttaattcgttcgggtataatatttttatttttttttcgtggtttttttttatgaagagtagtttttttttgagagtttcgatttttgtttttagttgtagtcgagtgatattggtgttattagtgattttcggagtttatggatgtggttttttatagattggcgtatggttagttttgttttatatttgattttaaagttattagtagtaagattagtattgttaatttgtagaataatgtaggtattgtttatagtatttgtgaagatttgagtttttaggtttttaatggttttgaagtaatggtttatttttgatttggggtttttttttttataggtgtttttggattttattttttagtttttagtttttggtttttaggttttttattttgtttaggtaggaggttaggtagttgtttaggttttgtacggttttttttttgttttggatgttttttatttttgttagatttttggttattttcgcggttaggttttcggaatttatgttgtttaggtagttggtggagcgggatatggagattcgggaattagagttttcgtgtttgtatagacgttggttatgttgttgattagtcggatatcgtagttgggtgtttggatagaatttagggatcggtagttggtggagaaggtggagcgagtggtgaagtttatgttgtttagggaggagagtgagaggataggatttaggttttgtcgacgattttaatttttttttgagataagatgttattgtgttgtttaggttggagtgtagtggtgttattatagtttattgtagttttgattttttgagatgggtttttgttatattgtttaggttggttttgaatttttggttttaagtaatttttttgtgttggttttttaaagggttgggattatagatatgagttattgtattttgttaattattattattttttaatagtgatagggttttattgtgttgttttagtttgttttgaatttatgattttaagttatttttttgttttggttttttaaattgttgagattataggtgtgaattattgtgtttagtttagtttttaattttaatgaagtttagtttttttttttttgttgtttgtgtttttgatgttatggaatttgaaatagttttatttgggtaagattgatgggtagggagaaagaaggatttgaggggaagggagatggggatggtttgagattttatttttaatttaatttaagattttagtaggtaattgttttatacgaggttttgtagttttatgtatatatgatcgataaattagaatattgaattgtgtttttgaaaggttaattattgaatattagtgggaaatattagtgtgtgaggttgtttttttaaaagttagttttaaatggtatatgtagtaattagaagttaatgttttttggttttaattaagtattatttgtaataaagggaaagtatatatttttgggaaagtttgttatgttttttttgttatattagttatatttttgggaagttaggatatttggtttagatttaaatttattgtttatttggtagtagtttatttttattgaaggaatattttatgggaaagatagttaattttatgtatattagttttggagtaagttttgtatttgtttgaggttatatagtaagttaattgggagttttaatttaggtttttttattttaaatttaaggttgtgtttttaggtcgtgtatttaatataaaattaggattattatttgttgggttttatgattggtattattattatttattgttattattttttgaggttttttacgtgttaggttattgttttggtaatttaatttttttaaagattcggtaaatggttttataattatttttattttattattgaagaaattgaattttggttaaataatttgtttaaggttatatagattttaattgttaagagtttagatttaatttaggtttgattttaaagtttatattttgaattattaagcgagatttattttaaaggtgattaggtcgtgagatatgattttagtacggatttttttttcggatgataagagagtaggtagttaggcgggtatttcgtgttcgcgtatatttagatttcgtttagcgttcgggtaggttatttcgagttttttaattgcgtaggcgtttttatttagaaaggtcgttgggtgcggggagcgtagaggcggtgtagggcggttggttcgtttcggcgtgtagtgcgcgtgcgtggagttgggagttaggttttcggagtgggtcggagatggcggcggtcgacggggttttgtcggaggcggcggttttagagtaattcgcggagttgtttgtttcggtgcgggcgagtatcgagcggaagcggtagcgggtattgatgttgcgttaggttcggttggttgttcggttttattcggcgacggcggttgcggttattggaggtttgggtcgcgttcgcgtttttttttttttttttttcgttttttcggtttttagattggttcgtgtaagtcgagtttcggggttcgggggtcgcgttaatttcgttggcgtatgtgtgtagatttttttcgagtcggagagggaattcgtttagttagtcgttttgttaaagcgttttgtttacgattatagagcgtttttttgtcgtacgcgggttttttgatttttagtttcgggtttttttcgttgtatttcggttgttggtagtttcgatttttcgtttagggatgtagtcgtttcggtcgggaggtgttagttattgttaggtgttagggttttagttgtttcggaaagaggagttagattagtttttgattttggtttttatatttagaattagttgatggaagaggtagattttggtgtttgttagggagagtttttaataattagagttgttaaaagtgtaatggattgttttttatgagtttttcgttattagaagcgtttaaataggaattggaagaacgtttatttatgtggaggagaggagatttagtaattagaattttttatttagtaattagaagaagggattggatagtaaatttttaagattttaatttatagattttatgagtttattttttggatatgtgatttttgcgattttttggtaaaaattagttgtttaaaacgtgtttattgattgaagtaaattaaggattgtttttatgcgatattggtattgttagttttttttattttagatattttggtgagagtttaatgatattttattatggttttaatttgtatttttttaatgattagagataatgagaatttttttatgtgttttttggtcgtttggatatttttatttgtgaagtgtttgtttaaattttttgtttgtttttaaaagttgggttgttttttattgatttagaggattttattatgtattttgaatgtgagttttttgttagatatgtatacgttagattttttttttttaaggttttattttttgtggttttagttatttataattaattatggtttaaaatatgaaatggaaattttcgggtgtatacgtgcgtacgtatatatatataacgtattttattgttggagttttagttgagattattttgtatttttagataaatttgtgaagaattgacgtttttataatattgaggtttaaaatttatatatagtatatttttttatttaagttttttttgattttttttagtgttttgtagtttttagggtagaggttgtatatatttttttttaggttgttattttttaattttaattgtagatttttgtggatattttatatatataattatattatttgtgaatagatgttgttttatttttttttttttattttttatgtttttttggtttttttgttttgttagattagttgggatttttagtataatgttgaatagaagtagtgattgtggatatttttgtgttgtttgagatatattgaatttaaaggaattttttatttatgaataaggtaatatataggtttatttattttaattgttgattgtttttatttatttttgtagg

SEQ ID NO: 1902 - DNA, 6801 bp, Artificial Sequence
  chemically treated genomic DNA (Homo sapiens)
tttataaaagtaagtaaaagtagttaataattgaagtaggtaagtttgtatgttattttgtttataaatagaaaatttttttgaatttaatatattttaaataatataaggatgtttataattattatttttatttaatattatattgaaggttttagttagtttaatagagtaagaaaattaaaaaggtataaaggatgaaaagaaagaagtaaaatagtatttatttatagatgatgtaattatgtgtgtaaaatatttataagaatttataattagaattaagaaataataatttaggaagagatgtgtataatttttgttttgaaaattataaaatattaagagaaattaaaaaggatttaaatggagaaatatattgtgtatggattttaagttttaatattataaaaacgttaattttttataaatttatttaaagatgtaaggtgattttagttagaattttagtagtggggtgcgttgtgtgtgtgtgcgtgcgtacgtgtgtattcggaaatttttattttatattttgggttatggttgattgtgggtaattaaagttatagaaagtgaaattttggaaaagggaggtttaacgtatgtatatttgataaaggatttatatttagaatatataataaaattttttaagttagtaaaagataatttaatttttaaaaataggtaaaagatttgaataggtattttataaatgaggatatttaaacggttaaaaagtatatgaaaaggtttttattatttttaattattaggaaaatataaattaaaattataatgaagtattattagatttttattagaatgtttaaaatgaaaaagattgataatattaatatcgtatggagatagtttttaatttattttaattaataaatacgttttgagtaattagtttttgttaagaaatcgtagaggttatatgtttaagaaatagatttatggaatttatggattagaattttaaaggtttattatttagtttttttttttgattgttgagtaggagattttgattgttgaatttttttttttttatataagtaagcgtttttttagtttttatttgagcgtttttagtaacgggaagtttatgagaagtaatttattgtatttttggtaattttaattgttgaaagttttttttaataaatattaagatttgttttttttattaattagttttaggtatagaggttagaattaagaattagtttaattttttttttcgggatagttgaggttttgatatttggtagtggttgatatttttcggtcggggcggttgtatttttaaacgaaaaatcgaagttgttagtagtcgaggtgtagcgaagaaggttcggggttgggggttaggaggttcgcgtgcgatagaggaacgttttgtggtcgtggataggacgttttgataaggcggttggttgggcggatttttttttcgattcggggagaatttgtatatatacgttagcggagttgacgcgattttcgggtttcgggattcggtttgtacgagttagtttggggatcggggaggcggggagagggaaggggaaagcgcggacgcggtttaaatttttagtagtcgtagtcgtcgtcgtcgagtagggtcgggtagttagtcgggtttggcgtagtattagtgttcgttgtcgttttcgttcgatattcgttcgtatcgaggtaggtagtttcgcgggttgttttaaagtcgtcgttttcggtaaagtttcgtcggtcgtcgttattttcggtttatttcgaggatttagtttttagttttacgtacgcgtattgtacgtcgaggcgagttagtcgttttgtatcgtttttgcgtttttcgtatttagcggtttttttgagtgagagcgtttgcgtagttaaggggttcggggtggtttgttcgggcgttgggcggagtttgggtatgcgcggatacggagtattcgtttaattatttgtttttttgttattcgggagaagggttcgtgttgagattatattttacgatttggttatttttaaaataggtttcgtttggtgatttagagtataggttttggagttaggtttgggttaagtttgagtttttgatagttaaagtttgtgtgattttgggtaagttatttaattagagtttagtttttttagtggtaaaatgaggataattatggaattatttatcgagtttttgggaggattagattgttaggataataatttggtacgtagaagattttaaaaaatggtaatagtgagtagtagtagtgttagttatagagtttaatagatgatagttttgattttatgttggatatacggtttagagatatagttttagatttaaaatgagaagatttgggttgaaatttttagttaatttgttgtgtgattttaggtaaatgtaggatttgttttaaggttgatatgtataaggttggttattttttttatggaatatttttttagtgaggatgagttattgttaggtagatagtgggtttggatttgggttaaatattttgattttttaaaagtgtggttagtgtaataaaagaaatatagtaggtttttttaaaaatgtatgttttttttttgttataaataatgtttaattgaaattagaaaatattaatttttaattattatatgtattatttaggattggtttttagaaagataattttatatattgatgttttttattaatgtttaatggttaattttttagaaatataatttagtgttttaatttatcggttatatatatataaagttgtaaaatttcgtataaagtagttatttgttgaaattttaggttgaattggagatagaattttaagttatttttattttttttttttttagatttttttttttttttatttattaattttgtttaggtgaaattattttaaattttataatattaaaagtataagtaataaaagaaaaaaagttggattttattaaaattaaaaattaggttgggtatagtggtttatatttgtaattttaatagtttgggaggttaaggtaggaggatgatttgaggttatgagtttaagataagttgaggtaatatagtgagattttgttattattaaaaaataataataattggtaaggtgtagtggtttatgtttgtaattttagttttttgggaggttaatataggaggattgtttgagattaggagtttaagattaatttgggtaatgtaataagaatttattttaggaggttaaggttgtagtgagttgtgatggtattattatattttagtttgggtaatataataatattttgttttaaaaaaaaattaaagtcgtcggtaaagtttgagttttgtttttttatttttttttttggatagtataagttttattattcgttttattttttttattaattatcggtttttgggttttgtttaggtatttagttacggtgttcggttggttagtagtatagttagcgtttgtataggtacgggggttttggttttcggatttttatgtttcgttttattagttatttgagtagtatgggtttcgggggtttggtcgcggggatggttaggggtttggtaggaatgagaggtatttagaataagaaggagatcgtgtaaaatttgaataattgtttggttttttatttggatagaatgaggagtttggaggttaagaattggaagttggagagtaaaatttaggagtatttgtagaagaagggattttaggttagagatgagttattattttaagattattgagggtttgaggatttagatttttataaatattgtggataatgtttgtattgttttgtagattgataatgttggttttgttgttgatgattttagagttaagtatgagatagagttggttatgcgttagtttgtggagagttatatttatgggtttcggaggttattgatgatattagtgttattcggttgtagttggagatagagatcgaagtttttaaggaggagttgttttttatgaagaagaattacgaagaggaagtaaaagtgttgtattcgagcgagttaaaaaaacgttatattttgagatgaattaagagttttttattagtcggcgatcgagagacggttaacgtttaaaattttttcggtttcgaggaaggggtttgattaatttttatattttggtttagaaagggggggtcgtttagttaaaataattttatagaagttaagtagttaaaaagttaaaaggataaatggttataggaaagtaaatagttttagatgtaggggttttaagattattataaggttatagatgtagggttttgggcgttattaaatagatgaatttttggggattgtggatatagtttgttatagtattttattagttaattgtatttttggatgtgttgggagttagtttgtataagttaagtttttgaggaaggggttgttagtgaaagagttaagatggagtttgtttggtttttttagttaagggagagtttgtttaggtggaaataagtttaggtgaaaaaggaaaaatgaggttgggtattataaaaggtttataagtttagattgttagttttgggttgattatggaggtagatgtttttagtttcgggattttgttaagattatggtagatattcggttttaatatgatgagttggttcggaagaattgagaggagttggataaatattggttttagtagattgaggagagtattttagtggttattacgtagtttatcgaggttggagttgttgggatgatgtttacggagttgagatgtatagtttagtttttgaagattaatttggattttatgagaaatttgaaggttagtttggagaatagtttgagggaggtcgaggttcgttatgttttgtagagggagtagtttaacgggattttgttgtatttggagttagagttggtatagattcgggtagagggatagtgttaggtttaagagtataaggttttgttgaatattaaggttaagttggaggttgagagtattgtttattgttgtttgttggaagatggtaaggattttaattttggtgatgttttggatagtagtaattttatgtaaattatttaaaagattattattcgtcggatagtggatggtaaagtggtgtttgattaacgatattaaagttttgagatattaagttagtagaagtagggtatattttggggagtaggaggttaataaaaagtttagaggttaaaaaaaaattgaaaatttttttacgttaaagaatattatgaagaaaattggggtaaaaattttatagaatgggagaaaatatttgtaaattagatatttaataagggtttagtatttagaatttataataaatatttttagtttaataatagaaagataatttaatttaaaaatgagtaagggatttaaattgatattttttcgaagaggatgtattgatggttaataaatatatgaaaatatatttattattagttattagggaaatgtaaattaaggtatagtgagatattattttatatttttaggtaagttttttttttgtaattttaattttgttaataaatttttttttttagttttttttttattattatttttttttttttttttttcggtttcgtttttttatttttttattttggttttttattttaattttttttttttattgtatattcggttttgtatttaatttttttttgttaaaggttatttttattattaaaggttttataaagttttttttttgagaaaggtgttagggtcgaaggtatagtttaagtttatgtttttttttttttagttaattttttttagtttaaaaagagatttagttttttttttatcgattttagttttttttataaggaatttttgtatgttattgaattttatgattttatttggtatgacgtttatgttattttttattttttttttatttcggatgatagggaatgtatttagataattatttaggtttatgtagatattttttattaataagatgttgtttataattttatagggattttagttgtttttagaattgattttaattgggattatgaagtagtttttttagatagatagaaacgaagttatatgatattatgttttttagttggtatggataaagttgtttttaaggttgtaaattttgaaaagataaaagaaattatttaaggttttaatgaaaattttgttttttttttttttcgtattttagaggttataattaattatattattttaagttttgatattaatgggggtagaatttatttatttatttatattttattttttagttagtttttaacgtttgaaagaaatttaaaaaattagaagatggtttttaaattttttaaagagatttaattaaagtggtttttatggtttttaatgatgatggttagaatttaaaaaaagaataaaagaaagaaaagaaaagaagtattggtaaagatgtaaaaaaaattggaatttttatatattattggtgggaatgtaaattagtgtagttgttacgaaaaatagtttgttttttaaaatacgaaatataggattattatatgagttagtaattttatttatgagtatgtttttataagattaaaaataggtgtgtgaagaaaaatttgtatataaacgtttacgtagtattatttataataattaaaagttggaaattatttaattgtttattaattgatgaatggataaataaaatatagtatat

SEQ ID NO: 1903 - DNA, 7456 bp, Artificial Sequence
  chemically treated genomic DNA (Homo sapiens)
  unsure 2979, 2998, 3001: n is a or g or c or t
gtaatgtagaatttatggtttttttttttaaatttatgttttttttcgtttttttagttttaatatttgttataaagtaaagtttattttttttttatgtttatatatttagttcgttagtaagtttagttagtttagttttaagagtgtattttaaatttgtttatttttttttatttttatgattatagtttttgtttaagttattattattttttagttgagtgattgtagttttttttttattggttttttagttttgtatttagtaatttaaataattttaaaaaaaaaaaaaattatgttttgtttttgttttaaattttttttggttttttattgtttttagtttaaaatttagttgttttattttggtttataagatattatatgttttggtttttgttattttttttgttttttttattatttgtttttttgttagatattttttttattggtttttttttttttttttaaatatgttaagttattttttgagtttttttttttgatgttttttttgtttagagtgaattttttatggtttttattagggttgattttttttatttttttaaaatttaagttagatattttttgagtaaattaaggtggttttttttagatatttcgcggatattaaaatttgtgatgtttaagtattttatattaaatggtttagtgtttttatgtaatttatgtatatttttcgatatattttaaattatttttagattattaataatatttaatataatgtggatattatggaaatagttgttatgttgtattttttaaatttgtattttttttttcgaaatatatttatttgtggttggttgaatttgtggatgtagggttcgtggattggtagggttaaatgttaaataaatattttatttattttttatttttttcgagatagtgttttattttgtcgttgaggttggagtgtagtggcgtgattttcgttttttaggtttaagtgatttttttgttttagtttttcgagtagttggtgttataggtgtttgatattatgttcggttaatttttgtatttttgtatagatggggtttcgttatgttggttaggttggttttaaatttttgattttaggtgattcgtttgtttcggtttttcgaagtgttgggattataggtatgagttattgcgttcggttagtaaatattttaaataattgtaaaatgtaggttgtagaaggaatttttgggttttttgaaaaaattgggtagattagattaggtaatcggtaaaggttattatattagattttgtttttatatcggttataaatttattatttattaggaaatagtgaaatggtaataattcgtaaatttaggaggtgatttattttatatgtaatattacgagttttattttatttatttatttatttatttaaataatattttttgagtatttattatgtgttgtatatgaatgaggtgatatgagagataaatatattttggaggattatagagtagtgttgatatgatatttatatgtaaaatatttaaggtaaagtgtgttaaatattgtggaagaaggtataaggttttgtagtttttaaaggattaattaagtttgattggcgtgatcggggaacgttttttgaagtagtttgatttgtgatttaaaggatggttggtattttagtaaggggttataaaaaggggtcggtattttagttagaatgtaatttggatatatggtaattaaaaatttacggttttaatttgatggaaatgttatttgtattttttttagtttaatattttatttcggttttagtttggtagagttttaatttttagttttatgtatttgggtgaattattttggataaatgttttagtttttttgaattttttttgtgaaatgtaataattgttttgcggggtggttgtgagtttttagtgggatagtatataaagttaagagttttagttttatttatgttaggtaaattagttgggttagttggtgttatttagtttaaacggaggtaaagatgtatttaagtttattttgttagttagaggagttagtagttagtttttaaggtagtttttaggatttgtagagttataatttttgttgtggtttggtggttttgtggggaagtatagatttagtaagtatggtttgggttgtagatgataataatttggtgattgttagtgtagttgttaatattgtaatagtgtaggttttaatagtatttttgtatatgtaaatgaaggtgatatttggttgtttttgataaataggagaaaagaaaataggtttttatatgattttttttgtgttattaaagtatttttggtttttttttattttttttttgtgttaatatttttagtgatatttattaatttttttaatagttgtttattgagcgtttattatttttatatattgttttaggtattaggataatattgaataagatagatgaggtatttgtttttatgattataatttggggggaggggtatttagagtagataataagttaaaaaaaaacggatttatatgatgataagagttattattttgtgttaagattgttgtgataaaatttatttgggtatatagtagaaaatgtttttatagatgaaaagaaaaatttttaaatttatatggggttgggggagaggtagttaaatgggaattagtgttagggaaggtttttgtaaggaggtggtattttgaggtatttagtgtaattttgagttatttataggaagttttggggaaaagagttttaggtagagagaatagtgtgtttaaatatttttaggagggaatgaatttggttagttggttggatatagcgagcgaggggttgggtaggagaagtgagtaagggtttgagtttggatattaagttaaggagttggagttttatttgagtgttatgagttgttgttggaaggtttattncggtgtttttattaaattntangtagatgggtaagtagattatagtggtaatttttgttttattgaaagaatattgaatttaaggagtttggttaggtatattagataatttaagattttggagagttttggaaaagagtttttagatgtttagggattaaaaaatagtagagaatagaaagttatttatatttttgttatttagaaatagttattatgaaatagtggtttgtttttttttagtttgttttttatatagtagaaagtatattgtaaaattaattttgtatgagtaatattatattatatatcgtttttttttattttaaaggatgatttaattatattttgttgtgtggttttgttataagttatttaataattattttatggttggatatttagattattgttagatgtttttgaatattatgaatatttttttgatttagagtttttgtgttttttttattttttttttttttttaatttttttatttttttttttaaacggaaataaaagttgtgttttttaattaattagaaaagtttgtgatgtttttgaagtatttttttacgtgtatttttttagattagtagaaattgaagtgtttagtatttttgtttattattagagggttaattattattgtaagatttagaaattttgattttaggggtattttttttaaattgttaaattttaagttttatgtaatttttggttttggagtaggtaatttgtttttagatttgaaaaaattaattttgaaataatttgtattttaaaatttttttttattttttggtttttatataatgtttaaaaatgggaatgtataaattttttttttataaaatatttaaagaaataacggaattaatgatttaatattaaaataaatgtttttttgttatgaattttattaatatttaattatgattttatttagattagaagggagagtttttttttttttatgtaaaagtatatttttgtggaatataaatatttatttagagagttagtaagataaataatgaaaagattgaattattaaataattttatattttaggttaatattgtaattttttttggaattttaataaaaggtagagtatttttattttttaaaattaattgaagtagagttatgtaaagataaaagatttattttagatttaagataatttgtgtgaatatatttgtaaaatagaaaattatttttttttgttatattatttgttaaaattaatttattaatataattattatatgtaaataaattataattttagatattttaatttgattaaaattagtagtttatgtattttttatttttttttaataaaaaaataattattttaagaaaatatttttgaattattgttgtttttttttaattgtaagtttgttgaggtggttggtatatgagtgttatttgggttatattggaaaggttttagagtagtatgtgttttgagtagtttggttttgaaggttggtagaaatgtagattaatagtaatgatgttgtggtaaaatttggatatgtttatgtatttaatattttatttaggagtatattatttttaagataattaattttggtagataataaataaggtgttaattaatggatgttgtatttttttggtaggaggttagttgatatttaagatttggaagttaggttttatttgagttttatggtattttttgtagttataggagaagtaaagtgttgataaaggaagatggtttttattgtgaatatagattagtcgtaggtgggaagaagttgagagttggttgttgattagataggggatggtgaattagtgatggagatggggtttggagataggttatagagtcgttttatgtttttgtttataagttgtattgtttttatttttttttttattttttattttatgaaaagaagatgttatttagatgtttttgaagatgagaaatttttaaagaagagttttttttttaaagttttataaggaaagaggaaaagaggttgtagttattttgggggtttagtagatggtttagtaaaaaagaaagtggttaaggtgattgttaaatttgaaaattttaaggttataaaggatgaagtttttagcgatggggatgattttaggtgagatgtttgtaaagttttgtttcgggttttgattttttttattagagaattgtgaataatgaaaatttttatttttatttgttattggggtttatggaagattggatttttaaatttttttaggtataatttagatcggtaagagttggaaattttttagataagaatagtgatagtatgtagtaagtgatttatttatgtttttatagttggatagtggtaaaagtaggagaatttaggttttttgatttttggtttagtgttttttttattatataaaaatattagatgtatataaaatatttatttgttattttagttttattttatattattgtttttaagtacgttttttttcggtttatttgagttttttattatttattgaatatatttttttattttttatatttgtattgtgtttatggtattttttttatttggagtgtttgttggtttttattttgaagatgtagatttgaaattatttattttagaggttttattgatttttttttttttttttttttgattttttgtagcgtttttagggagtgtgatatgtttgttagttattgttattatgttatatatttaggtttattattttgtgattttttagagggttggaattatgtggggtttttttttatatgttttgtagtatttattgtaggtttttttatttggtagaaattgaataagtatttttgtaatgaatgagtatttatattaatatgttgtgaatagtgattatgagtttagggaatatttgattttttgttttttaagaaagttgaggggtggggagaagaggaagaatagagggatagttttttatttgttttataaataaatttttattgttagtattagtttttttagtagtttttagttttgggatgggagagtagtttagtagagggtataggaagggatacgggatagtatgatgatttttcgttatgatttattttttttttttttttttagattttttttttcgtttcgtttcgtttcgtttttatttcggtttcgtttttaatggagtttcgttttgttgtttaggttggagtttagtgatgtaattttggtttattgtaattttcgttttttaggtttaagtgagttttttgagtagttgggattgtaggtgtttattattacgtttagttaatttttgtatttttagtagaaatagggttttattatgttggtgtcgaatttttgattttaggtgatttgttttgtttagttttttaaagtgttgggtttataggcgtgagttattgcgtttggttttttttagatttttttgaagaatatttttgaatttattgttttttagttgtttttttttattagttgaattttatttttagagatatatatatagagataggttacgatattgttaaggaaagttttgggttttttttttttttttttttgagtattgattgtggttatttttgttatgtttattttaaggggaaatttttattgttggtgttttgagagaaagtggtattttaaaaaaagagtgtattattagagtttaagattgatgattggttattttaaatgtttatattaaaattttagataatatttttatttggtattaagtgttaaagtttatataagttaaaagtaattggatattttagatatattttatatatgaatttgtagaaatatattacgtattagtaagtatttagttttgagttattgtttagttagttatttatttatgttattatttatttagttagttagttgtttatgttttttgttatttatgatttatttatgtgtagttatatttttgtttgaagttagaatgttatgaattttagtttttttatattatattttttaaagatggaaaagaagtttgagtaggtttatagtaggatatataaatggagattttattttgttttttttggtttttaattgtatatatattatatagatattatagttttggaatttattattattttggtgttttttaatttttttttgttatgtttaggtatagttatgtttttttttatacgatttagattgtaggttttttaatagtatatttggtagtaattagatagatgattagagtatattttgatgagatttggaatatatgttgatggaggaagtgaggtttagagtttattaattatttttaaatagttgtaatagatttttaataaataggaggggttttaaaaattttatttagtttgaatggaatattaggatgtttgagttttttttatttttttttttgtggtttttatatagg

SEQ ID NO: 1904 - DNA, 7456 bp, Artificial Sequence
  chemically treated genomic DNA (Homo sapiens)
  unsure (4456, 4459, 4478)
tttgtgtaaagattataggaaggaagatgaagaagatttagatattttagtgttttatttaagttaaatggaatttttaaaattttttttatttattgagaatttgttgtaattatttaaagatgattagtaagttttgagttttattttttttattaatatgtgttttaaattttattaagatgtgttttgattatttgtttaattattattagatgtgttgttaaaaaatttataatttagatcgtgtgaaagaaaatatagttgtgtttggatatgataaggaaaaattagaagatattaaaataataatgagttttagaattgtgatatttgtgtgatatatgtgtagttggaggttagaaagaatagaataaaatttttatttatatattttattataagtttatttagattttttttttatttttaagaaatatgatgtaaggagattgaaatttatagtattttaattttaagtagggatgtaattatatataggtgagttataaataataagagatatagatagttagttagttaagtagataataatatagataagtagttggttaaataatggtttaaggttaagtatttgttgatacgtaatatatttttgtaaatttatatataaaatgtgtttagagtatttagttatttttaatttgtgtaaattttggtatttggtattaagtgagaatattatttaggattttggtataaatatttaaaataattaattattaattttgagttttaataatatattttttttttagagtattatttttttttaaaatattagtaataaaaatttttttttagaatgaatatagtagaaatgattatagttaatgtttaggggagagggaaagggggatttagagttttttttggtagtatcgtggtttatttttatgtatatgtttttggagatagaatttaattagtgaggggaggtaattggaaagtagtaagtttagaggtattttttagaaaagtttagggaaggttaggcgtaatggtttacgtttgtaagtttagtattttgggaggttgagtagggtagattatttgaggttaggagttcgatattaatatggtggaattttgtttttattaaaaatataaaaattagttgggcgtggtggtgggtatttatagttttagttatttaggaggtttatttgaatttgggaggcggaggttgtagtgagttaagattgtattattagattttagtttgggtaatagagcgagattttattaaggacgggatcgggatggggacgggacggggcgggacgggaagggaagtttagagaaaaggagaagagatggattatggcggaaaattattatgttgtttcgtgtttttttttgtgttttttattggattatttttttattttaggattagaggttgttggaaaagttgatattggtagtgaggatttgtttatgaagtaaatgaaaaattatttttttgtttttttttttttttttattttttaatttttttaggaggtagaaaattaagtgttttttgggtttataattattgtttataatatattaatataaatgtttatttattgtaaaaatatttgtttagtttttgttaaataaaagggtttgtaatggatgttatagggtatatgaaaaggaattttatatggttttagttttttgagaggttatagggtagtaagtttgggtatgtggtatggtaataataattggtagatatattatattttttagaagcgttataggaagttagaggagagaagggggaagaattagtgaagtttttggagtaggtggttttagatttgtatttttaagatggaagttagtaagtattttaggtagagggaatattatgagtataatgtaggtgtagaaagtaggagaatgtgtttagtgaatgatgagaagtttaggtgggtcggagaagagcgtgtttgaggatagtagtatgagataaagttggaatggtaggtaaatattttgtatatatttaatatttttgtgtagtagaaagagtattggattaggagttagaagatttgggtttttttgtttttgttattgtttagttgtggaagtatgaataaattatttattgtatgttgttattgtttttatttgaaaagtttttagtttttatcggtttgagttgtatttagaagaatttaaagatttaattttttatggattttagtgataagtaagaatagaggtttttattatttataattttttgatgagaaaaattaagattcgagataaagttttgtagatattttatttgaggttatttttatcgttgagggttttattttttataattttgaggtttttagatttaatagttattttggttatttttttttttgttggattatttgttgaatttttaggatgattgtagtttttttttttttttttttgtgaaattttggagagaaggtttttttttgggggttttttatttttaaaggtatttaggtgatattttttttttataaggtgaggggtggaaggaaaggtggaggtagtgtagtttatgggtaggggtataaaacggttttatgatttgtttttaaattttatttttattattggtttattattttttgtttggttagtaattagtttttagtttttttttatttgcggttagtttatatttatagtaaaaattatttttttttattagtattttattttttttatgattatagaaaatattataggatttaaataaaatttaatttttagattttaaatgttagttaattttttgttaggaaaatataatatttattaattagtattttatttattatttgttaaaattaattgttttagggataatgtatttttaagtaaaatgttaagtatataaatatgtttaagttttattataatattattattattaatttatatttttgttaatttttaagattaaattgtttaaaatatatattgttttgaaatttttttaatgtaatttaaatggtatttatatattaattattttagtaaatttatagttggaaaaagatagtaataatttaaaagtatttttttaaagtaattatttttttgttaaagggaaataaaaaatgtataagttgttggttttagttaaattggggtatttaaaattatggtttatttatatataataattatattaatagattagttttaataaataatatggtagggaaggatagttttttattttgtaaatatatttatataaattattttgaatttgaaataaattttttgtttttgtatgattttgttttaattaattttagaaaataaaaatattttattttttattgaggttttaaaagggattgtaatattaatttaaaatataaaattatttaataatttagtttttttattgtttgttttgttgattttttggatgggtatttatattttataagaatatatttttgtatgagggaaaaaagatttttttttttgatttaaatgaaattatgattaaatgttaataaaatttataataaaggagtatttattttaatgttagattattgatttcgttgtttttttaaatgttttataaaaaaggaatttatgtatttttatttttaaatattgtatggaaattaaaaaataaggaaaaattttgaagtataaattattttaaaattaatttttttaaatttgagaatagattgtttattttaaggttagaggttgtataaagtttaagatttgatagtttgaggagggtgtttttaaaattaagatttttggattttataatggtagttagttttttaataataggtaaagatgttaaatattttaatttttattaatttaaaaaaatgtacgtaggaggatattttagaggtattataaatttttttagttggttaaaaagtatagtttttattttcgtttgaagagaaaggtagaggagttaaaagggaaagggggataaaggaaatataaaaattttgaattaaaaggatgtttatagtatttaaaagtatttaataataatttgaatgtttaattatgagataattgttaagtaatttatggtagagttatataataaaatataattgagttattttttaagataaagaaaaacgatatatgatgtaatgttatttatgtaaagttgattttatagtatgttttttgttatataaaaaatagattagaaggaaatagattattattttatggtggttatttttggatggtagaaatatgggtgattttttgttttttgttattttttggtttttaagtatttagagatttttttttaggattttttaaaattttgagttatttaatatgtttaattagattttttgagtttagtgtttttttagtagggtaggaattattattgtggtttgtttgtttatttatntgngatttaataagaatatcgnagtaaattttttagtagtaatttatagtatttagataaaattttaattttttagtttggtatttaagtttaggtttttgtttattttttttatttagtttttcgttcgttgtgtttagttaattggttaagtttatttttttttaagagtgtttaaatatattgttttttttgtttagaatttttttttttagaattttttatgaatggtttaaaattatattaaatgttttaaaatgttatttttttataaaggttttttttgatattgatttttatttagttgttttttttttagttttatataagtttgagggtttttttttttatttatagaagtattttttgttatgtatttaaataagttttattatagtagttttagtatagggtgatagtttttattattatgtgaattcgtttttttttaatttgttatttgttttaagtatttttttttttagattataattatgagagtaggtgttttatttgttttgtttaatattattttagtatttggaatagtgtgtgaaaatagtaggcgtttaataaatagttgttgaaggaattaatggatattattgaaggtgttaatatagagaagaaatgaaaagaaattagaggtgttttagtaatataaaggaaattatgtggaagtttgttttttttttttttatttgttaaaagtagttaagtattatttttatttgtatgtataggggtgttattaaaatttatattattatagtgttagtaattatattgatagttattaaattattgttatttgtagtttaaattatatttgttaagtttatgtttttttataaaattattaaattataataaaggttgtaattttgtagattttggaagttgttttgggaattgattgttagtttttttggttagtagaataaatttgggtgtatttttattttcgtttaggttgaatgatattagttagtttaattaatttatttaatatgggtaaagttaaagtttttggttttatatgttattttattgaaaatttatagttatttcgtaaggtagttattatattttatagaggaaatttagaagggttaaaatatttgtttaaaataatttatttaagtgtataaaattaagaattgaagttttattaagttggaatcgaggtgaagtgttgagttgggaagaatataggtagtatttttattagattaaaatcgtaaatttttaattgttatatatttaaattatattttgattagaatatcggtttttttttgtgattttttgttaaaatattaattattttttaaattatagattaaattattttagagagcgtttttcgattacgttagttaaatttgattaattttttggaagttataaagttttgtatttttttttataatatttagtatattttgttttgaatgttttatatgtaaatgttatgttaatattattttatgattttttaagatatgtttattttttatgttattttatttatgtatagtatatagtagatatttaaaagatgttatttgaatgagtaaatgagtgaataaaatggaattcgtaatattatatatgaggtaaattattttttaagtttacgaattattattattttattattttttaatggatgatgaatttataatcggtatagaaatagaatttagtgtgatagtttttgtcggttatttagtttaatttatttagtttttttaggagatttagaaattttttttatagtttgtattttgtaattatttaaaatatttattagtcgggcgtagtggtttatgtttgtaattttaatatttcgggaggtcgaggtaaacggattatttgaggttaggagtttgagattagtttggttaatatggcgaaattttatttatataaaaatataaaaattagtcggatatggtgttaggtatttgtaatattagttattcgggaggttgaggtaggagaattatttgaatttaggaggcggaggttacgttattgtattttagttttagcgatagagtgagatattgtttcgaaaaaaataaaaaataaataaaatatttatttagtatttagttttattaatttacgggttttgtatttatagatttaattaattatagatgaatatatttcgggaaaaaaaatataaatttaaaaaatatagtatgataattatttttatagtatttatattgtattaggtattattagtgatttagagatgatttaaagtatgtcggaggatgtgtataggttatatggaaatattaggttatttgatataaggtatttgagtattataggttttagtattcgcggggtatttgggaaggattattttagtttgtttaaggaatgtttaatttgagttttgaagaaatagaaaaaattagttttggtaaaagttatggggggtttattttaggtagaaggaatattaaaggaaaagatttaaggaataatttggtatatttgaggaagagaaaggaggttaataaggagggtatttggtaaggaaataagtggtaagagaaataggagaggtagtaagagttaaaatatgtagtattttgtaggttaggataaaataattggattttaagttaagagtaatggaaaattaaggggagtttaaagtaggagtagggtatgattttttttttttttaagattatttgggttgttggatgtagagttgggaggttagtaaagaggaaattgtagttatttaattgaaaggtgatgatgatttggataggggttgtggttatggaaatgaagagaagtggataaatttgaaatatatttttgaggttgaattgattggatttgttgacggattggatgtgtggatataagaaaaaggtgggttttgttttataataagtattgagattggaaaaacggaggaaagtatagatttaaagaggaaaattatgagttttgtattgt

SEQ ID NO: 1905 - DNA, 19734 bp, Artificial Sequence
  chemically treated genomic DNA (Homo sapiens)
gtttttcggagaagtggtatatatatttgtttatataatttattatattgtatttatggttagttgtgtgtttaattttaataatattaaatatttatatgatatttgttatgtgttaggtattgtttttaagtgttatatgtatagtaatttatttattttttatataaattatgagggttattagttataatttttattttttttattttggttgtttttttaattagtgttattttaatggttaggatttatataattgtattaattttgttttttttttagttttagttgtttatttatttaattattttttattatttgttttttttgtgggtatagttgttttaattattagggtttattgtatttattttagtggtagttgttttattgttttagttattgtttgttgttattttttttatttttattgttgttgttattgttttttattatattttaattattggttatggtattgggattttttttattatgtttaatattgatgataaagaagtagttgtattgtatttagaatatgaatgtgatcggtttgaaggatgaggaagtaggaagagggaaagtgttgagtgttgatgggggtaggtagtattgtggaggggagtgttagtgagattgataaagttgatgattttgtgggggtttgatatgttagttattaggggaaacgtgatgatgtgatggtggtagtgatgaagattagaatgtgggaatgaggaggtaggttgtgatgattaggaagtagaggatgtttttgaatagatttagtttgtttttgttggtttttagtttgtagttgaagattttgtgtttatgattggttgtgttaacgttattgatgaagttagtgattgataatattgatattataattagtattaaatatttagttagtgttattaaaatttttacgttagaatgtatttgaatggaaggtagagtttataaagaaataaatgattttgaaagaaagtatattagatttttatatttttgtattttaaaatttttgaagttaaggttgtattttagattagttaagttagatgtttttcggatagttttaatgtgtagttagtgttgaagttttgtttttaaagaaagttttatttttgtttgattgtttttaagaatgataatttgtttagaaatatggtttgaaaatataataaatttattttgaagtttttgaaagatattagagtaaaatttttagatgttggtaagtttgggagattataatgggttttattttgaatttttagtggaggtgttgatatataaatttggattagattagatattttcgatttttttttttttgataggtgagaaattataggtttagtagattagacgaaaggatagttggatgtggtggtgtgtatttgtagttttatttatttgggaagttgaggcgggaggattatttgaatttaggagtttagtttggataatgtagtaagatttcgtttttttttagaaaaaaaaagaatgtttttttgaataatatttagaagtaggtgtaatgtaaggaatatggatatgtttgagttatgagtagtatagtttttattgattttttttttgagtattttttttttttgagatttttgagggtgagttttaaggtttgtttttgaagttgtttttgttgtagatgataagtggggtattttttttagtttaagattagtatggtattttataggggattttattggagatcgttataataattgaggtatagaagtttaaggtgttggtgatgatgaaaaggaagaagtaaatgagtatgttaaagaaaaagatttaaaaaggatttatgtttagtagggtttaagttatagtaagttaggatgttagtcgttgaagattattttatgtaattgttttgatttaattttgtgttatttatagagttatgttataatgtttttgattaagtaaaatatttttgttaaaaaatgagttggtaaattttaaaatattaaaaatattaaatgagttggaattttacgtttatttaaaatttgtatatagatgtttatagtagttttatttatgattattagaatttggaaataattaatatgttttttagtaggtgaatggataaatggtggtatatgtagataatggagtattatttagggttaaaaaaatgagttattaagtaattaaaagatatagaggaattttaaatgtatattgttttttttttttttttttgagatagagtttcgtttttgttgtttaggttggagtgtaatggtgtgatttcggtttattataatttttgttttttgtgttcgagtaatttttttgttttagttttttgagtagttaggattatagatatgtgttattatgtttagttaattttgtatttttagtagagatggggtttttttatgttggttaggttggttttgagtttttaattttaggtgatttattagttttggttttacgaagtgttgggattataggtgtgagttattgcgtttggtttaaatgtattattttttaagtagaacgaaattaatttggtaaaagttttgtgtagaatgtttttaattgtatgatattatagaataggtaaaattatggagatagtagaaaagtttagttattgtcgggttagaggagaggaggaaggaggaatgaataggttgtatgtgtatatagaatttttagggtagtgaaagtattttgtgtgatattataatggtggatatatgttattatatattttttaaaatttatagaatgtataatattacgaatgaatgtaggagtaagttgtggatttagggtgatgatgatgtgttaatgtaagttaatttattttaataaatgtattattttggttggggatgtagatagtggtagggggttgtgtgtgtgttggggttggagttatatgggaattttgtattttttgtttagttttgttgtgaaattataattgttgtaaaaaatgaagtttattaaaaatgagttggaaaaatttattattttattttgaattttaatagtatagttttgtgttagtatatgggatatagtgaaatatgtatgattattattttgtaattggttttttttgaagttgttttgttatgtagatataggattatagttatgatgtttattagaatattaattaatattagtgattgttgagaaaaggtttttttgaagaattaattaaagtggttaagttagtttgtattatttgtgtttttattaagtgagtataagagattatttttgattatagatatagatgaaataagtttaagaatttttagtaggattagagttaatatttttaatattttattttaattagttttatatttttatttttattttgtattttttaaagttggtgattttaattttggttttatttgaatggtagatttttttggagttttgggatttcgtttgaaaattttgggttttatttattttcgttatattttatttatttatttttttgagatagagttttattttgttgtttaggttggagtgtagtggtgtaattttggtttattgtaagttttgtttttcgggtttacgttatttttttgttttagttttttgagtagttgggattataggtattcgttattacgtttggttaatttttttgtatttttagtagagacggggttttattatgttagttaggatggtttcgattttttgattttgtggttcgtttgttttggttttttaaagtgttgggattataggtgtgagttatcgtattcggttattttcgttatattttaaagaggagaatatagagtattgaggttttggttttttttttttttgtatagttggttggtagtaggtatttattagaagataagatttttgatttttagtggacggaatttttttttttaaatttgtagttggatatttaataaaaggtttataaaatatatttttttaaagtagttaaatttaaaaagtagaaaaatataagaagataataattattttaaatttatttatttaaaggtaattatttttaatatttgggtgattgtttttttagaaatttttttttgtatatatatatatataattttaaataaataagaataatttatattttttttttttgttatttgtttgttttgttttgttttttgagacggagttttggttttttgttaggttggagtgtagtggtgtggttttaggttattgtaatttttattttttgagtgtaagtgatttttttgttttagttttcggagtagttgggattataggtacgtgttattatatttggttgattttttatattttgtagagacggggttttattatattggttaggatggtttcgatttttcgattttgtgatttgtttgttttggttttttaaagtgttggaattaaaggcgtgagttattgcgtttagtttgttatttgtttttaattatttataaatgttgtttaggtatttttttaaattaaatatataagtttatgtaatttttttttaggtttgtgtaatttttaatgagtatatagtatattgttgtacgtattatagtttatttaattgattatatattttttttgtttttttttattataaataaagataaatatttaaatttttgtgtatttattttttatttttgaataaagttttaggagtgaaagaggtaattagttaagttggaaatggttagtagttgaatttttttggttataaatggttatttggaggtagtatttaagaattgtgaatattagtgtttttggtagttttggttttggtttggtggtggagtgattaatttgaagatttaattgggagtggggtagaacgtagaaggtatttttttttgtggtttatttcgaattggacgttgaattgttgggggtaggttggttttgaaatttgtttttttgttgttgtagacggtagaatgtttttaaaggtgattttagagttgtttcggtagttgagataagttatgaggaattttgagtatgtgatcgaatcgatttaggtttatattattttatcgggagatgtttattaggtattgtatggtaatgggttttttttttttttttagttttttttttttagttttaatgtgtttgtaggattttaattgttaatttataattagggttataattaagtttttttagggtttgttatggggatttgtgtttaataggttttattgaatgtttgtggattggttttagtttttttgattttagtgatttagttattttttaatgaagaattagtgggtaaattaagggatagaagttttggaattttttgttgttggtatattttatattttttttgttatattgtgtttttagtagaattgtttgttttgttttttttttgtttaatttaggagagttggagaggtagagattttatgtgatagggttgatgggcggtagggtaaaaggattttaggatttattgtgaagttattgagttagtaagtgtttgagtgtttatattgtggttatggtgttgtagggtgtaaagatgaatttaaggttgaatgtttgtttttattaggtttatggtttagtgagagatgaaataatataagagtgttatttttttatagaattatttataagtatagttttttttagtttttatttatgtataaggttttatttattttaggtattagatatgatatagagatgaggattgtttttggttttaagaagtatatagtttaataatggagtttagatgtatatgtatatatttgtattgtaaggtaaaatgtggtaagtgtgattaagaaaatttggatagaaggttgtggaagtttgagggtgagaggggaagatgatgaagagttttatggtataggggagatagttgaattggattttgaaggatgggtggagtttgggtaaatagagggatggggtggaggaggaggaaagaggttttaggtaaaagtattagtggtagtaaaggtaaagaaatagggaagtttcggatgttttttagaaatagtgggataggtttttttggtaagagattagggaagtaaaaagtagtggtgggaaataaagttgttgttataggattttttagttgtaggtaatagaaattgttttgagatattttgagtaataaaaatgttttataaggatttaagggtagagttattatattggtataattttagattgtgaatggtgtttttagagttatgtgtgttagggttttagatagggtgttttgtggaatatgagggtaggaatgtagtaggtttttaagaagaattgggacgggagggtttttaggttttgttgtatattagttttttttttttagttaattggttgggttatataaatttgataatatttatatttatattttttttttttttatttttaagatattagattgaattagaattttaattttttaaatttaaagtttaggatgagaatttgattggtatatgtagtaatttggttttgtatggttttggttattttgtgtgtgtgtacgtgtgcgtgtttgtgtttgtgtgtgtgtttgtgtgatgttagatatgagtaatgggggtttattagtttattatgatggagggggtggtagataagggtatttttgtaagttgagtaaagattataaaatatgtttattttggttggttgattttttgtttttttttagaggttttggtttatatggttgcgataaggttaggtttgtattaatttgggaataatttaattttaagattggatttttgtttggagatatggattttttggttttaggagtaaatgaagggtttgaaatgaataagtaaagggatcggatatttgaggtaatagtatgaagtttaggatattttgatgtttagaatagtgttttttaaattgtgtgtgttttttagtatttttgttgtgttttgtaagatgttttataaaaaatatatttgttagttgagaaaatagtgaaatgagttgaatagtgtttttttattgtggtgaaaaatgtataatatgatatttattttaattatttaaaaatgtataatattgtagtgttaattatatgtatatattgttgtgtaatagatttttagaattttttcgttttgtaaaattgaaattttatatttattaaatagttttttttagttttttttttttttttttatttttggtaattattattttattttttttttttaagattttgttgggttagttacggtggtttacgtttgtaattttagtattttgggaggtcgaggtaggcggattatgaggttaggagttggagattagtttgattaatatggtgaaattttatttttattaaaaatataaaaattagttaggtttggtagtacgtgtttgtaatttttttgtttaggaggttgaagtaggagaatttgtttgattttgagaggcggaggttatagtgagtcggtcgagattgtagtattgtattttagtttgggtgatagagcgagatttcgttttaaaaaaaaaagtttgtttgttttagataacgtatgtaattggaattatgtagtatttgtttttttgtgattggtttattttatttagtatagtgtttaaggtttatttatgttgtaatatatgataggattttttttttttataaggttgaataatattttattttatttagagattttttttttttaatttgtttatttgtggatggttattttagttttttttattttttggttattgtgagtaatgttgtaatgaatatgggtttgtaagtatttttttgagattttgttttttatttttttggatatatgtttataagtgagattgttagattatatgatttttttatttttaatttttgggggaatttttatattgttttttgtagtatttgtattattttgtatttttattaatggtatatagtattttagtttttttatttttttattaatatttgttattttttgttttgttgtgaggtgatggtttattgtagatttgatttgtattatttgatggttagtgatgttgagtatttttttatatgttttttggttttatttgtatattttttttggagaaaatgtttatttaagttttttgttttaatgagttttatagttgtaggattttttagggtttttaatatgttgatgtgtattttgtatttttaaggaggggataaagtatttagtattttttagatttaaatgtttatggaatttttttagttattttaggggcggggtgggagattttagtgttttatggaatatttttatatgttgttttgtgatagtattttttattcgatgatgggttttgtatgtagaggtggatgaagggagaggttagagtgagaggtgtatttaggtattagtttattggttgtttagtttggtagaatataggaaaagtagaatattaagttggaatcggggtggtggtatgtgaggaagttatgaggttgggtgtataattgttagatttagtaggtagtgggaaggtaaggatagatttggtgaggttcgtttgtgtttattagaatagataaataagattggttaattttaggttgggtgtggtggtttacgtttgtaattcgagtattttggaaggttgaggtaggtggattatttgaggttaggagttcgaaattaggttggttaatatgtgaaattttatttttgttaaaaaatataaaaattagttgggcgtggtggtttatggttgtagttttgagtatttgggaggttgtggtgggagaatcgtttgaatttaggaggtggaggttgtagtgagttgagattgcgttattgtattttagtttaggtaatagagtaagattttgttttaaaaaaaaaaaaaaaaagattgattaattttatatgaagtaaaatattattttgattaaggattgggtgaggaagtaggttggttattgtgatttgagtttgagttatggtatgagtcgtaggtagtagaggagttgggtatttttttatttaagaagggtagattattgttttgtttttaaggaattttgtttttttttttttttgggtttttttgatgagtttttttttgttttttgttagttttaggttttagtttttggatgtgggttttatgttatttggattttttgttggatttattagtggtatttttaattttttgttttttaagtattggatagttgttttaggttgatttgattgtagttattttgttagtgttgagtagatggtggttttcgtaattggagtatatgatgattatgtagtagttggtttgggtagttttgtaagttttttggtatagttgtttgaaattggggttttttttcgaaagggtttttataggtcgttatggagttttagttgaagatttttaatagttttattatttgtgaatttttatttttaggggaggttttagtgtatagaaagattcgatttgttaatgttatttgaattaagagttgaaggtttttggttaagggtgtgttggaagttttgtagtgtttgtattttaattttagtttttttttgtttggagttaggatattatttgtgtgtttattagtaggagatatcgatattttatagttgagttaagtttattttgatgtttttggttttgggtgttgtttttttgttagttttttttgtttgtttggttattataaagttgatttttggatattttgattgatatttaaaaatgttttatttttgatagtaggtgtggtttattatattcgaagtaattttttttgggagtggtagtgaggttatttaagttataggggatgttttaggtttttttttagttttttattttttattaatgattttgtaatattagaattagatggtttttttttttatgaggaaattgaggttttaatttgagatagatgtgttttgtagtaatattttgaaaatataaaatgtattaagtttgtttggtgttagttgttgtttttattgtagaagttattgtttagattttatagatttatatttttgtatttttgttgtttttttatttttattatttttttttatttttttttttataattttaattgttatttttattgttgtagtttagttgtttgttttatatacgtggagaaattgtgttttgtttgtttgtatgttttttgattgttgtttagggttaggtttggggtaaatgtagagggtaggtagttagtatataggtaagcgtatgagttttagagtttttttgggtttagatgttagatttgttatttattagttgtttgatattaggtaagttatatgaaattttgaagtgttaattaaattttttgggttttagtttttgtattcgtaaaaaggagattgtgatagtgtggtatgtatcgtatgggttattgttaggatgaaatgggtttatattgtagatgtgaatgtttgaagtatttgaatgtttgttgtttgaatgtttgatgttatttgaaaagtttcgttatattagttgtcgttattgttgttattattgttgtggagatgaatgagattttttttgaagagattaaataataggtaagttatagttataaatgagaatataaaaagaaattggtgaatgttatgggaaaggattttattagtattgtttaagtagaatttgtgagatatatatgtaatatttaatgtttttatagatatattaaagtaaaagagtagtgaaattaattttaataatatattaatttaatatatttaaaatattattttagtatattattattataaaaattattaagaagatattttatatttttttttatgttgtggttttaaatatgggaagtttttatatttataaaatttcgtaatttgaatgtgaaatttttattggaaatatttgatttgtgtttagattttataagattgatagttgaaaaggtggatttacgtatttaagttgttttaaatatatttagaagttttttagtaattgaattttgaatattagtttttaaatttgtattttaatttattaaagtgaaataaaattaagtattttgttttttagttataatagttatattttaagtgtttagatatatgtggttggtggtaattgtaatgtaagtttatttaaagtgtgaattgaatttaaaggtgatagagtattttaagttggtaggattagggaagtttttatggagaaagtaggatttaaattggaacgtgaataggtagaatttggatgtatggaaagagggagagaagtataagaaatattatggaaatttttttttaaattatattttaagttttagggtatatgagtataacgtgtaggtttgttaatatatgtatatatgtgttatgttggtgtgttgtatttattaatttattatttatattaggtatattttttaatgttattttttttttttttttttattttatgataggttttagtgtgtgatgttttattgtttagttgttatttgtgagtgagaatatgcggtgtttggttttttgtttttgcgatagtttgtttagaatgatggtttttagttttatttatgtttttataaaggatataaatttatttttttttatggttgtatagaattttatggtgtatatgtgttatattttttgaatttagtttattattgatggatatttgggttggttttaagtttttgttattgtgaatagtgtcgtaataaatatatgtgtgtatgtgtttttatagtagtatgatttataattttttgggtatatatttagtaataggatggttggattaaatggtaagaaatattatgggtatttatggaattaggagaatatgtatgataataagtttgaagaagggagaatagtggtttggttaagattatttatgaattatttttgattggttatggttgtttttgattattagaattaggattttagagtgatatgattagagggagtagtgtttagtatgggttggagaaaggagattttgggaattgagaaatttgttaggttttgtaggattttagagttggggtaaagagggtttggatttgggtattggggttaggagcggagaggaggggtaggatttggagaagtagtataatttggattaaatgtggattttgtaggtaggtggtagaggggattgggaaggtttgaagtttgggagtgtttgtggtgttattaatagaaggaaatgggttttttgttttagtttttgtggagaagagttatatagttggggcgattttgttaagtgggattttggatttttgttgtgattgtgagaataagaaggaagggttggttttatgtgtgatttgttatagtagtttttttagtaatagagaggttgttgttttttgtggtttttgtttttaattgttttattttagggtagattttgggttgatggagttttttttacggttggggaggggagggtgttggagaagtgaaggggaattttgaattttgttttttgtgtattttttaaaatataaatatatatatttatacgttgttttttgtaagagagaaaacgtattttaaatgtataattacgtaaggatttggtattgtagtggtttgtttttttttgttttttgtaattttaagggttttttttttttaaatttagagtaagggttgtggtattagggttgttgtattaatgagtttgggttttgggggatttttatagtaaggaatcgtttgttttttttggtaatttggatatttttatgtattattttagtcgtatattgggattcgtgggtattatttgttttaaagtaggagaatttttggttggagttagagttgtgttagtattgttttttagaaattttgattttttattttttttattcgtagattttatattatgttgttgggtttggtttagttaaagggtgatgttttgttagggattgattttgttaatgtgaatttttggttttgtttgtggtttttttttttggaagatatgatttagatttttttaaattttttggattttattttatttttttggagttagttttttgttttgttttgtattttataaataggtttttttttggggtggggttaatgatttttattttatagtgattttatttgttgtgttagaataatgttagttgtggtaatatatttcgaagttttagtggtttggtattgtaaagttttattttttattttatgtagtagtatagagtgggtgtttttggttggtgggggatttttttttattttgagggaaagtgatttagggatttaggtttttttattttatagtattattattttagttggtggaaggggatagagtatggatagggtatatttatttgttagagtttcgatttaggtattattttttatttatattttattggtaagaataagttatgtgattttattttaatgtaatgaggtatgggaatgaaggtttggttgggtagttattttttagtgatttttttatattaaggaaggagtataaatttttggataattgttagttttttttatatattttgatttggttttatttaggagagaaaaaaatgttaataatttatatttggaaataaggagtttatatttttatttatagtttaatttttggtattttttgtggatcgatggttatttatttatttagttttaatttttttgagaattttgtatatttgaggtatagtgttaagtttatggttgatgggagaagagggttagggaaggggaaagatgttacgttaatgtggattttagtaattttagttatgtttattttggtagttagttgttagttttatttggtaagttttatcggtatgtgattagttatgttgatttttttttttaaaatttagttttggttatgttattattttttttttaatttttagtgtttttttagaatttgtaggataaagtttaagttttttagtttggtgtttgaggtttttgattatttgtttttagacggtttttatagaaatttttgtagttgtttttttgaattttttgtttttgttattaggttaattgggtgtcgttttatgataggttttttgttttttgtttttgggttttgttatatttttttttttggattgtttttttgtttttttcgtttatttttggtggtttagttaaatttttgagtttggtttgatggatttaaggtatatttgagtattttttaaattatagtaaatattatattgtatgtttagtatcgtttatatggttgtttattagtgttaatattttatggaatatttgtttattattgtcgattgtttatttcgagaagatagttttttatgtttgttatagagttaagttcggtgtagtttatagtaataagtgttgtagtttattagatgttcggtatgcgttaattgttttatgttatattttaattttttaaggtgggtattatgtttatttttattttatagatgaggaagttgagttttaggtttatttagttagtaagtggggaattaggtttgaatagagttttaattgttggttgtaggagatgtttattttgtggttgatgaaagtagaggtaagtgtagtatatatttcgtattttttgtttttttagaatttataatttaattgtgagattagatgtgtataatttttgtataaaagtagaagaggttgtttggtagtttgtaagggtatgggttttcgaaagttagatttgaggttgggtgtagtggtttatgtttataattttagtattttgggaggtcgaggtaggcggattatttgaggttaggagttcgagattagtttgattaatatggtaaaattttgtttttattaaaaatattaaaattagttgggtgtggtggtgggcgtttgtaattttagttatttgggagattgaggtatgagaatcgcgtgaatttgggaggtggaggttgtagtgagtttagattgcgttattgtattttagtttaggcgataaagtaagattttattttaaaaaaaaaaaaagttagatttgagtttagattttggttttgttatttattgtggtgttattttggggaagttagttatttttttaagttttattttttttatttgtagattagcgagggatgatattttttagggttgttgtgaggattagaatgagaggaaatgaatatagttattgattagtaggtgttgagataataataaataatatagattaaataattttagttaatattatttgttagtattatttaaggtagggtatggataagtgttaatatggatggttttgtaaaatttagaaatgtgggagtttttgaaagttgaagtgggttaggaagttttatggaaaagggagtatttgaattagatttttgagagatgattagttttttttttttttgtagtttatagatgttttatttggttatgtattgtttatattgttggaattagatgttaatatttaaaaattgggtaattttttatgaatttatatttttggttttttttgaaatattgaaggttagtaatatgtggtttgtattttagaaattagagttgagtaggagttgttgtttttagaaaagatattttttgttttgtattttgaggtatttgaatttgaaattttatttataattttttacgattttttttttattagataatgtattagttttttattattgttataataaattattatagtgatttaaaataaatttatttttttatggttttggaagtttgaagtttaaaatgggttagtagggttatgttatttttgtaggttttagggagagtttatttttttgttttttttagtttttggaggttatttgtattttttggtttatggttttttcgtttattttcgtagatatggttgaggttttaattggatgtagggaaaagttttatgtttttttttgtttgtttatttataatataaatgtgggttgaggatttagttatttgtgttgagtgtagggataggatagatattttgattttatggaatttatatgtttggggttaagatgggggttgaggaataagttaataaatatataaaaagtttattaagaagagaaatattgtttagtatggtggtttttgtttgtaattttagtattttgggaggttgaggtaggttgattatttgagtttagaagtttaaggttagtttggtaacgtggtaaaatttcgtttttataaaaaaaaaaaaaaaaaaggtgtgtgtttgttgtagttttagttattgagaagattgaggtgggaggattgtttgaatttgataggttaaggatataatgagttataattgtgttattatattttagttagggtaatagaaggcgattttgtttttaaaagaaaaaaaaaaaaaaaaagataaatatttagagtatgtgtgtgttatatagagatttaaaagtggttaggtggttattatagttgggtagtataggtaggtttttttgtagaggtgatatttgattttataatgtaatgattagaaggatttaattttattatgattagaaatatttttataggtatatggaagtatatgtgttaaggttttgaggtaggattgagtttaggatatgtaaagagtaaaaaggaggtgggtgtgtttggagtatggtgaatgggagtagagttgtaagaggattggtaaagttatattagttggtattttgattgggttagagtttggattttattttaaatataataggaagttattggagggttttaaggaggttgttaatatgattttagatatttggaaaagtttattttgagtgtatgtgtagagtggattgtaggggcggtagtttaggtagagatgatggaggtttggattgagtgttgttattagaaatggagagaagtgggtggttttgagaaaaagttagtagttgtgtttttttgtgttttttttttagtatgttatagttttggtttattttaggttttatgttgtgttttaaggagatcgtttttgggcgttgttagttttatgtttgggagaaggagagtgatagttttgggtttagtgtttgtttggtttttgtatagtttgttagtgtggaggtgaggttgtggttagttttgtttagtaatgtttttttggaatgttgattatttaggttatgtttggatatttttattttagattttgtttttattttaaattaaatatgtttatttgttgttaattttatttttttttggaggaattttttttttgtttttgttgatggagaagtttaggtaaattttgcggattttttattttttttaagtttgtttagaaaggggtggggtatttttagagtattatgtttttgaatggaagagtttagtcgggtttagatttgtattgtattttttgttagtttttgttagtatttttattttgtgttacgggtggaagagttttaagtttgtggcgttatgttggtggagagtgtttttattgtgtattttttattgtgcgtagtgatttttagtataagagttatttttaatttagtttttttagttttttagatgtttttttattgtttaggaagaagagattaataatattttttttattgtatatgtgtagtatttttaagtttttggtgagttttgaaagatattaatttattgttttttataagagttttaggagatgtgtgggttattttttttttcgttgttattttttaataaaaagttttgtatatagtaattattcggttaataaataagtgaggattttgtagtttttaaacgatgttggtggttatttttttttatttttttagtgttgttgatcgaatgttttttatgttttaggaataaaacgtgtttgttgttgtatttagtaatttgaaatgatttgttttagagatgaggaaatgaggttgagagagttgttaggatttgttgtagattatgtagttgggtttgggttagtgggtaggtggtttagagttgttttattttgttattgtggttttttatgttggtttttttagtatttttttggaggttggtttgaggttgtgattgtcggtgttttggtgaaagaggtagttttttttttttttttttttaatttttgttttaattttttgagataaggttttattttgttgtttaggttggaatatagtggtataattatgttttattgtgtagttttaatttttcgggtttagattatttttttattttagttttttaaatagttgggattataggtacgtgttattatgtttggttaattattgtattttttgtagatatgaggttttattatgtttttaggttggtttcgagtttttgggtttaagtagtttttttattttagtcgtttaaagtgttaggattataggtatgagttattgtgtttggttgaaaggggtagtttttaattatatagtaggaaaggaatatgagggttttttttttttatattatgttgattgttttaaaaatgttttgggtttggttagtagttttattttttattttaaatttttttaattttgttaggttttttggtttgggagaattttggtaattgtagaaggagtagtagttttgtatttaggtaggtttggttttggattttgatttattattaatttgtaagtgggtagtttatttaaagattttttttttgaattttagtttttttatttgttattggttttattttagagagtgatgagggcgagagataaagtgttatgtattggtagtttggtatagggttttagagtttagattttggagttgattgtttaggtttaaattttgtttttgttatttaattagttgtgtgatttggggtaagttatttaaattttttgtgttttattggttattattagaagttgtatattttgatttgtattttttgtttacgcgtaagaattttttattttttttattttttaattttttttatatagaggtaaggggattattagttgagaagattttggttttggatatgatattttattttgttgaagttttttggattggatgaagcgttttcgtttattttgtagtaggaagggatagggtttgtatgggagagattggtgatgttattttagaggaggatttaaataggaagtttggaaataagttagtatttatagaaatttaagttagggaattgttggtgtttaatatagaaatttagttttattttttagaaaaataatagatgtttaaatgttagtggtaaggaggggagaaggttattattggtttgatttttgagtaagattttagtgaagaaagagtagtttttatttgttttttttgatgtgttttggtttttttaatgaggaaatagaggttaaagggaatagttttttttgtttttaattaatttaattttttgtagtgtgtgttaatttgttgtttttagttagattgttggttttttgagggcgggggttaaggattttttagtttttatagttttcgttgagtttagtataaggttaagtaggtagaatagtttgtttatgattgatcgaggtttattttgttgttatttttgttttttaga

SEQ ID NO: 1906 - DNA, 19734 bp, Artificial Sequence
  chemically treated genomic DNA (Homo sapiens)
tttggaaaataaagatgataataaagtgggtttcgattagttatgagtagattgttttgtttgtttagttttgtgttaggtttagcggggattatgaagattggggaatttttggttttcgtttttaagaagttaatagtttagttgaaaataatagattagtatatattgtagaagattgaattaattaagggtagagagagttgttttttttagtttttatttttttattaggagaattaaagtatattaggagaaatagataaaaattgttttttttttattgagattttatttaaaaattaaattaataatagtttttttttttttttgttattgatatttaggtatttgttatttttttgaaaagtaaggttgaatttttgtgttaagtattaataattttttaatttaagtttttgtagatattgatttgtttttaaattttttgtttgggtttttttttgaggtagtattattaattttttttatgtagattttgtttttttttgttatagagtgagcggaaacgttttatttaatttaggaggttttagtaaaataaaatgttatgtttaaaattaaggtttttttagttgataatttttttgtttttgtatggaaggggttagggagtgaagaaagtaagaaatttttacgcgtgggtaaagggtataagttaaagtgtgtaatttttggtaatagttagtgaggtatagagagtttaagtaatttgttttaaattatatagttaattaagtagtagaggtaggatttgaatttaagtagttaattttagagtttggattttgaagttttatgttaggttgttaatgtatgatattttatttttcgtttttattattttttaggataagattaatagtaaatgagaaaattgaggtttaaagagagaatttttaagtaagttgtttatttataagttaatagtaggttaggatttaaagttaggtttgtttgagtatagagttgttgttttttttgtagttattaggatttttttaagttaaaggatttggtaaggttaagaaagtttagggtggggaatggggttgttggttagatttaaggtatttttaggatagttaatatgatgtagggggaaaaggtttttatgttttttttttgttatatggttaagaattattttttttagttaggtatagtggtttatgtttgtaattttagtattttgggcggttgaggtgggaggattgtttgagtttaggaattcgagattagtttgggagtatggtgaaattttatgtttataaaaaatataataattagttaggtatggtggtacgtgtttgtagttttagttatttaggaggttgaggtgggaggataatttgagttcgggaggttgaggttgtatagtgaggtatgattgtgttattgtattttagtttaggtaatagagtgagattttgttttaaaaaattaaaataaaaattaaaaaaaaaaaaaaaaaggattgttttttttattaaggtatcggtaattatagttttaaattagtttttagggagatattagaagggttagtatagagaattataatggtaggataaagtagttttgggttatttgtttattagtttaggtttagttgtatagtttgtaataagttttggtagtttttttagttttatttttttatttttaagataggttattttagattgttaaatgtaatagtaagtacgttttatttttaaagtataaagaatattcggttaatagtattaaggaaatagaaagaaatggttattagtatcgtttaggaattgtagaatttttatttgtttattaatcgagtaattattgtgtgtaagattttttattaaaaagtaataacggggggaagggtggtttatatattttttaggatttttgtgagaaatagtaagttaatgttttttaaaatttattagaaatttgaaagtgttgtatatatgtaatggaagagatattattaattttttttttttaaatagtgagaagatatttaaggggttgggaaaattaagttaaaaataatttttgtgttaaaaattattgcgtataatggggaatatatagtgagggtattttttattaatatgacgttataggtttggggtttttttattcgtgatatagggtgaagatattggtaaagattggtagagaatgtagtgtaggtttgagttcggttggatttttttatttagggatatagtattttagggatgttttatttttttttgggtaagtttgggagagatggaagattcgtagggtttatttagatttttttattagtaaaggtaaggaaagagtttttttaaagggaggtggaattaatagtaaatggatatgtttagtttgggatggagataaggtttggggtaagaatgtttagatatgatttaagtggttaatattttagaaagatattgttaagtaaggttggttatagttttatttttatattgataggttatgtagaagttagataagtattgggtttagggttgttatttttttttttttaggtatgaagttggtaacgtttaggggcggtttttttagaatatagtatagggtttaaaataaattaaagttgtagtatgttaggaaaaaggtataaagaagtatagttgttggtttttttttaaaattatttatttttttttatttttaatagtagtatttagtttaagtttttattatttttatttggattatcgtttttataatttattttgtatatatatttagagtgagtttttttaaatatttaagattatgttagtaatttttttaaaattttttaatggttttttattatatttaagataaaatttaaattttggtttagttaaggtattagttgatgtgattttgttagtttttttgtagttttgtttttatttattatgttttagatatatttattttttttttgttttttgtatattttaagtttaattttgttttaaggttttggtatatgtgtttttatgtgtttataaaagtatttttgattatggtaaggttaggtttttttaattattatattgtgagattaaatattatttttatagagaggtttatttgtattatttagttataatagttatttggttatttttaagtttttgtatagtatatatatattttagatatttgttttttttttttttttttttttttggagataggatcgttttttgttattttagttagagtgtggtgatataattatggtttattgtatttttgatttgttaggtttaagtaatttttttattttaatttttttaatagttgggattatagtaggtatatattttttttttttttttttttgtagaaacggggttttattacgttgttaggttggttttgaatttttgggtttaagtgattagtttgttttagttttttaaagtgttaggattataggtaagagttattatgttgggtaatgtttttttttttaatgaattttttatatgtttattggtttgttttttaatttttattttaattttaagtatataagttttatgagattagggtatttgttttgtttttgtatttagtataggtgattagatttttaatttatatttgtattataaatgaataagtagaaagagatatgaagtttttttttatatttagttaaaattttaattatatttacgaagatggacgaagggattatgagttaaggaatgtaggtggtttttagaaattggaaaaggtaaggaaatggattttttttggagtttgtagaagtaatatagttttgttgatttattttagattttagatttttagaattataagagaataaatttgttttaagttattgtggtaatttgttatagtagtgataggaaattaatatattatttaatggggaaaagatcgtaagggattataaatggggttttaaatttaaatattttagggtataggataaaggatattttttttaaagatagtagtttttatttagttttgatttttgaaatgtaggttatatgttgttaatttttaatattttagaagaagttagaaatatgggtttatgagaaattatttaatttttaaatgttggtatttaattttaataatataaataatatatagttaaataaagtatttgtaaattataaaaaaaaaaaaagttagttattttttaaaaatttggtttaagtgtttttttttttatgaagttttttgatttattttagtttttagaggtttttatatttttgaattttataggattatttatgttggtatttatttatattttattttggataatgttgataaataatgttagttaagattatttagtttgtattgtttattattgttttaatatttattagttaataattgtatttatttttttttattttaatttttatagtagttttggaaggtattatttttcgttaatttatagatgaaaaaaatgaagtttagagaaataattaatttttttaaggtaatattatagtaaatggtagaattaagatttgaatttaggtttgattttttttttttttaagatggggttttgttttgtcgtttgggttggagtgtagtggcgtaatttaggtttattataatttttattttttaggtttacgcgatttttatgttttagttttttaagtagttgggattataggcgtttattattatatttagttaattttggtatttttagtagagatagggttttgttatgttggttaggttggtttcgaatttttgattttaagtgattcgtttgtttcgattttttaaagtgttgggattatggatatgagttattgtatttagttttaggtttgattttcgaaagtttatatttttgtaagttgttaagtaattttttttatttttgtatagaagttgtatatatttagttttataattggattataaattttgagggaataaggaatacgaggtgtatgttgtatttatttttatttttattagttatagaatagatattttttataattagtagttagaattttgtttaagtttggttttttatttattagttgggtgaatttggggtttaatttttttatttgtaaaatggggatgaatataatgtttattttgaagggttgaggtgtgatataaagtaattagcgtatgtcgaatatttgatgaattgtagtatttattgttatgaattgtatcgagtttgattttatagtaaatataagaaattattttttcgaagtggataatcggtaatagtagatagatattttatgaaatattaatattaataaatagttatataaacgatgttgaatatgtagtgtggtatttgttatagtttaaaggatgtttagatgtgttttagatttattagattaagtttagaggtttgattgggttattaaggataggcgaagagagtaggaaaatagtttagagggaaaggtgtgataaggtttagaagtaagaggtaagaggtttgttatgaggcgatatttaattagtttaatggtaggggtaagaagtttaagggagtagttgtagagatttttgtaaaggtcgtttgaagataaatagttaaagattttaaatattagattaagaggtttgaattttattttgtaagttttagagagatattaaaagttgaagagagggtggtgatatgattagagttgggttttaagaagagggattaatatggttggttatatgtcgatggaatttgttaagtaaagttgatagttgattgttaagataagtatgattaaagttattagagtttatattagcgtgatatttttttttttttttgattttttttttttattagttatgagtttggtattgtgttttaaatatataaggtttttaagaaaattgaaattgaatgaataaatggttatcggtttataggaagtattaaaagttagattgtgaatggagatgtggattttttgtttttaaatataagttattggtattttttttttttttaaatgaaattaagttagggtatgtgggaaaaattgatagttgtttaaagatttgtgttttttttttagtgtagaagagttattggaaagtagttgtttagttaggtttttatttttatgttttattatattgaggtgaggttatatgatttatttttattaatgaaatgtgggtgagaggtgatatttgggtcggggttttaataaatgagtgtgttttgtttatattttgtttttttttattagttaaaatggtggtattatgggatggaagagtttagatttttgaattatttttttttaaggtagagggaagttttttattaattaggaatatttattttatattgttatatgaaataagaaataaggttttataatattaggttattgaaatttcgagatgtgttattatagttagtattattttaatataatagataaaattattgtgggataaaaattattaattttattttaagagaaagtttgtttatgaaatataaaataaaataggaagttgattttaggagaatggagtagggtttaaagagtttaggaaaatttgaattatgttttttaggaggaggaattataaataaagttaaaaatttatattggtagagttagtttttgataaaatattattttttgattaagttaagtttaataatataatatggggtttacggatgaggaggatgaggaattaagatttttaaaaggtagtgttggtatagttttgattttaattaaggatttttttgttttgaggtaagtggtgtttacgaattttaatatacgattaggatggtatatgaaagtatttagattattagagagaatagacgattttttgttataaaagttttttagggtttaagtttattaatataataattttaatattataatttttgttttgagtttaaaaagaagaaatttttagagttgtagaggatagagagaagtagattattgtagtgttaagtttttgcgtaattatgtatttgaggtacgtttttttttttgtagggaatagcgtgtgggtgtgtatatttgtgttttggaaagtatataaaggatagaatttaagatttttttttatttttttaatatttttttttttttagtcgtaggagaaattttattaatttagaatttattttgaaatgaaataattaggaataagagttatagggaatagtagtttttttattattgaggaggttattatggtaggttatatatgaagttagttttttttttttgtttttataattatagtaaggatttagagttttatttaatagagtcgttttaattatgtggtttttttttataggaattaaaataaggaatttatttttttttgttgatggtattataaatatttttaggttttaaatttttttaattttttttattatttgtttgtaaggtttatatttaatttaggttgtattatttttttaaattttatttttttttttcgtttttaattttagtatttaagtttaggttttttttattttaattttgagattttgtaaggtttaataggttttttaatttttagagttttttttttttaatttatattaaatattgttttttttgattatgttattttaaaattttgattttggtggttaaggataattatgattagttaggggtaatttatggatggttttaattaggttattgtttttttttttttaagtttattgttatgtatgtttttttaattttatagatatttatggtattttttattatttgatttagttattttattattgggtatatatttaaaggattataaattatgttgttataaagatatatgtatatatatgtttattgcggtattatttataatagtaaagatttggaattaatttaaatgtttattagtgatagattggatttagaaaatgtggtatatatatattatggaattttatgtagttataaaaaaggatgagtttatgttttttgtagggatatggatgaagttggaaattattattttgagtaaattatcgtaaggatagaaaattaaatatcgtatgtttttatttataggtggtaattgaataatggaatattatatattggggtttgttatggggtggggggaggggggagggatagtattaggagatatatttaatgtaaatgatgagttaatgggtgtagtatattaatatggtatatgtatatatatgttaataaatttgtacgttgtgtttatgtattttagaatttaaagtataatttaaaaaaagatttttatggtattttttgtatttttttttttttttttatgtatttaaattttatttgtttacgttttaatttaaattttattttttttatgaagatttttttgattttgttagtttaaaatattttgttatttttgaatttagtttatattttaagtaaatttatattatagttgttattagttatatgtgtttaagtatttgaaatgtggttattgtgattgagaaatagaatatttaattttattttattttaataaattgaaatataaatttaaaaattgatatttaagatttagttattggaaaatttttaagtatgtttagaataatttgggtacgtgagtttatttttttaattgttagttttatgaaatttaaatatagattaaatatttttaatgaaaattttatatttaaattgcgaagttttgtaaatgtaaaaattttttatatttgaaattatagtataaaaaggaatgtaaagtatttttttaataatttttataatgatgatgtgttaaaataatattttggatatgttggattaatatattgttaaaattaattttattgtttttttattttaatgtgtttatgagaatattgaatattatatgtgtattttatagattttatttagatagtgttaatgaggtttttttttatgatatttattagtttttttttgtgtttttatttatgattgtggtttatttattatttaatttttttaaagggaattttatttatttttataatagtaataataataatagcggtagttaatatgacgagattttttaagtgatattaagtatttaagtagtaagtatttaagtgttttaagtatttatatttatagtatgaatttattttattttaataatagtttatgcggtatatattatattgttataattttttttttgcgaatgtagaaattgagatttagaaagtttaattgatattttagaattttatgtaatttgtttgatgttaagtaattagtaagtagtaaatttggtatttgaatttagagaggttttagagtttatacgtttatttatatgttaattatttgttttttgtatttgttttagatttagttttgagtagtagttagaaaatatgtaaataaataaaatataatttttttacgtatgtaagatagatagttaagttatagtaatagaaatgatagttaagattataaaagaaagagtggagaggggtgatgaagatggaaggatagtaagagtgtaaaaatgtaagtttgtgaagtttaaatagtgatttttgtaataagagtaatagttaatattaagtaagtttgatatattttgtatttttaggatgttgttataaaatatatttgttttagattagagttttagtttttttatggagggaaaagttatttaattttgatattgtaggattattagtaggagataaagagttgagggaaagtttggaatattttttgtggtttagatggttttattgttatttttagaaggaattgtttcgggtgtaataggttatatttattgttaaagatagaatatttttaagtattagttagggtgtttaaaaattagttttatgatgattaaataaataaaaaaagttggtaaaggaatagtatttaggattaagaatattaagataaatttgatttagttataagatgtcggtgttttttattagtaaatatatagataatattttaattttaggtaaaagaaaattgaaattgaaatataaatattataaagtttttaatatatttttaattagaaatttttaatttttaatttaagtaatattagtaggtcgaatttttttgtatattgaggttttttttggaggtaaagatttataaatagtagagttattaggagtttttagttgaggttttatgacgatttgtgagaattttttcggaggagggttttaattttagataattgtgttaggggatttatagaattgtttaaattaattgttatataattattatgtgttttagttgcgggaattattatttgtttaatattaatagggtgattgtaattaaattagtttagggtaattgtttaatgtttgaagggtagaaaattaaaaatgttattggtgaatttagtagagaatttaggtgatatgaagtttatatttaaaggttgaggtttaggattgataggaaataaggaagagtttattagaggggtttaaagaaaagaaaaaataaaattttttgaagataaggtaatggtttgttttttttaaatgggggagtgtttagtttttttgttatttacgatttatattataatttaggtttaaattatagtggttagtttatttttttatttagtttttggttaagatgatattttgttttatatgaagttggttaatttttttttttttttttttgagatagggttttgttttgttgtttaggttggagtgtagtggcgtaattttagtttattgtaatttttattttttgggtttaagcgatttttttattatagttttttaagtatttaggattatagttatgagttattacgtttagttaatttttgtattttttggtagagatggggttttatatgttgattagtttggtttcgaatttttgattttaggtgatttatttgttttaattttttaaaatgttcggattataggcgtgagttattatatttagtttgaagttgattaattttatttgtttattttaatgaatataaacgaattttattaagtttatttttatttttttattgtttattagatttaatagttatgtatttagttttatggtttttttatatgttattatttcgattttagtttgatattttattttttttatattttgttaggttgaatagttagtgagttggtgtttgaatatattttttattttgatttttttttttatttatttttatatgtaagatttattatcggatgaaaagtattattatagaataatatataaaggtattttatgaaatattagagttttttatttcgtttttgaaataattgggaaaattttatggatatttaagtttgaaaaatgttgaatattttattttttttttagaggtatagagtgtatattagtatattaaaggttttgagaagttttgtagttatgaaatttattggggtaaaggatttgaatagatattttttttaaagaaaatatataaatgggattaaaaagtatatgaaaagatatttaatattattaattattaggtaatgtaaattaaatttataatgagttattattttataataaaataaaaaatagtaagtgttggtgaggaagtggaagaattggaatgttgtgtattattggtgggaatgtaaaatagtataggtgttgtagaaaatagtatggaagtttttttaaaaattaaaaatagaaggattatatgatttggtaattttatttgtgggtatatatttaaaagaatggaaaataggattttaaaaagatatttgtaaatttatgtttattgtaatattatttataatagttaagaggtggaaaaaattgaaatgattatttatagatgaataggttaaaaaaaaaaagtttttaaataaaatggaatattatttagttttataaaagaaagaaattttgttatatgttataatatggatgaattttggatattatattaagtgaaataagttagttataaaaagataaatattgtatgattttaattatatgcgttatttaaagtaggtaaatttttttttttgagacggaatttcgttttgttatttaggttggagtatagtgttgtaatttcggtcggtttattgtaattttcgttttttaggattaagtaaatttttttgttttagttttttgagtagagggattataggtacgtgttattaagtttggttaatttttatatttttagtagagatggggttttattatgttggttaggttggtttttaatttttgattttatgattcgtttgtttcggttttttaaagtgttgggattataggcgtgagttatcgtgattggtttagtaaaattttagagagagaaagtagaatggtggttgttagggataggaggggaggagagagattgggaggagttgtttaatggatataaagttttagttttgtaagacgaaaaagttttagagatttgttgtataataatatgtgtatgtagttaatattatagtattgtatatttttaaatggttaaaataaatgttatattatatattttttattataataaaaaaatattgtttagtttattttattatttttttaattaataaatatattttttgtagagtattttataagatataataggaatattgaagaatatatatagtttggggaatattgttttaaatattaaagtattttaaattttatattgttgttttaaatattcgatttttttgtttatttattttaagttttttatttgtttttaaggttaggaaatttatgtttttaggtagagatttaattttgaggttgagttgtttttaggttaatataggtttgattttgtcgtaattatgtagattaggatttttggggagaggtaggaagttagttagttagaatggatatgttttgtgatttttgtttaatttatagaaatatttttatttattattttttttattatggtggattggtggatttttattatttatgtttgatattatatagatatatatatagatatagatacgtatacgtgtatatatatagagtaattaggattatgtagaattaagttgttatatatattaattaagtttttattttggattttgaatttgggggattaaggttttagtttaatttggtattttgaaagtaagagaggaaaagatataaatgtaggtgttgttaggtttatatgatttaattagttggttgaaaaagagaaattgatatgtagtaagatttgaaaattttttcgttttagttttttttgagggtttgttatatttttgtttttatgttttataagatattttatttgaggttttgatatatataattttgagagtattatttataatttggagttgtgttaatatggtggttttgtttttgaatttttataaagtatttttattgtttaaggtattttaaggtagtttttattatttgtaattgaagaattttgtaataatagttttattttttattattgttttttatttttttggttttttgttagggaaatttgttttattgtttttgaagagtattcgaagtttttttgtttttttgtttttgttgttattaatatttttatttagaattttttttttttttttttattttatttttttatttatttaaattttatttattttttaaggtttaatttaattgttttttttgtgttatgaagttttttattattttttttttttatttttaaatttttatagttttttgtttagatttttttgattatatttattatattttattttataatataggtatgtgtatgtatatttaaattttattattaagttgtatgttttttaaaattaggaataatttttatttttatattatgtttaatatttgagatgggtagggttttatatataagtaaaggttgggaaaaattgtatttatagatgattttgtggaagaatagtatttttatattattttattttttattaaattataagtttagtgagagtagatatttaattttaagtttatttttgtattttatagtattataattatagtgtaagtatttaaatatttgttgatttaatgattttatagtggattttagaatttttttattttatcgtttattaattttattatatgaggtttttgtttttttaatttttttggattgggtaaaagagagatagggtaaataattttgttaggaatatagtgtggtagaggagatgtggagtatgttagtaatagaaagttttagaatttttgttttttaatttgtttattaattttttattgaaagatggttaagttattggaattaaggaagttagggttaatttataagtatttagtgagatttattggatatagatttttatagtaagttttggaagggtttggttgtggttttggttgtgggttgataattagaattttataaatatattagggttggggaaaaaagattgaaaagaaaggagaggtttattgttatgtagtatttgatgagtatttttcgatgggatgatgtaggtttggatcggttcggttatatatttagagttttttatggtttgttttagttgtcgaagtagttttgaagttatttttggaggtattttgtcgtttgtaataataggagagtaaattttaaaattagtttgtttttagtaatttaacgtttagttcgaagtgggttatagagagaagtgttttttacgttttgttttatttttagttaggtttttaaattgattattttattattagattaagattaaagttgttagaaatattaatgtttatagtttttaaatattatttttaaatagttatttgtggttagaaaagtttagttattaattatttttaatttgattggttattttttttatttttaggattttatttaagaataggagataagtatatagaaatttaggtgtttatttttgtttatagtagaaaaaagtaggagaagtgtatggttagttaaataaattataatacgtataatagtatattgtgtatttattaaaaattatatagatttagaaaagaattatatagatttatatatttgatttggaaagatatttagataatatttgtgggtgattaaaaatagatgataggttgggcgtagtggtttacgtttttaattttagtattttgggaggttaaagtaggtagattataaggtcgggagatcgagattattttggttaatatggtgaaatttcgtttttataaaatataaaaaattagttaggtgtggtggtacgtgtttgtagttttagttatttcggaggttgaggtaggggaattatttgtatttaggaggtggaggttgtagtgatttgagattatattattgtattttagtttggtaaaagattaagatttcgttttaaaaaataaaataaaataaatagatgataaaggaaaaaaatatagattgtttttatttatttaaaattgtgtatgtatatatgtaaagagaagtttttagaaggatagttatttaagtgttaagagtggttatttttgggtaagtaaatttggagtaattattgtttttttgtatttttttgttttttaaatttgattgttttaaaagagtatgttttataaattttttgttaaatatttagttatagatttagagaagaaagtttcgtttattaggagttaaaagttttattttttagtgaatatttgttattaattagttgtgtaagggagaaggggattagggttttaatgttttgtgtttttttttttaaagtatggcgggagtggtcgggtgcggtggtttatatttgtaattttagtattttgggaggttaaagtaggcggattataaggttaggagatcgagattattttggttaatatggtgaagtttcgtttttattaaaaatataaaaaagttagttaggcgtggtggcgggtgtttgtagttttagttatttaggaggttgaggtaggagaatggcgtgaattcgggaggtagagtttgtagtgagttaggattgtattattatattttagtttgggtaatagagtgagattttgttttaaaaaaataaataaataaagtatggcgggagtggatgagatttaaggtttttaaacgaagttttaaggttttaggggagtttattatttaaataaaattagagttggaattattagttttagaaaatataaaataggaatagaaatataaaattaattaaaatgaaatgttaaagatgttaattttggttttattagaaatttttaaatttgttttatttatatttatagttaggaatagttttttgtatttatttagtggaagtatagatgatataagttgatttaattattttagttggttttttaaaaagatttttttttaataattattgatattagttaatgttttgataaatattatagttgtagttttatgtttatataataaaataattttagaaggagttaattatagaatagtgattatgtatattttattatattttatatattggtataaaattatattattagaatttaaagtagaataatgagtttttttaatttatttttaatagattttattttttatagtagttatagttttatagtaaaattgagtagaaaatatagagtttttatgtagttttagttttaatatatatatagttttttgttattatttgtatttttaattagagtagtatatttgttaaaatggattaatttatattaatatattattattattttaggtttatagtttatttttgtatttattcgtggtgttgtatattttatgggttttgaaaaatgtgtaatggtatgtatttattattatagtattatatagagtatttttattgttttgaaaattttatatgtatatgtagtttatttattttttttttttttttttttttaattcgataataattgagtttttttattgtttttatagttttgtttgttttataatgttatatagttagaaatattttatatagagtttttgttagattgatttcgttttatttaaagaataatgtatttaagttaggcgtagtggtttatatttgtaattttagtatttcgtgaggttaaggttagtggattatttgaggttgggagtttaagattagtttgattaatatagagaaattttatttttattaaaaatataaaattagttgggtatggtggtatatgtttgtaattttagttatttaggaggttgaggtaggagaattgttcgaatataggaagtagaggttgtggtgagtcgagattatattattgtattttagtttgggtaataaaagcgaaattttgttttaaaaaaaaaaaaaaaagataatatgtatttaaggtttttttatgttttttgattgtttgatagtttatttttttagttttgaataatattttattgtttgtatgtattattatttatttatttatttgttgagggatatattggttgtttttaggttttggtaattatgaataaagttgttataaatatttgtgtgtaggttttaggtggacgtaagattttaatttatttggtgtttttggtgttttggagtttgttaatttattttttaataaaaatattttatttagttaaaaatattgtaatataattttgtaagtaatatagagttaaattaggataattatatgaggtgatttttaacgattgatattttgatttgttgtagtttaaattttgttgggtataggttttttttggatttttttttttaatatatttatttgtttttttttttttattattattagtattttaggtttttatgttttagttgttatggcgatttttaatagaattttttatggggtattatattgattttgagttagaaaaagtgttttatttattatttgtagtaagggtaattttaaaagtaggttttagggtttatttttaggagttttagaagagagaagtatttaaaggaagagttaatggaaattgtgttatttataatttaagtatatttatgttttttgtattatatttgtttttgaatattgtttagaggggtattttttttttttttgaggggagacggggttttattatattgtttaggttggatttttgggtttaagtgattttttcgttttagttttttaagtaaatgggattataggtatatattattatatttagttattttttcgtttaatttattgggtttataattttttatttattagagaaaaagggatcggaagtatttggtttgatttaagtttatatgttaatatttttattgggggtttaaaataaagtttattgtgattttttaagtttgttagtatttaaaaattttattttgatattttttaggagttttagaatagatttattgtgtttttaaattatatttttgagtaagttattatttttaaaaatagttaagtaaaaatgaagttttttttaggagtaggattttaatattggttgtatattaggattattcgggaaatatttgatttaattggtttggagtatagttttggttttaggagttttaaaatgtaaaaatataagagtttaatatatttttttttaagattatttatttttttatagattttgttttttatttaggtatattttgacgtaaggattttggtggtattgattgggtgtttagtgttgattgtagtattaatattattagttattaattttattaataacgttaatataattaattatgagtataaaatttttaattgtaaattaaaaattaataaaaataaattggatttgtttaaaaatattttttgttttttggttattataatttgtttttttatttttatattttgatttttattattattattattatattattacgttttttttggtgattggtatattagatttttatagaattattagttttattagttttattgatatttttttttataatgttatttatttttattaatatttaatattttttttttttttatttttttattttttaggtcgattatatttatgttttgggtgtaatgtagttatttttttattattaatattagatatgatgaaagaagttttaatattataattaatagttaggatgtggtaaggggtagtggtagtaatagtgaaggtgaagaagatagtaataggtaatggttgaggtagtgaggtagttattattgaagtgaatatagtgggttttggtggttgaggtagttgtatttataaggaaaataggtgatggaaagtgattgaatgagtgagtagttggagttaaggagagaataaagttggtgtaattatataagttttagttattgaggtggtattggttgaaaaggtagttaagatggaggaagtgaaagttgtagttaatgatttttataatttgtataaggagtaaatgagttattatatatatggtatttagaaatagtatttggtatataataaatgttatgtaaatgtttaatgttattagagttagatatataattaattataaatgtaatgtgataaattgtgtaaataggtgtgtatattattttttcggaaggt

SEQ ID NO: 1907 - DNA, 5562 bp, Artificial Sequence
  chemically treated genomic DNA (Homo sapiens)
tttttatgttttcgtgaaatggttttttttagtttttttaatttttcgttaattttcgtttatttcgtagttttttttaatgaatttcggttttagtaataggtattttttttttttagattttgttatggttattttttagattttttaacgagggttttttgttgttttttttggttatttttaggttttgtttaaggtgggtttttttagttttttcggttttttttttttttattatgtggtggtttttttttatttaatttataggttttttttttattttatcgaggggttttttagttttttttttttttttttcgagggtgcgtttttttttttatgtcgggatgggggttttttttaagttttttaggtttttttttaatttattaacgttggttgggtgattttcgattttattttttttttatagtttttttcgattagtgttttttttttgtatttaaagtcgtttttatttttttattaggttttattatttttttttttgtgattgaaagttttttttagttttgtataaatatttttgttttttattggttttttttattgtttttttttttttttattattttttaggtttggggtggttttttttatttaatttatgtttatttttttttttttattttattttttgagataggtttttttttgttgtttaggttggagtgtagcggtgtgtatttagttcgttgtagtttcgattttttaagtttaagtgatttttttgttttagttttttaagtggttgggattataggtatgtgttattatgcgtaattatttttttttttttttttttgtagagatggatttttttttgttgtttaggttggttttaaatttttgggtttaaacgatttttttattttaattttttaaagtgttgggattataggcgtgaattatcgtgttcggttttttttttattttatttatttatatttttttttttttgtttttgttttttttttttacgatgatttgtttagttaggtacggtagtttatgtttgtaattttagtattttgggaggtcgaggcgggagaattatttgaggttaggagttagagattagtttggttaatatggcgaaatttcgtttttattaaaaaatataaaaattagttaggtgtggtggtacgtatttgtaattttagttattcgggaggttgaggtaggagaatcgtttgaatttgggaagtggaggttgtagtgagtagagatcgcgttattgtattttattttgggtgatagagcgagattttgttttaaaaaagaaaaaaaatgatttgttttatattttaaggttattatttattttttgtttggggtgattttttttttgttttttttattattttaatattttattattattttttttttttcggttaggaatgattttttttttgattatatttatatttttttattttagtttagttttttttttttttatttattttttattatttttattttttgttagttagatttttttttttttattatttttttgttttttatagtgtttttttttattttttttttgtttaagaaagtttattaatttttattttttttatattttttttttttttaggatagtgttatttttagaattttgtgataataatgatttttattatattatttatttttgttttttttattttatgatggttttttttttttttttgttttttattgatttttttttacgttttcgttttgagaattatgatgatttttttttagtatggtagttttttttattttgaaggtatattttatttttttattaggttttaggttatatttttttatttgaagtagttttttcgattaggagtatatatgtgtttttgttattgttgtaggtttttatttggttatggtatttgtttttcgtcgtcgtatatatttcgtagtgtagtgggtattttgtagtgtagatagagggcgaggttgtagttatgggtggtgtggttttcggattacgattttgatttaggatttttgtgttttgagagaggagggattagtagttttttggttttttatgggcgggatgttgattattgtttaaggaattgtttagagttggacgaagaagtagtggtgatgttagtaaagttgtttttaggggcgggaagcgattttattatgaagtttgtttgtttaattatatggttggggattttggatgttagggttcgttgagaaagtttaggggtagggaggggtcgtgatggaggtttttatggatttttgtgaaattttaggtttagttggtttttgaatgtgggatttttttttttgaaggtgttatgtaggttttgtagatagtaggagtttaggtagggggttttgaggttagggtttgtattttaggttaaggagggagagtgaggattaggagggtagaggatttgaattttttggttttgagagaggggatagttaggggtttagaaatttgggttttggggaaagtgaggtttatttggatttttgtgtgtaggggaggagggggttggggtttgaattttttagtttaaggagaaaggaaatttttttattttttttaaaaaaatatattatatgatattaatgtattttttttgagatggagttttgttttgttatttaggttggggagtgtagtggtacgattttggtttattgtaatttttgttttttagttttaagtaatttttttattttagttttttaagtagttaggattataggcgtttattattaagtttagttaattttttttgtatttttagtaaagacggggttttattatgttggttaggttggttttgaatttttgattttaagtgatttatttgtttcggttttttaaagtgttggggttataggtatgagttatcgtatttggttttttttttttttttttttttttaattatatttttaaagatttttttttttagttatgtttttatttgattttttagaattgagatgtgtttgggattttttttggaggatggaggatttagagtttattaagttttttttttagggatttaattataggagttttttttttttgggatttttaggttttttttttttttatttttggttttttttatgaatttgaatttttagaatgttttttcgtttattttgaggatttgttgaaggttttttttttttttatattttttttttttttaatttgggatttttttttttttgaggttttagagatagtttaggttttttgttatttattaagatttaggagggtgtagagtaatataaaggttagtagaaaggtttttggttttttggagagttttatggtgtgtgtattagtagtatttggtttttagtttttataggaagttgaggaggggtgggtttggatttatatttattttacggggagaaatagttgaggttagaatttagggtagttttttgtggttttcgggttgggaaggtagaattagaatttaaaagtgatttgggtattttgtgtttagttttttatttttatggagattttaggagtttgggtttttattttttttttttattagaatttagaaagttattattttgtttttttatttttttacggtttattgttgtttgtttgtttgtttgaagattaagacggagttgggttttttgatttttagtggttgtaagaattgggattttttttttttttttttttttttttttttttttaaggaagtatttagtgtgggtagggttttattttggagtatttagtatgtttaggttggttttgcgggtgcggggtgttttgtttttttttttttttttttatgtgttcggtttatattttttgtgtgtttgggttgtttttagttgcgattttatttagggttgtatttttgggtttttaaggtatcgaatgaatagagggatgtttgtcggtagttataggcgggcgtagtaaaagatagatgtttatagtttatatattgggaaattgaggtttttgtggaagaattttaggataggggtgtgtgtgtgtgtgtgtggtgggggttgggtatatgttttgtgttatatttaggacgtagaattttttttttttggttttaggtataaggttgaaagagatttgttaatttttttcgcgcgtgcgcgcgcgcgtatgtatgtatatgtgcgtgtgtgtgtgtgtggtaaggggatagagagaagagtgtagtcgtttgagttatttgaagagattttgttgcgtagaatttaggttttttacgaaattacgaaaatttatttagatttgttgttttagtttagcgtagtcgtttacgtttgtagttttagtattttgagaggtcgaggtaggtggatcgtttgagttgaggagttcgagattagtttgggtaatatggtaagattcgtcgtttttttattttatgtttttataaaaaatataaaaattagtcgaatgtggtggcgcgtgcgtgtaattttagttatttaggaggttgaagtgggaggattttttggttttaggagataggggttgtagaaagtcgagatcgtgttattgtattttattttgggtgagagagtaagattttgttttaataaaaaatttttaaaaaataaaataaataataatatagtaaaaagatttgttttttcggttttagtgtgggcggtaattttatcgtgtaatgagaaaggcgaattttttttagatattaatttcggaggtcgtttttgttgttaggtttttagaaagtagggttcggacgttattgggaggcgaggttagagcggggttgtgtgtggcggagggaggcggggttggaggaaacgttcgttgttaaggaacgtagcgtttttttcgttttggagaggcgcgattgggtttgcgtagtgtcgacgtcggcgtcggcgcgtcggggtttgaaaggttcgagtttcgcgcgtttgcgtattttagttagcgtagggcgtatttcgtttttttttattttttttgtttttcggattttatattttattttatttttttggttaggcgaagtttacgacgttgatatgtcggagattcgttttcgttatgtcgtgttttgtagtagttaggattcggtgagggatttgtatgggggaggttggaagacgtgagggaattaatgaggatagtttttaaaagagtttttggggtttttttggaagtttaaggagagttatggggggatttttaggaggttaaaagtgaattgtggagagatgttgaattagggacgtttcggcgtttagggaattttcggagagaaaaggaggaatagggaagtttttttggagagtttataggtgaatttttacgggaaagtgttgtaggggaaattttaggtagagtgtcgggggattaacgggagagtttaaatttgggggtcgtagaggttttgggaggatttaaaggaattatttgagagttggaggtttagttgttatttttgtgttttaattttttttttttattgttgtttttaga

SEQ ID NO: 1908 - DNA, 5562 bp, Artificial Sequence
  chemically treated genomic DNA (Homo sapiens)
tttggaaataatagtgggagaggagaattagggtatagagatgatagttaggtttttagtttttagatgatttttttgagtttttttaaggtttttacgatttttagatttaagttttttcgttaatttttcgatattttgtttggagttttttttataatattttttcgtggaagtttatttatgggttttttaagaaagtttttttattttttttttttttttcggaagttttttagacgtcggaacgtttttaatttaatatttttttataatttatttttagttttttggaaatttttttatgattttttttagatttttaagagaattttaaaagtttttttaagagttatttttattaatttttttacgttttttaattttttttatgtaggttttttatcgagttttggttgttgtaggatacgatatggcggaggcggattttcggtatgttaacgtcgtgggtttcgtttggttagaaggatgaggtagagtatggggttcgaggggtagggagagtgggagggggcggggtgcgttttgcgttggttaaagtgcgtaagcgcgcgaggttcgggttttttaaatttcggcgcgtcggcgtcggcgtcgatattgcgtaagtttagtcgcgtttttttagagcgggaagagcgttgcgttttttagtaacgagcgttttttttagtttcgttttttttcgttatatataatttcgttttagtttcgttttttaatgacgttcgaattttgttttttgggagtttagtaatagaagcgattttcgggattggtgtttggaagaaattcgttttttttattgtacgatggagttatcgtttatattgaagtcgagaaagtaaatttttttgttgtattattatttattttattttttaaaaattttttgttgagatagggttttgtttttttatttaggatggagtgtagtggtacgatttcggttttttgtaatttttgttttttggggttaagggatttttttattttagttttttaagtagttgggattatacgtacgcgttattatattcggttaatttttgtattttttgtggagatatggggtgagagggcggcgggttttgttatgttgtttagattggtttcgaattttttagtttaagcgatttatttgtttcggttttttaaagtgttggaattataggcgtgagcgattgcgttgggttaggatagtaaatttgagtgaattttcgtagtttcgtagggaatttggattttacgtaataggatttttttaaatggtttaggcggttgtatttttttttttgtttttttgttatatatatatatacgtatatatatatatatacgcgcgcgcgtacgcgcgaaaaaaattagtagattttttttagttttatgtttgaggttaaaagagaagggttttgcgttttaaatataatataaagtatgtgtttaatttttattatatatatatatatatatttttattttggagtttttttataaaagttttagttttttaatatgtggattgtgggtatttgttttttattacgttcgtttatgattgtcgatagatatttttttgtttattcggtgttttggagatttaagggtgtagttttgggtggggtcgtagttggagatagtttaaatatataaggagtgtgagtcgagtatatgaagagaggggaagggagataaggtatttcgtattcgtaggattagtttggatatgttgggtgttttaaggtggggttttatttatattgggtgtttttttgggaggagaggggaagagagagaaggagagggaattttagtttttgtagttattgggaattaagaggtttaatttcgttttggtttttaagtaaataaataaataataatgggtcgtgggaaggtgagaaaatagggtggtgattttttgggttttaatagaagagggggatggaagtttagatttttggggtttttatggaggtggggggttgggtataagatgtttaggttatttttggattttggttttgtttttttaattcggaggttatagaggattgttttgggttttgattttagttattttttttcgtagggtgaatgtgggtttagatttatttttttttagttttttataaaagttggggattaggtattgttgatatatatattatgaggttttttaggagattagagatttttttgttggtttttgtgttgttttgtatttttttgggttttggtaagtgataagggatttgaattgtttttgggattttaggaagagagaggttttagattgagagagagagagatatagagagagaaagagtttttagtaagtttttaaggtgaacggggaggtattttggaaatttagatttatggaagaggttaagggtaaaggaagagaaagtttgggggttttagagaagaaaagtttttgtgattggatttttgagagaggggtttggtgggttttgaattttttattttttaggaaggattttaaatatattttaattttaggaaattagatgagagtatggttggaaagggaaatttttaaaaatataattaaaaaaaaaaaaagagggagaaggttaggtgcggtggtttatgtttgtaattttagtattttaagaggtcgaggtaggtggattatttgaggttaggagtttaagattagtttggttaatatggtgaaatttcgtttttattaaaaatataaaaaaagttagttgagtttggtggtgggcgtttgtaattttagttatttgggaggttgaggtgagaggattgtttgaaattgggaggtaaaggttgtagtgagttaagatcgtgttattgtattttttagtttgggtgatagagtaaaattttattttaaaaaaaatatattaatattatatgatatatttttttaaaagaggtagagagattttttttttttttagattaagaagtttaggttttagttttttttttttttgtatataggagtttaagtaagttttattttttttaggatttaggtttttgggtttttagttgtttttttttttagaattaagaagtttaagttttttgtttttttggtttttattttttttttttgatttgggatgtagattttagttttagggttttttgtttgagtttttgttgtttataagatttatatggtatttttaaggaggagaattttatatttaagaattagttggatttgaagttttataaaagtttatggaaatttttattacgatttttttttgtttttgagtttttttagcggattttggtatttaaaatttttagttatgtaattaggtaaataggttttatggtggagtcgtttttcgtttttggaagtagttttgttggtattattattgttttttcgtttaattttggatagttttttgggtagtggttaatatttcgtttatgaaaaattagggagttgttggtttttttttttttaggatataaaagttttaagttaaagtcgtggttcgaagattatattatttatgattatagtttcgttttttgtttatattgtagggtgtttattatattgcgaaatatgtacggcggcggggagtaggtgttatggttaaatgaagatttgtagtagtgataaggatatatgtgtgtttttggtcgggaaggttattttaagtaagaggatgtggtttgggatttggtggggaggtggggtgtatttttagggtggaagagattattatgttgaggggggattattatggtttttaagacgggagcgtgggaagaaattagtggagagtaggaaagagggaaagattattatgagatggagggaatagaaataagtggtgtgatagaaattattattgttatagaattttgaaaatgatattgttttaaagagaaggaaaatgtgggaggggtgagagttaatagatttttttaggtagaagaggggtaaggaaagatattgtggggggtagagaaatagtgagaggggaagaatttaattggtaggaggtggaaatggtggggagtggatagagaaggaagaggttgggttggggtgggaaagtgtaagtgtaattagggaagaggttatttttgatcgagggaggagagatgatggtggagtgttggagtggtggaagagatagaaaagggattattttaaataggagatggatgataattttgaagtatggagtaaattatttttttttttttttgagatagagtttcgttttgttatttaggatggagtgtaatggcgcgatttttgtttattgtaatttttattttttaggtttaagcgatttttttgttttagtttttcgagtagttggaattataggtgcgtgttattatatttggttaatttttgtattttttagtagagacggggtttcgttatgttggttaggttggtttttaatttttgattttaagtgattttttcgtttcgattttttaaagtgttgggattataggtatgagttatcgtgtttggttgagtaaattatcgtaaagaggagaagtagagatagggagggggagatgtggatgagtaaaatgaaagggaggtcgggtacggtggtttacgtttgtaattttagtattttgggaggttgaggtgggaggatcgtttgagtttaggagtttgagattagtttggataataaaaagagatttatttttatagaaaaaaaaaaaaaaaaatagttgcgtatggtggtatatgtttgtagttttagttatttgggaggttgaggtaggaggattatttgagtttaggagatcgaggttgtagcgagttaagtgtatatcgttgtattttagtttgggtaatagagggaaatttgttttagaaaataaaatggaagagagaagatgggtatgagttaaatgaaagagattattttagatttgaaaaatgatggaggagaaagggagtaatggaagagattagtgggggatagagatgtttatataaagttgaaagagatttttaattataggaggagagatgatgaggtttggtgagggaataaaggcgattttgggtgtagggagaaaatattggtcgggagaggttgtgaaaggaaagtgagatcgaaaattatttagttagcgttggtgggttaaggaaggatttgaaaggtttgaagagaatttttatttcggtatagaagaggaaacgtattttcgggaagggaggagagagagttgggggatttttcgatggagtgaagggggaatttgtgaattgggtaggaagagattattatatggtggggagggggaaggtcggggagattggaagaatttattttaaataagatttgaaaatagttaagaggggtagtaagagattttcgttgggaggtttgaggagtgattatggtaggatttgagagaggaggatgtttgttgttgggatcggggtttattggaagagattacggggtgggcgggggttggcggggagttgaggaggttggaagagattattttacgaaggtatggggg

SEQ ID NO: 1909 - DNA, 5360 bp, Artificial Sequence
  chemically treated genomic DNA (Homo sapiens)
aagattagtttggataatatggtgaaatttggttgttattaaaaatataaaaattagttaggcgtggtgttgtacgattgttgttttagttattcgggaggttgaggtaaaagaattttttgaattcgggaggtggaggttgtatcgcgttattgtattttagtttgggcgatagagcgaaattttgttttaatttaaaaaaaaaaaagtttttttatggtagggttatttttttttttgtaattaataagtattttgtagggagatattttaggttatagtttgtttttaattatatttttatttagtaattttagtattaattgattatttttaatttttttttttaaattattattgtggtaatttgtttttttttttttttttttttttttttttttagatagttttattttgttattaggttggagtgtagtggcgttataggtatgagttattgtgttcggtttattgtggtaatttttaaatattttaattttaggtttaggggtacgtgtgtaggtttgttatataggtaaatttatgttatgggggtttgttgtaggaattatttcgttatttaggtattaagtttagtatttagtagttattttttttgtttttttttttttttttattttttagtttgaagtaggttttagtgtgtgttgttttttttttttcgtgtatgagtttttattatttagtttttaattataagtgataatatgtggtatttggttttttgtttttgcgtttttttgttaaggatagtggtttttagtttcgtttatgtttttgtaaaggatatgattttgtttttgttttgttttttttttttttgagatagagttttattttgttgtgtaggttggagtgtaatggtatgattttagtttattgtaatttttatttttttgtttaagtaatttttttgttttagtttttcgagtagttggtattatagttatgtattattatattcggttaatttttatatttttagtagaggtaggattttgttatgtttgttaggttagttttaaatttttgattttaggtgatttattagttttagttttttaaagtgttgggattataggcgtaagttattgatgattttttttttaggaggtaaaatattatgtgtttttaaaagttagagttggttagttatggtggtttatatttgtaattttggtattttggggatggcgaggttggtggattatttgaggttatgagttttagattaatttgattaatatggtgaaattttatttttattaaaaatataattagttaggcgtggtggtaggtgtttgtaattttagttattgaggaggttgaggtatgagaattatttgaatttagagatagaggttgtagtgagttaggattttgttattgtattttagtttgggtgatagaataagattttgttttagaaaaaaaagaaaaaaaaaattggagttattaaaaaaagttatatatagggaagtgttttttattttattttttttattttatttttattttttattttttttaatttatttttatttatttttcgtagataaagaattttttttgttttttatgtattttttttgtgtttttttttatttaaatgagtagagatatgtgtatttttttttttttttttttttgttataagaaagttagtaaattgtagatatttttttttttttgttttttttatttaatattatattttggaaattattttttatagatgtatagagattttggttattttttgttgtagttgtatagtgttttattttgtggtagtgtcgtattgtttttaattatttttttatgtataaatatttaggttatttttaagattttgtaattataaattatgttgtaatatgttttttttgtatatacgtttttgtaatgttggaagtatgattttaagttaaatttttagaagtaggattgttgagtgaaaaagttaataaatgcgttattttgttagatagtgttaaaatcggttaggtgtagtggtttatgtttgtaattttagtattttaggaggtaggaggattatttgagtttaggagttgtaaattagtttaggtaatatggcgaaattttatttttattaattaaaaaaaaaaaaaaaaagatattgttaaatttttttttaaaaagatcgtatgtttttatgtttattagtagtttgtgagagcgttttaagtatttttttaaacgagaagtgatgttttcggagtattaaaattgaagtgattttaaaattatgttgtatttatacgaataggtgtgtatttaatggattaaattagtttagttgatatgttttttttattaggaatagtgtggagattgaaaaattaatttagtttagagtagttatttaattgtaaagtttttttttttaaatattgatttattatgtgaggaaatatttattttgtatagaagtgtgtggaattggacgagggggttgatttatatatgtggtttggtatatatatatttttattatagagggtgtaatgaagatataggtggtttagtattataggaaagggaaaaaagaaaaaaaaaagacggtagaggtggttttttaagtatttatttttattttttttgttaatgatttataatttgttgttattgttgttatttattgttttttatatttttttataaggtttgtgtgttttgaaaaaatatgtttttatttcggatagaagtggggtatatagggttaggcgcggtggtttacgtttgtaattttagtattttgggaggtcgaggtaggtagattataaggttaggagttcgagattagtttggttaatatggtgaaattttatttttattaaaaatataaaaattagtttggcgtggtggtacgtgtttgtagttttagatatttgggaggttgaggtagaagaattatttgaattcgggaggtagaggttgtagtgagtcgagatggtattattgtattttagtttgggcgagagtgtaatgagatttcgtttttaaaaaaaaaaaaaaaaagaaaaaaagaaaagtaagtggggtatacgatttaggtttaagttaattagattaattttatttttgatggttgttaatgttttagatacgggttcgtagttttacgtagagaagaggttaaggtagaaaatatgaatttgaggtaaaaagaaatgaggtatttgtttgttttattaagttttttaattaaattaattttgaagtttgttttatttttggatttttagtgatgttattcggtaaagtttatttgttttaggacgtaagagttgggttttttgtgatttggaattaaaattattttaatttataaaatgagtaattttaatattatttatgagaaatattttattggtatatgtttttttttagcgtttttgaaaattaaattaggtgggtgaaaagtatatttttgtatgaaatttttttattttagaaaatattttgttattttgataataatggttaatgttattatatttaaatttttgtttttttttttttttgagatagagtttcgttttgtcgtttaggtgtgatggcgcgatttcggtttattgtaatttttgtttttttggtttaagcgatttttttgttttagtttttttgagtagttgggattataggtatgcgttattatatttggttaatttttgtatttttattgtagacggggttttattattttggttaggttggtttcgaattttcgatttttagtgatttttttgtttattttaaaaagtaatttgataaatttataggttcggtatattttaaaaatttttttaaatatagtatatttttttttttttttttagaattaattatgaatcgtatatatagttagaggtttttaattcgagaacggataaaggggtttgtttgtgtaatataattatttttaatggttaaataaattaatatataagattagttttatttaatataataataacgaattaaagtttataatagataagaaaagtattagttgttttcgttatttcggagcgatttttaaggggacgcgggagagcgtcgcgggggacgcggaagtttgacgttataggaattgggggcggggcggggaggttcgtatattttattgcgtatgttttcgttttttcggtcgcggtttggcgtagtgcgtacgcgcgcgggtgggcgggtttgattggtcgtagagtttgcgtagttggtgaatggcgttggtggcgggaaagttgagttttttttgcgtcgagttttcggggcgatgtgtagtgttttttatagggttgagtttgggatcgaggtgagagtcgtcgggttgggagtgagggagatgggaataaggtcgtcggtgggcgaggggagtcgagggaattcgggggattgggaggtttggggcggcgcggtttggtcgggttgggatcggtttttcggtttagacgttcgcgatgttggtattttttgttattttttatttgggttttaggggttcgtttttgggtagtttggagtttttcgaggtgggaggatcgggcggaggtggaggaagtttttttttggaagatttgttgtttgtttagatcgatataatatacgaggtttttttttttaagagttatggtttaaaaattttttataaattaattatcgttggaaatgttaagttatgtaagaaaagttagaaaaggggaggggtcgttcgttggagtatttggagtttttttggaataggtggtgtttgcggaggttgttttatttttttgtagtttacgtgtttttgtttagggtagttggttttcgttattttttagtattcgtttttagtttaggtagttttagagttatataagtcggtggatgttttttaagaattgaattaagtgtttagtatttattgtgtgttaattacgtgttaagggataggagtaagtaataaaagatataatttttgttattaaagaattagtaagggaggttgttgtaagaattatagtattgtataaaagtttgttgtttattagaggggcgggtattatggaagatgtaggaggagatgattgaagttttaaggattatttgaaatggtttggtaaggagaggatgatatttagagcggagatagtcgggagtatatggattttgaattaagtaagagtatggttaatttagataattgtaagtatttttgtaaaattggaataaagggagtgagggataataggttgggaagtaagcgttgagtagtgggtagggtatgaaggattttttatgtagatgagagaggaagtaattttaaaagagtt

SEQ ID NO: 1910 - DNA, 5360 bp, Artificial Sequence
  chemically treated genomic DNA (Homo sapiens)
gatttttttgagattgtttttttttttatttgtataaaagattttttatattttgtttattgtttagcgtttattttttaatttattgttttttattttttttgttttaattttatagaaatatttgtagttatttaaattagttatgtttttgtttaatttagaatttatgtattttcgattgttttcgttttgaatgttattttttttttgttaaattattttaaatggtttttgaaattttagttatttttttttgtattttttatgatgttcgtttttttaatggataataaatttttgtgtaatattgtaatttttatagtagttttttttattagttttttaatggtagaagttatgttttttgttgtttatttttattttttaatacgtagttgatatatagtaagtgttggatatttggtttaatttttgaggggtatttatcggtttgtgtggttttggagttatttgggttggaaacgaatattagggggtggcgagggttagttgttttaagtagagatacgtgggttatagggaggtgaggtaattttcgtaaatattatttgttttagaaaagttttaaatgttttaacgggcgatttttttttttttttagttttttttgtatagtttgatatttttaacggtagttaatttgtgaggggtttttagattataatttttgggaggagagatttcgtatgttatatcgatttgggtaggtagtaagttttttaaagaaagattttttttattttcgttcggtttttttatttcggaggattttaggttgtttaggggcggatttttggggtttaggtgagaggtggtagagggtgttagtatcgcgggcgtttaggtcgagaggtcggttttagttcggttaggtcgcgtcgttttaagttttttaatttttcgggttttttcggtttttttcgtttatcggcggttttgtttttattttttttatttttaattcggcggtttttatttcggttttagatttagttttatggaaggtattatatatcgtttcgaaggttcggcgtaggagagatttaattttttcgttattaacgttatttattaattgcgtagattttacggttagttaaattcgtttattcgcgcgcgtgcgtattgcgttaggtcgcggtcggggaggcgggagtatgcgtaatagggtgtgcgggttttttcgtttcgtttttagtttttgtgacgttagattttcgcgtttttcgcggcgttttttcgcgtttttttggagatcgtttcggggtggcggggatagttggtgttttttttgtttgttgtaaattttggttcgttattattatattaggtaaagttggttttatgtattaatttgtttaattattaaaaataattgtattgtataagtaggtttttttgttcgttttcgggttaaaagtttttggttgtgtgtgcgatttatggttaattttggaaaaaaagagaaaagtatattgtatttaaaagaatttttaaaatatatcgagtttgtggatttattaagttgttttttgaggtaggtaggaggattattggaagtcgggagttcgagattagtttggttaaaatggtgaaatttcgtttatagtaaaaatataaaaattagttaggtgtggtggcgtatgtttgtaattttagttatttagggaggttgaggtaggagaatcgtttgaattagggaggtagaggttgtagtgagtcgagatcgcgttattatatttgagcggtagagcgagattttgttttaaaaaaaaaaaaagataaaaatttggatatagtagtattggttattattattaagatgataaaatgttttttggaatgaaaaagttttatgtaaagatatattttttatttatttagtttagtttttaaaaacgttaggaaagagtatatattaatgaagtattttttatgggtaatattaaagttgtttattttgtaaattggaatggttttggttttaagttatagaaaatttaatttttacgttttgaaataaatgggttttatcgggtgatattattagaagtttaaaggtaagataggttttaaggttagtttaattgagaggtttgatgaggtaaataagtattttatttttttttattttagatttatgttttttattttggttttttttttacgtagggttgcgggttcgtatttgaaatattaataattattaggaatgaggttggtttggttagtttaggtttgaatcgtgtgttttatttatttttttttttttttttttttttttttttttggagacggagttttattgtattttcgtttaggttggagtgtagtggtattatttcggtttattgtaatttttgtttttcgggtttaagtgatttttttgttttagttttttaagtatttgggattataggtacgtgttattacgttaggttaatttttgtatttttagtagagatggggttttattatattggttaggttgatttcgaatttttgattttgtgatttgtttgtttcggttttttaaagtgttgggattataggcgtgagttatcgcgtttggttttgtgtgttttatttttattcggagtagagatatatttttttaaagtatataggttttgtggaaaggtgtggagaatagtaaatgataataataataataaattgtgaattattaataagaggagtgggagtggatgtttgggaggttatttttatcgttttttttttttttttttttttttttttatggtgttgaattatttatatttttattatattttttgtaatgaggatatgtgtatattaaattatatgtgtaggttaattttttcgtttaattttatatatttttatataaagtaaatatttttttatatagtaaattaatatttgagaaaggagattttataattaaatagttgttttaggttaaattagttttttagtttttatattgtttttaatgaagaagatatgttagttgaattagtttagtttattaagtgtatatttgttcgtgtgagtgtaatatggttttgaaattattttagttttaatgtttcggaaatattatttttcgtttaaaaggatatttgaagcgtttttataaattgttggtaggtatgaaaatatacggtttttttggaaaggaatttggtaatatttttttttttttttttttaattaatagagatggggtttcgttatgttgtttaggttggtttataatttttgggtttaagtgatttttttgttttttaaagtgttgggattataggtatgagttattgtatttggtcgattttggtattatttaataaaatgacgtatttattaatttttttatttagtaattttatttttaagaatttagtttgaagttatatttttaatattgtaaaaacgtgtatgtaaaaaaagtatattgtagtatggtttgtaattgtaaaattttggaaatggtttaaatgtttatatataggagagtggttgaaaataatacggtattgttataaaatggagtattatgtagttgtaataaagaatggttaagatttttatgtatttgtaaggaatgatttttaggatatagtgttaagtgaaaaaggtaaagaggaaggggtgtttatagtttgttagtttttttgtaataagggaggggaaagaaaaagatatatatgtttttgtttatttgggtaaaaagaaatataggaagaatatatgagaagtaaagaggattttttatttacggagggtagataaaaataggttggaaaaaatggaggatgaaaatagggtaaaagagatggggtgagggatatttttttatgtgtaattttttttgatagttttaatttttttttttttttttttttgagatagagttttgttttgttatttaggttggagtgtaatggtagaattttggtttattgtaatttttgtttttgggtttaagtgatttttatgttttagtttttttagtagttgggattataggtatttgttattacgtttggttaattgtatttttggtagagatggggttttattatgttggttaggttggtttggaatttatgattttaggtgatttattaatttcgttatttttaaagtgttaagattataggtatgagttattatgattggttagttttaatttttagaaatatatgatgttttattttttaaaaaagaaattattagtggtttacgtttgtaattttagtattttgggaggttgaggttggtagattatttgaggttaggagtttgagattagtttggtaaatatgataaaattttgtttttattaaaaatatagaaattaatcgggtgtggtggtgtatgattgtaatattagttattcgggaggttgagataggagaattgtttgaatagggaggtggaggttgtagtgagttgagattatgttattgtattttagtttgtataatagagtgagattttgttttaaaaaagaaaaaaataaaataaaagtaagattatgttttttgtaggaatatggacggagttggagattattatttttagtaaaaaaacgtaagaatagaaaattaaatattatatgttgttatttataattgggagttaaatgatgagaatttatgtacgaaaagaaaggaataatatatattgaggtttattttagattggagggtgggaggagggagaggagtagaaaaaataattattgggtattaggtttagtatttgggtgacgaagtaatttttataataaatttttatgatatgagtttatttgtataataaatttgtatacgtatttttgaatttaaaattaaaatgtttaaaaattgttatagtaggtcgggtatagtggtttatgtttatggcgttattatattttagtttggtgatagagtgagattgtttaaaaaaaaaaaaaaaaagaaaaaaagaaaaataaattgttatagtaatagtttggaagaggagattaagagtaattaattgatattaaaattattggataaaagtataattaaagatagattatagtttaaagtatttttttataagatatttgttaattataaagaaaagagtgattttgttatggagaaatttttttttttttaaattgagatagagtttcgttttgtcgtttaggttggagtgtagtggcgcgatgtaatttttatttttcgggtttaagaggtttttttattttagtttttcgagtagttgggataatagtcgtgtaatattacgtttggttaatttttgtatttttagtagtaattaagttttattatattgtttaggttggtttt

SEQ ID NO: 1911 - DNA, 6368 bp, Artificial Sequence
  chemically treated genomic DNA (Homo sapiens)
tgtttcgttttaagtttttttagaatattgtttttggtcgtttttggtttgtaagattatgttttaatataatttataacgtaaaatttagagataaagtttattttattagaatggtttttttgttttttaagtttatttaatgttaggattttttttagttgtttagattttagttaattatttaaatatggtggggggttttggaggggtattttgttattacgttagcgtgggaatgaatttttttttttacgaggggtgttattttgatttaagtgttttaattttatttagtcggaagttatcgcgggattgttatatagtgttttagtagaggttataaagaaaggtagggaaaaatgttaaataatttagttgatattagaagggttttggaagagagaatgaaggaggggaatatagtggtttattataaaatagaatcgtaagattagtgtatgtgtatagtagggagaaagaaattgtgttttggtggaaatttttgttttattttggttatatttttttacgtgttttttacggtttatatagacgtagagtatttttgtgttattaagagttcgttatattataaatataatttttacgtgttaatttaaaagtaaattttaaaaaagatgaaggaggatgattggcggaaagtgtttaaaaagattttttatggtggcgatattggggagaggtgggtagtattggttttaattttttaggatacgtttagtgatcggtgatggtttcgtatattgtagatgttagagatatttttttagagttattcgaatttcgttttgttttcgaggttttgtggtcgtttattttttattaggtttttaattaagttttaatgaatttagttaattagtgttattttgattttttgaatttagttttaacgtttgtttagttttattattgagggaattaaacgaatttgtaatacgtgttaagtatgaaagttatattataaaaatttttttttttttttaattttttttttatcgtggtaaaatttatagaatagaaattggatatatttgttagcgtatagttagtgggattaaatgtattcggggtttttttagttggttaaggggttggtgtgaggtaaaggtattttcgattaggttatagggaattttacgggaggtttagcggatggtttggtttagggattttacgtttacgttttaatgtttgtaggagtggtttgggtaatttttgtcgtgtttgggtttatgggaaacgggtgtaaatttgcggttttttttaaattgtttagtgggcgattgcgatttcgttttcgaggtggagggtggtatagacgaagggaaacggggggtagtttggttcgtagattgggttttggtttttttttcgagtaggaggtggtttcggaatcggttattcgttcgcggtatcgacgtttttttcggttttcgggagggatttttgcggggtcgttagttttagcgttttcgcggatagtacgcgttttttttatcgagtttgcgaggaaggcgtttcgttttttattttttcgggagcgagttttagttttcgggacgtagtttatacgcgttagtttagtacgaatcggtttcgggtagggtcgtatttattttcgggattagttcgcgtttcgtatttcgtttttcggcgttcgttttggataggtgttttttgttttttcgggattttcgtatcgggatatcgcgcgtttttcgtttttttcgcgggcgtaggagtttgaggcggcggttcggggacgcggttaatttgggagagagcgggggcgggggtcggttggggaaggggtcgttcggaggcggaggggtcgtcgcgggagtttggaagttcgcggggtcgggtcggggcggcggggcgggtcggaggcgttggtcggggcgacggttatttatttttttgttcgggatttattgcggtttttttaggtcgaacgggttttcgaaggcgcggtgttcgggtattatgcgtaggtcgttcggggagcgtattagttttttggcgtcgcggcgcgcggatatttcggaggatatgacgtcgttttagtttttcggttagcggtttcgtattcggtttttcgtttagttcggggtatcgttcgtttcgtttcggttcgcgcgcggttgatagcgtcggcgtttaatcgttaagttcgttacggagcgcggattaatcggagtttgaatttcgttttatcgttgttttttttaattcgtgtaagggtatcgtttttgtaattttgaggtcgattattaatcggcggcgagggttggttcgggtacgtttcgttttttttagggagattgagattttggattggttagttagttagttacgttagcgtcgtttcgtttttgattggtgtagtttatttagggtgttaggcgtttattggaggagaaggtcgagaggagtaggacggcgggaagaggagtgcggaattcgcgggaggtgaggttcgtcgagtcgggttgcgagtcgggttgcgagtcgggcggtagcggggtcggaggtcgtgggcggtagcgggcgtgaggggtgaggtagggttaaggggcgggggcggtcgcgggtttttattgttcgagtttgtgggagtaggcgggtttggggttgtagtatttatttcgggagtttcgtcgtagttcgggtagcgtttaggtatttcgtcggggtcgggtcgcgtgcgttcggagcggggaaggcggttttcggggttttcggtgcgcgcggggaggcgttcgtttaggggaggtcgaggtgggttcggcgttgcgttttcggttttcgatgttttcgttcgttcgtttgggatcgcgttggtttcgtatcgaagtgggagaggtttgaatagttattttaatattttgatttggaaagaaaattttttaggtcgggcgcggtggtttacgtttgtaattcgagtattttgggaggtcgaggcgggcggattacgaggttaggagtttaagattagtttggttaatatggtgaaatttcgtttttattaaaaatataaaaattagttgggtgtggtggtacgtgtttgtaattttagttgtttgggaggttgaggtaggagaattgtttgaattaggattcgggaggcggaggttgtagtgagtcgagattatattattgtattttagtttgggttatagaaaaagattttattttagaaagtatataaaaaaaagaagaaaatgtttgtttattttgtttttaattttttattataaggcgtgaatttttattgttttttttgagatagtttggttttgttattcggggtggagtgtagtggcgtttttatagttaggtataatttcgattttttaggtttttaagtagttgggatcgtaagcgttattatattggttagttatttttttttttttttttttttttcggtagagagtaggttttgttgtgttgtttaggttggttttgaatttttgggtttaggcgattttggtcgttttggttttttacggtgttgggatgataggtattagtagtgttgaagtttgtgaggtggggtttttgtggttgattttgtttttttttggggttattggtagtgtaggggtttttgtgtgtggaggaaataaggagatgattaaagtatgattttacgaattatacggtttattgttaaagaagatttgttttcgggtttatagtgtttagaggggaggagaggggaggaggtgaagatatttggtagggaagtagggtttttatggatggggtgtatttacggtagggaggtgagtggtagaacggttagggttcggttgttttgttgggatggagcgggtttttggagagtgagatttggtgagagttcgaggtttgttttggtagtagtggagagcgtgagagcgggagttttttgagaagttgggatcgaggtttagtttttaggttagtagcgtatagtttgttttaaagtatttgtataatttttaagttgatgtttgtttttgtagtttagtagttagggttagtaatttatataagggagtgtttgataaggtttaagtggtatttttaaggttgcggagtttatttaagtttttatatatgtggtttgataagatattatatttttgtaggggggttaggttattttaaaatattagattatgtaagtgttgtgaattattttaaagttatatagtaggttttagggtttaaggtagaggagtgagtttatttcggaaggtttagagtagttttaggtagtaattacggtatttttagagtttggtgtgtgagtttaatagttttggtgtgatcgttcgtatttatttagtagtacgtgatattagttttttttttgaagttattgtttagttcgggtgttgtaggaagatatataggtttgttttgggttagttttttgtttgttgtgggttgttttttgtgtgtggtttttatttcggtgtagagagatgggttggttatatttttgttttttatagcggcgagaggatagaggtatgtgtcgggttgtttgtggagtttttaggttagtgtttgggatgcggtaggtgtttggtgttaaagggaaaatattttaggatatttgtgaaagtacgttaggtagagattaggtttttatttagaatttttgagagatgtgggaattattatattgcggttttgtagtgggagagaggttgggtttagttttgaataggttatgggttggtggcggtttatagttttagagttgggtaggggtagaggatggaaggttgttaagaggaatttttaggggcgaaggggatgtaggtttaattgatttgttagattaggtcgttcgggggatagtggaagatgaggcgtttaattagttgttaagggtgatgggatacgggaggaggtcgtcgttaaatagattttgagttaggtttgttaaattaagtttttagtaggatgtgtatagagggtttaggaggagttttaggagtcggattgtcgttggttaatcggtgagtttgttattcgttagtggatattttgtttttaggtgttttggtttcggttcgcgttttgaaggcgggagacgttgtagttacgtgttggttttttcggtgtttttgttagcgtttcgttgtttgatatagtttaagttttgtatttagatttagtttgggatagtagtttttcgatagtttttaggtttagtttgtttgtgatagttacgtttgtttagggaattattttttcgtgtagatttgggttgtgttttgggtggtatttcgggtgtggggttttttattaggtgcgaggtttatattttttaggttgttttttgtttttagggtttggagagttttatgttttgaaaatgattttttttcgagtcgggtaaggtcgtattttttttggtagtgtagtgttttttttggaggtggtatttttttttgatttgttttttgtgtttgggaattttatttttttattttggttagttttgttagtagtttggagttggtttagcgttttatcgttttgttttggtttgcgttcggttttttagggtggtttttcgttagtttttgttaggtttgtttgggtaattaggtttgggtatttttttgttttttgtttagaaaatttataggttgtgggggttcgggagttaagtttggtgcgcgggtaggaaacgtattttggagtattagtttttttgttttgttcgttttacggggtgtttgggggcgtgttttagtttgttgtttttgtagtttgttttttacgtcgggtttgtttttttgagtaggttgaatatgggtatacgagtgattagcgtgatcgtgtttaggttagtgtcgtattttgtgtggtttaagggaaaattttttttaagtttacggttcgtttttttttttgttgggttacggttaagggcgttaggttttattggaggatatggattttggattcggttttcgaggttgttgttttttagtttttttatgttttggatatttttggttttattatttgggaggtcgataggggatgtagagtggtttgttggaaaggttttatgtgattttaggttgagtttttgagtagtttgttgaggtcggaggggagaagagttgagttttttttttgttgggttaggttcgggttgtggaatggttgttagttttttttttgggagaggttgggtggggtttatagtatttttttttcgttttataggaagttgttttttgttgttggttgttgggggcgattgatgtttggatttttgagtattttgttaattttagatttatttttttattttttttaga

SEQ ID NO: 1912 - DNA, 6368 bp, Artificial Sequence
  chemically treated genomic DNA (Homo sapiens)
tttggaaagagtgggaaggtgagtttgggattggtagggtgtttagggatttaaatattagtcgtttttagtagttaatagtagaagatagttttttgtgggacgggaggaaggtgttgtggattttatttagttttttttaggaagggagttggtagttattttatagttcgagtttggtttagtaagggagaagtttagtttttttttttttcggttttagtaggttgtttagggatttagtttggggttatataaggtttttttaataggttattttgtattttttgtcggttttttaaatggtgagattaagagtgtttaggatatggggaaattggaaggtagtagtttcgagggtcgggtttaggatttatgttttttagtgaggtttggcgtttttggtcgtaatttagtagaggaaagggcgggtcgtggatttggagaaggtttttttttggattatatagaatgcggtattggtttggatacgattacgttggttattcgtatgtttatgtttagtttgtttagggagataggttcggcgtggagaatagattataggagtagtaggttgaggtacgtttttaggtatttcgtgaggcgggtagggtagggaagttggtgttttaggatgcgttttttgttcgcgtattaggtttggttttcgggtttttatagtttgtgggttttttgagtaagggatagggaggtgtttaggtttggttgtttaggtaggtttgataggaattggcgagaagttattttggagggtcgggcgtaggttaaggtagggcggtggggcgttgaattagttttaaattgttggtagagttggttagagtgaggaagtgaggtttttaagtatagaaggtaaattaaaaaggaatgttatttttagggaagatattatattgttaaaggagatgcggttttgttcggttcgaaaagaggttatttttagaatatgggattttttaagttttgaggataggaggtagtttggggagtatgaatttcgtatttggtaggggattttatattcgaggtattatttaaaatatagtttagatttgtacggagggatggttttttgagtaggcgtgattgttatagataggttgggtttgggggttgtcgggaggttgttgttttaggttgggtttggatataaaatttggattgtgttaagtagcgggacgttggtaggagtatcgggaaggttagtacgtggttgtaacgtttttcgtttttaggacgcgggtcgaggttaaggtatttggaagtagagtgtttattgacggataatagatttatcggttggttaacggtagttcggtttttgaggttttttttgggttttttgtgtatattttgttgagaatttggtttaataggtttggtttaaagtttgtttagcgacgattttttttcgtgttttattatttttgatagttgattaggcgttttattttttattgtttttcgggcggtttgatttggtaggttagttgaatttgtatttttttcgtttttgggggttttttttagtaattttttattttttgtttttgtttagttttggagttgtaagtcgttattagtttatggtttgtttagagttgagtttagttttttttttattgtaagatcgtagtgtggtggtttttatattttttaaaggttttgaatgaaagtttggtttttgtttaacgtgtttttatagatattttggaatattttttttttaatattaagtatttgtcgtattttagatattggtttgggagttttatagatagttcggtatatgtttttgttttttcgtcgttgtgaggggtaggggtgtgattagtttatttttttatatcggggtgaaggttatatatagggagtagtttatagtaggtaaggggttggtttaagatagatttgtatgtttttttgtagtattcgagttgagtaatgattttagggggagagttgatgttacgtgttgttaggtgagtacggacggttatattagagttgttaggtttatatattagattttggaaatgtcgtggttattgtttggagttgttttgagtttttcgaggtggatttatttttttgttttgggttttgggatttgttgtgtagttttgaagtgatttatagtatttatatagtttgatgttttggggtgatttgatttttttgtaagagtgtgatgttttattagattatatatgtgaggatttgagtgaatttcgtaattttgggaatgttatttaaattttgttagatatttttttatgtgagttattgattttgattgttggattgtaaaaatagatattagtttgaaggttgtgtagatgttttgaggtaagttatacgttgttggtttgggagttggatttcggttttagttttttagagagttttcgtttttacgttttttattgttattaaggtaaatttcgaatttttattagattttattttttaggggttcgttttattttagtagagtaatcggattttggtcgttttgttatttatttttttgtcgtgaatgtattttatttatggaggttttgtttttttgttaggtgtttttatttttttttttttttttttttttgagtattgtgaattcgagaataaattttttttgataataaatcgtgtgattcgtggaattatattttgattatttttttattttttttatatataaggatttttgtattgttaatggttttaggagagggtagagttagttatagggattttattttataggttttaatattgttgatgtttgttattttagtatcgtgggaggttaaggcggttaaggtcgtttgagtttaggagtttaagattagtttgggtaatatagtaagatttattttttatcgaaaaaaaaaaaaaaaaagaaaaatagttggttagtgtagtggcgtttgcggttttagttatttgagagtttgggaggtcgaggttgtgtttagttgtgaagacgttattgtattttatttcggatgatagagttagattgttttaaaaaaaataataaaaatttacgttttgtaataaggaattaaaggtaggatgaataaatattttttttttttttttgtgtgttttttgagatggagtttttttttgtagtttaggttggagtgtagtaatgtgatttcggtttattgtaattttcgtttttcgggttttggtttaaataatttttttgttttagttttttaagtagttgggattataggtacgtgttattatatttagttaatttttgtatttttagtagagacggggttttattatgttggttaggttggttttgaatttttgatttcgtgattcgttcgtttcggttttttaaagtgttcggattataggcgtgagttatcgcgttcggtttaaaggattttttttttaaattaaagtattaaaataattgtttagattttttttatttcgatgcgaagttagcgcggttttaggcggacgagcgaaggtatcgaaggtcgggggcgtagcgtcgggtttatttcggttttttttgagcggacgttttttcgcgcgtatcgggggtttcggagatcgtttttttcgtttcgaacgtacgcggttcggtttcggcgaggtgtttgaacgttattcgagttgcggcggggttttcggggtgagtgttgtagttttaggttcgtttgtttttataggttcgggtaatggagattcgcggtcgttttcgttttttgattttgttttattttttacgttcgttgtcgtttacgattttcgatttcgttgtcgttcggttcgtagttcggttcgtagttcggttcggcgggttttatttttcgcgggtttcgtattttttttttcgtcgttttgtttttttcggtttttttttttaataggcgtttagtattttgagtgggttatattaattagagacgaagcggcgttaacgtgattgattaattaattaatttaaagttttaatttttttgagaggggcggagcgtattcgggttagttttcgtcgtcgattggtgatcgattttagggttgtaggggcggtgtttttatacggattggagagggtagcgatggggcggagtttaagtttcgattagttcgcgtttcgtggcgggtttggcgattggacgtcggcgttgttagtcgcgcgcggatcggggcggggcgggcggtgtttcgggttgggcgaggggtcgggtgcggggtcgttggtcgagaggttgaggcggcgttatgtttttcgaggtgttcgcgcgtcgcgacgttaagaagttggtgcgtttttcgagcggtttgcgtatggtgttcgaatatcgcgttttcggaagttcgttcggtttggaggagtcgtagtgggtttcggataaggaggtgggtggtcgtcgtttcggttagcgttttcgattcgtttcgtcgtttcggttcggtttcgcgggtttttaggttttcgcgacgattttttcgttttcgggcggttttttttttagtcggttttcgttttcgtttttttttaggttggtcgcgttttcgggtcgtcgttttaggtttttacgttcgcggggagggcgggaggcgcgcggtgtttcggtgcgggggtttcgggagggtaggaggtatttgtttagggcgggcgtcgggaggcggggtgcggggcgcgggttggtttcgggggtgggtgcggttttgttcgaggtcggttcgtgttgggttagcgcgtgtggattgcgtttcgagagttggggttcgttttcgagaaagtggaaggcggagcgtttttttcgtaggttcggtggggagggcgcgtgttgttcgcggaagcgttggagttggcggtttcgtaggggtttttttcgggaatcgggggaggcgtcggtgtcgcgggcgggtggtcggtttcgaagttattttttgttcggaaggagggttaggatttagtttgcgggttaggttgtttttcgttttttttcgtttatattattttttatttcggaagcgaggtcgtagtcgtttattggatagtttgaaggagatcgtagatttgtattcgttttttatgggtttagatacggtaggagttgtttaggttatttttgtagatattggggcgtgggcgtggggtttttgagttaggttattcgttgggtttttcgtggggttttttgtgatttgatcggaggtgtttttgttttatattagttttttggttaattgggaaggtttcgagtgtatttaattttattggttgtgcgttaataggtgtgtttagtttttgttttgtggattttattacgataaaaaaaaaattgggggagaaaaagaatttttgtaatatgatttttatatttaatacgtgttatagattcgtttaatttttttagtgatagaattaagtagacgttggaattaggtttaagaagttaaagtagtattaattgattgggtttattgaagtttggttggaggtttggtggggggtgagcggttatagagtttcggggataggacggaattcgagtgattttggggaagtgtttttggtatttatagtgtacggagttattatcggttattgagcgtgttttggagagttgagattagtgttgtttatttttttttagtatcgttattatgaggagtttttttagatatttttcgttaattatttttttttattttttttaaaatttatttttaagttgatacgtgaaaattgtatttatggtgtaacgaatttttaatagtatagaaatattttacgtttgtatgaatcgtaaggagtacgtgagaaagtgtggttaagatgaggtagaggtttttattaaagtataatttttttttttttgttgtatatatgtattgattttacggttttgttttatagtgaattattgtgttttttttttttatttttttttttagagtttttttggtattagttgaattgtttagtatttttttttgtttttttttgtggtttttgttgaggtattgtgtggtagtttcgcggtgattttcgattgagtggagttgaaatatttgagttaaggtggtatttttcgtggaagagaagatttatttttacgttggcgtggtggtaggatatttttttagagttttttattatgtttggatgattaattgggatttgagtagttgagggaggttttagtattgggtgggtttgggggatagagaaattattttaataagatggattttgtttttgagttttgcgttgtgaattgtattggagtatggttttataggttagaaacgattaaagatagtgttttggaggaatttagaacggggta

SEQ ID NO: 1913 - DNA, 5898 bp, Artificial Sequence
  chemically treated genomic DNA (Homo sapiens)
atatatgtgaatattttatatatttagggattatatatattgagttataaaggttttgtatacggttatagttgtagagttatagatgttgatatagttttaaatgtgtgtgtcgggtgtggtggtacgtgtttttagttttaattatttgggaggttgaagtggaaggatcgatttagtttgggaggtcgaggttgtattttagtttgggtaatagagcgagattttgttttaaagtaatatatatatataaagttgtgtgtgtatatagttttagttataggggagggtagttatttttttatttaggtatttgcgcggagttatatatatttagttattgtagattttatagtggtttagagttacgtatagatatgtaggtggggatgaaaattttatgtttttaagaatgtcgttttagagataaattgtagtatagttataatagagtatttattttatatttagagatggttaaagtatatacggtatagtcgattatataggcggttttatatattgatttatatagttaagttatgcgggattgtatgtatatagtttttttataggaaattgggtatattcgtgttttttacgtttttttattgtatatttaggtatataggttttcgtagttttagatgttaaggcgtatatttttgtattcgtaagtatatatattgtttatataatcgggtatatatgacggttagtttaggttcgtcgtttacgtagtcgtaggttagggtatatacggttagcgtcgtttttggttacgttcgtttaggtttaggtaatcgcgttaggcgtatatacggcgcgagtatacgtgtcgcgggtatacgatttttagttcgttcgcgtattcggttagtttttatattttcgcgtttttcgttttcgtttgtttttttggaaattttgttttttttttttttttttttaggtcggaagtgttggttgtatttttagtttttttggttttcgttttttttttttttttttcgttcgtttaggattggttttagcgtttcgcggggggatttcggttatttttttttttatcgttattttagaggggattttcggtcgtcgttggggtcgcggattttttcgttggttacgtagggagtagggaggagttttgttatgaatttttttttggtttgggacgttcgagatttgaggggagggttgagggtttggttttttggatttgatcgaggataggttgggggtttttcgggtttgagggaggaggagttaggggtttgaatcgttggatttgagggaggaggagatgggggtttggatttttgggtttgagggaggaggggttggggtttcgggggatttgaggatttgagggaggaggggttggaggtttggatttttgggtttgagggagggggggttgggagtttttcgggtttgaaggaggaggagttaggggtttggatttttggatttgagggaggaggagttgggggtttggatttttggtttcgagggaggaggggttgggggtttggatttttggattcgagggaggggggtgttgggggtttggagttttgggtttgagggaggaggggttggggatttagggttttgggttattgcgagggaggagggattgaggttttggtttttgggttttttaggtttgtgggtttggggaggtggaggattagtttttttgcgagtaaagtattttttttttttgagagtggttttattttaaaagttttgatttttggggtcgatgatttagtagatgggagagaggagggggatagtttgatttagggatgggaaatgttttcggtttttagggagtagaaattggaattttttttttaggattgatcgtagttcgagttgagtcgggtttcgcgaatttaaggatgtttttaattttttttttttcgttttaattttttaagttgcgtaaggatttggagatcggtttagaggcgggttttaggttttttttttttttttttttttttcgttgtttttaaggttttgtttataggagacgggagttttggttataggagaggaattcgagtgttcgggttgaattttttcgttacggtttttaggaagtttttattttttcgttttttgcgagtgagttacgggcgagtaggaggttataatcgtgttagagtcgttcgcggttcgtttagtttacgagatcggttcgggaaggttttttagtaagcgtcgtattagggattttttttcgtcgttttcggacgaagtaggtcgacgtggagtttggtagaatttttttattttaatataagttcgtagtttgtaagaatgaattttttattattataattgcgtattgtggtaatgatttttatttttatatttttatttagggtatttagttttttagtattttttagaaaatagtttttttagattttaagagggtttttatttagggcgattttttgataataaaagatgtgttagtgtggggaatgatttttgaaaatgtagtttgggcggggtgcggtggtttatatttgtaattttagtattttaagaggtcgaggtaggtggattatttgaggttaggagttcgtgattagtttgattaatatggtgaaattttcgtttttattaaaaatataaaaattagttgggcgtggtggtcggcgtttgtaattttagttattcgggaggttgaggtaggagaattacgtgaattcgggaggtagaggttgtagtgagttgagatcgcgttattgtattttagtttgggtaataaaaacgaaattttattttaaaaaagaaaaaaaaaaggaggttcggtcggtttggtggtttatatttgtaattttattattttgggaggtcgaggcgggttgattacggaggttaggagatcgagattattttggttaatacggtgaaatttcgtttttattaaaaatataaaaaattagttaggcgtggtggtgggtgtttgtagttttagttgttcgggaggttgaggtaggagaatgcgtgaattcgggaggtggagtttgtagtgagtcgatatcgcgttattgtattttagtttgggcgaaagagcgcgatttcgttttaaaaaaaaaaaaggaaaatgtagtttgaaggtatattttattataagagatttatttagttattaattgaggatgattttttttttttttttgaaagttttttttaattaatgtaattattagttatagtgaaagatttttattttgttaattttgagtttttttagagggtaaatttcgatataattttagattttagtatgaggtttgtgttatttgttagttcgaattaggagagtaattttatttttttttttgagagggagtttcgttttgtggtttaggttggagtgtagtcgtttgatttcggtttattgtaatttttgttttttgggtttaagcgatttttttattttagtttgtttttttttcgttttcgagtagcgggattatagggtgtgcgttattatatttagttaatttttgtatttttgtagaaatggggattcgtcgtgttgtttaggttagttttagatttcgagttttagtgattcgtttgttttgggcgtttaaagtgttaggattataggtgtgagtcgggtaggagagtaattttattttggtttttttttgttttaaatgggtatattatttggtattaggattaatgtgcgtaaagtatttagaatttagtttaggtgagttttttttaatttagtttagaagagattattcgttcgagggtgagggggttagagtcgttttgtgaattgggaaaggaggtttttttttagttttgttaggtattttggattttatttaatttatttatttatttatttaattttagtaagtggggagagggagagtagtttaggtttttttatttgtttgggttgtttaggagtgagattatataaggtaggtagtttttagagaatttttttttaaggtttgttggtttttttttggtattttgttttgtagattttttttcgtaagtgtttattttttatagttttttttttttttgtttagtttttttttttttttaatttttttaaatagtattttttgtagatatgggattttattgttgtttaggttgattttgaatttttgattttaggtaatttatttgttttattttttgaaagtattgggattggtcgggtttggtggtttatatttgtaattttagttttttgggaggcggaggtgggaggatcgtttgagtttcggagttggagattagtttgggtaatatagggaaatttcgttttttaaaaaaaaaaaaagaagaagaaaaaggaaagaaaaatataaaaagtgttgggattataggtgtgagttattgcgtttagtttttttttgtttttttttgtgatttttttaatttttttttttttttgaatttgtttttgggattgtttttgttttttcgtttttttttttttttttattttgtttatttttttttgtatgttttttggtgtgtgtgtttttttcgatgtttttttttttgtttgtttgtttgtttgtatttttttgcgttttttttcgtttttattcgtttgtgtcgtacgcgtatttttatcgggtttttgtttttgttaattgtttttggggttttgtttttattttcgttttagtttttttttataagttttagtttttagttttgaaaattgggtaggcgtttttttattcgtatttttattttttttttacgtatttttcgttcggtcgcggttgtttatcggttaagtttaggcgcgttttggtttagggtcgggcggaagggaattagtttagggttagttaggttgcgtcgggggcgcgcgttcgggaagcgttttttttgtttcgttttcggtttcggtttcggtttcgtttcgtgtttgtagttttttataagtagtcggttttcggtgttagttttagtttgattttagcgtttttattttcggtcgatattttttatggttaatcgttatattatggatttgattgttatttacgaggtgagttttcgtcgtacggtattttcggtatttgtatgtttgagttcgagtttttatttttttagcgtcgtaaattttagttcgggacgtttgttttttttttttaattggggttttttagcgtcgcgttttttagtttggggtttttgtttttcgtttagattagtttggtgatttggaggtgaaaatggaattcgcgatattcggtttttcgtttaaatatgggtggggcggtttatgtaagtggaaagtcggagaattttttttagatcgaggttgtttggaggcggaagtggtttttatatttggtttatttttagtcgttgttgagggcgtggttttgcgcggaggcgtttttggggttgaagttttagggtggggggattcgatttttgtttttttagtttttgatcgtagagatagagaattttaaaatcgaagtaattcggatttttaggttaattttgttcggtttttttagttgtgaaattggagatttcgacgcgtgggttatattcggggaggataagagatttaaaattgggaaatagtggtgcgttttgatttcggggttttttttttggtttagtcggggaagtcgggatttttgggtttttcgggataaggtttcggtggtgggtaaatttagaatttttaattttgggtttttggtattcggaatttaggggtttttgcgggcgggtggggtttaggcggggagtttataaatcggtttggtaagttttagttttttgtagttggggtggggcgtcgttttgtatttttaggtgttttaatcgatttattttcgtaga

SEQ ID NO: 1914 - DNA, 5898 bp, Artificial Sequence
  chemically treated genomic DNA (Homo sapiens)
tttgcggaaatgggtcggttaaggtatttgaaaatgtagggcgacgttttattttagttgtagggaattagagtttgttaggtcggtttgtgggtttttcgtttgagttttattcgttcgtagaaatttttgggtttcggatgttaggaatttagagttggaggttttgagtttatttattatcgaggttttatttcgagggatttaggaatttcggttttttcggttggattaagagggggatttcgaagttagggcgtattattgttttttaattttgggttttttgtttttttcggatatgatttacgcgtcgggatttttagttttataattggagaaatcgggtaaagttgatttggaagttcggattgtttcggttttagggttttttgtttttacggttagggattggagagatagaagtcggatttttttattttgagattttagttttagagacgttttcgcgtaaaattacgtttttagtaacgattaggggtgagttaggtatgggggttattttcgtttttaggtagtttcggtttgagaaaagtttttcgattttttatttgtatgggtcgttttatttatgtttgagcgaagagtcgggtgtcgcgggttttatttttatttttaaattattaagttggtttgagcgggaggtaggggttttaggttggagggcgcggcgttagggagttttagttggagaagggaggtaagcgtttcgggttggagtttgcggcgttagagaggtggggattcggatttaggtatgtaggtatcggggatgtcgtgcggcggggatttatttcgtagatggtagttagatttatggtgtaacggttggttatgaggggtgtcggtcgagagtgggagcgttgaagttaggttgaggttggtatcgagagtcggttatttataggaaattgtaagtacggggcggggtcggggtcggggtcgggggcggggtaggaggggcgtttttcggacgcgcgttttcggcgtagtttggttggttttggattggttttttttcgttcggttttgggttaggacgcgtttgagtttggtcggtggatagtcgcgatcgagcggggaatgcgtggggaaggggtgggggtgcggatggggggacgtttgtttagtttttaaagttggagattgaggtttgtagaaggaaattggggcggaggtgggggtagggttttaggggtaattgataagagtagaagttcgatgggggtgcgcgtgcgatatagacggatgggggcggggagagacgtagaggggtatagataggtagataggtagagagaaaaatatcgagagagatatatatattaagagatatatagagagagatagatagggtgaggaagggagggaagacggggagatagagatagttttagagatagatttagagggagaagagggttgggaggattataaaaagaaatagaaaggggttgagcgtagtggtttatatttgtgattttagtattttttgtgttttttttttttttttttttttttttttttttttttgaaagacggggtttttttatgttgtttaggttaatttttagtttcggggtttaagcgatttttttattttcgttttttaaagagttggaattataggtgtgagttattaagttcggttaattttagtatttttagaggatgaggtaggtggattatttgagattaggagtttaagattagtttgggtaatagtgagattttatgtttataaaaaatattatttaaaaaaattaaaaagaaaaagaaattggataaaaaggagaaagattgtgagaaataagtatttacggaaagaaatttgtagagtaaagtgttaagaaagagttagtaggttttggaggggaattttttgagaattgtttgttttgtgtggttttatttttaaatagtttagatagataaggagatttggattgttttttttttttttatttgttggggttgggtgggtgagtgagtgggttgggtggggtttaggatatttggtaaggttgaaaaggggtttttttttttaatttatagggcggttttagtttttttattttcgggcggatgattttttttaggttgagttaaggagaatttatttgggttgagttttaagtattttacgtatattaattttaatgttaggtggtatgtttatttaaggtaggaggaaattaaagtgaagttatttttttgttcggtttatatttgtagttttagtattttgggcgtttaaggtaggcggattattagagttcggagtttgagattagtttgggtaatacggcgaatttttatttttataaaaatgtaaaaattagttgagtgtggtggcgtatattttgtggtttcgttattcgggggcggggagggagtaggttggggtgggagagtcgtttgaatttaggaggtagaggttgtaatgagtcgagattaggcgattgtattttagtttgggttatagagcgagatttttttttagggggaaaaataaagttatttttttagttcgagttagtaaatggtataggttttatattagggtttgaaattatgtcgaggtttgttttttgagaaaatttaagattggtaaggtggaggttttttattataattgatggttgtattgattgaaaaaagtttttaaaaaaaaaaaaaaggttatttttagttgatggttggatgggttttttatagtggggtgtgtttttagattatattttttttttttttttttgagacggagtcgcgttttttcgtttaggttggagtgtaatggcgcgatgtcggtttattgtaagttttatttttcgggtttacgtatttttttgttttagtttttcgagtagttgggattataggtatttattattacgtttggttaattttttgtatttttagtagagacggggttttatcgtgttagttagggtggtttcgattttttgattttcgtgattaattcgtttcggttttttaaagtggtgggattataggtgtgagttattaagtcggtcgggttttttttttttttttttttttgagatggagtttcgtttttgttgtttaggttggagtgtaatggcgcggttttagtttattgtagtttttgtttttcgggtttacgtgatttttttgttttagtttttcgagtagttgggattataggcgtcggttattacgtttagttaatttttgtatttttagtagagacgggggttttattatgttagttaggttggttacgaatttttgattttaggtgatttatttgtttcggttttttaaagtgttgggattataggtgtgagttatcgtatttcgtttagattatatttttaaggattattttttatattggtatattttttgttattaaagggtcgttttaagtgaaaatttttttaagatttaggaagattattttttaaggggtgttggagagttggatgttttgagtgaaaatgtgggggtagaaattattgttatagtgcgtagttataatggtggaaagtttatttttgtaggttgcgggtttgtattaaggtggggagattttgttaggttttacgtcgatttgtttcgttcgagagcggcgggggggaatttttggtgcggcgtttgttgaggggttttttcgggtcggtttcgtgagttgggcgggtcgcgggcggttttggtacggttgtggttttttgttcgttcgtgatttattcgtaaggggcgggggagtgggggttttttggaagtcgtgacgaggaggtttagttcggatattcgggttttttttttgtaattagggttttcgttttttgtaaatagagttttgaggataacggggaaaaaggggggaggagggggatttgggattcgtttttaggtcgatttttaaatttttacgtagtttaaaggattgaggcggggaaaggggggttgggggtatttttgggttcgcggagttcggtttagttcgggttgcgattaattttggaggagggattttagtttttattttttggagatcgggagtattttttatttttgagttaggttgtttttttttttttttttatttgttgagttatcggttttaagagttaggatttttgggatagggttatttttaaaggagggggatgttttgttcgtagaaggattggttttttatttttttaaatttatagatttgggggatttaggagttaaggttttagttttttttttttcgtagtaatttagggttttgggtttttagtttttttttttttagatttaggattttaggtttttagtatttttttttttcggatttaggggtttaggtttttagttttttttttttcggaattaggggtttaggtttttagtttttttttttttagatttaggggtttaggtttttaatttttttttttttagattcgggagatttttaatttttttttttttagatttaggggtttaggtttttagtttttttttttttagatttttaggtttttcgagattttagtttttttttttttagatttaggggtttaggtttttattttttttttttttagatttagcggtttaggtttttaatttttttttttttagattcgggagatttttagtttgttttcgattagatttaggagattaggtttttagttttttttttagatttcgggcgttttaggttagaaggaagtttatggtaggatttttttttgttttttacgtagttagcgggaaaattcgcggttttagcggcggtcgggaattttttttggaatgacggtggggaaggggatggtcggggttttttcgcggggcgttggggttagttttgggcgggcggggaaagaaggaaaggggcggaaattagagaggttaaaaatatagttaatattttcggtttagggggaggggaggggagagtagagtttttagaaaaataagcggggacgggaaacgcgggggtgtgagagttggtcgagtgcgcgggcgagttggggatcgtgtattcgcggtacgtgtgttcgcgtcgtgtgtgcgtttggcgcgattgtttgggtttgagcgggcgtggttaagggcggcgttggtcgtgtgtattttggtttgcgattgcgtgggcggcgggtttgggttagtcgttatgtgtattcggttgtgtgaatagtatgtgtgtttgcgggtgtaaaggtgtgcgttttggtatttggggttgcgagagtttgtgtgtttgggtatgtagtgggggaacgtgagggatacgagtgtgtttagttttttgtgagaaggttgtgtgtatataatttcgtatgatttggttgtgtgaattaatgtgtgaaatcgtttgtgtgatcgattgtatcgtgtgtattttggttatttttgggtgtggggtggatgttttgttgtaattgtattgtaatttgtttttgaggcggtatttttaagaatatgagatttttatttttatttgtatatttgtgcgtagttttgagttattgtgggatttgtagtgattaagtgtgtgtaatttcgcgtaggtgtttgggtgagggaatgattgtttttttttgtgattgaggttgtgtgtatatataattttgtgtgtgtgtgttgttttgagatagggtttcgttttgttgtttaggttggagtgtagtttcgattttttaggttgaatcgatttttttattttagttttttaggtagttgggattaaaggtacgtgttattatattcggtatatatatttgaagttgtgttagtatttgtgattttgtagttgtggtcgtgtgtaaggtttttgtggtttagtgtgtgtagtttttgggtgtgtgaagtgtttatatatgt

SEQ ID NO: 1915 - DNA, 12138 bp, Artificial Sequence
  chemically treated genomic DNA (Homo sapiens)
tttttaggtttaagttattttttttttttattttttttgatggttgggattataggggtgtgttattatatttaattaatttttttttttttagtagagaaagagttttattttgtcgtttaagttggtattgaatttttggttttaaacgatttttttgtttttgttattttaagtgtgagttattatgtatagttatatttttttttttttttttttgagatagtttagttttgttgtttaggttggagtatagtgataagattatggtttattgtagttttaattttttgggtttaagtagttttttttttttaaattttagataattgattataggtatttattattatgattggttaatttttgtattgtttgtaaagatggggttttattatgttggttaggttgggtttaaatttttgggtttaagtattttatttgttttagcgttttagagtgttaggattattggggtgagttacggtatttaatttggttaaaaaattaaagtttgtgatgtttattagtttttgggaaataggtatttttatattatttgtgaaagttaataaatttttaagagtttttatcgagattattttagtaatattgttggttgtgatggtttatatttataattttagtattttggaggtagagataggtagttattttgaggttaggagtgaaagattagtttggttaatgtattgagatttttatgtttataaaaaaaaaaaaaaaaaaaaaaaaaaaaaagattatttaggtatgttggtaagtgtttgtagttttagttattttggagattgagatgagaggatcgtttgagcgtgggaggtcgaggcggtagtgagttatggttatattattgtattttattttgggtgatagagtaagattttgttttaaaaaaaaagaatattaaaaaaatttatatatatatatatatatatataaatatatatttatatatatgtttgtagaatggttttttattttatattgttttatttttttttttttggtttattagttattagttgtttttttatttttatattattgtagttaggattgaaggtatgtattattatatttggttaattttgtagttttttatagagatattgttttgttttgttatttaggttggagtgtagtggtgtaattatagtttattgttatggttacgtgattttttaggttttaatgattttttttattttagttttttaagtagttgggattataggtgtattacgacgtttagttaatttttaattttttttgtagagaagggatttaattatttgtttagatttgtttagaatttttggattttagtgatttttttttcgtggttttttaaaatgttgggattataggattaagttattatattaggtttaaattattttttagagtggattttttggattattttgtttatttgttttttaatttagttgatttttaagtttggtttttattataaaggtatgggaaattattgtgaaattatgggaatttattttttattttattaaaattgtgttaatattattattattaagagtatggttttgttttggttgtaggaagaaattggtatttgtaatttaagaaagtttattaacgtaaaggtgtggttatttttatagtgaagtgtaaaagaattttttgtgtttttgttagttttcgtcgtgataaaataggataataattagttaaatgtgttgttgaagaatgattgtttattatagtgaagattggattggtggttagtttttattataggtttaagtatatagtagggatatgtatatgacgtaaaattatatttaatttttttttatttaagattttgagtttgtaggtgttgtgttgaatagagttttagaatgtagtagttcgtggttggttttttatttgtttgagtttttttttttttattgtttgttttagaatgattaaattagaatttagttatttgtggtatagatgtttggttatatatatgagatattagtattatgtttttaggttattgatagtgatatttttttgtatttataaatatttgtaaatattagtagttattgattttgttaatgatagttgattaggtatagttttatttttttaagattttattttttagaaaattttaggatgttgagtgttagggtaaaaatataaagatcgtttgaagaatgatatgttgtttagttaggttgtaaagttgagtaataatagtaaataagttatgtggtagtttgggttaataatgtggaggttattgaatattggagattgttttttggtaagggagtgattaaagtagtgttttaagaagatttatttggttatagattgtaggaatgttttgttagttggtattataagattttttttttataataggttttttagttatttgttttggaagtgttataaaggttattttagaaattatttttatttttagggattagaaaataggaagtttagagtgattggtgataatgggaatataagtagggtaaatataatagagaaattgtggagaagaaattgataagatttgagaaattaattgttagggaaggaggaaaaggttatagtgattgtgttaggaaaaatttgggttttaatttttgaagatgtttagtaaacggtttgatggaaattttaggttttttttagcgtgtggattttggggattatttttacgtaagtcgttattaaaaattgtggaaataaatgagaaagtagtagagaggaaagttgaatgtgaaattttggataagattatagtagttatcggttaagaaggtgagaagagaattaagatattatataaataaagaggtaggagggagttttaaaattaaagaaattgattatttattagattttaatagataggtaaggaagatgaatatttgaaataggaaaattacgttataagttgatttttttttttttttttttgagatggagtttcgttttgtcgtttaggttggagtgtagtggtacgatttcggtttattgcgagtttcgtttttcgggtttatattatttttttgttttagtttttcgagtagttgggattatagatgttcgttatagtgttcggttaattttttgtatttttagtagagatagggttttattgtttgtattgttaagatattaggtggttttgattttttgattttgtgatttatttgttttagttttttaaagttttgggattataggcgtgagttattatgtttggtttataagttgattttttattagaattaatgaaattgttgtttttaggaaaattggaaggttattttaataatttaataaattatatttattttattatttattgttttaattttatgtggttttttttaattatgtagagaagattagtttgtatttataattttataattatatttttttaagaggggaaaaattaatgaagttagagattgtttgggtagagggagtagtgatagtttatttagagtaggtgttttttttttttttttgtggttgataaaatattagtgtagttattatggtttttttatttgaagtagtttgaatgttataaaatatattttttttaaattgagtagatttgttttagagaaatattttggaaatttattggttttttatttgtatattgttttattatatagtttaatatttgaaaattgatatatataagtgattatagtatgtgttaaaaatatagtaagggagttggatatagtggtatgtgttattagttttagttgtttgggaggttgaagtaagaggattatttgagtttaggagttggaggttgtagtgagttatgattatgttattgtattttagtttgggtgatagggtgagattttgtttttgaggggagagaatggggagggtttttaagttatatagaaatttgaggagtgtttataattattaggaattttgagttttttattattttgttaatttattgtagaaagattggagattatgttaaatatagagatgtaatatagttttgtagtaaaaatttatagaatgtgttaaagttgagagttaattatgggtgttagatataataatatttttgtaattttagtattttgtgaggttgaggtgggaggattgtttaagtttaggattttgatattagtttgggtaatatagttagattttgtttatataaaaagatattttaaaaattagttaggtttggtgatatatatttgtagttttaagtagttgggttgaggggtgagtattgtttgagtttgagaagttgaggttgtagtgaattgtgttatttatagtttagtttgtatgatagagttagaggttttgtttataaaaaaaaaaaaaaaaattatgggggttattgatagaaggtaagagggagttatttggtgtgtaagaaatgttttgttattttaatataaataatgtaagtattagttaatatttacgtatttaatataaataatgtaaattttagttaatatttaggtaaaaatttgttatgttaaatatttaagtattgtgaattttatataagatgataattgaattttttaaaaaatttaaataagttagatatggcggtttgtagttttatttatttagtaggttgagggaggaagaattatttgagttttggaatattaagttagtgtgaggaatatagtaagatttaaaatttttaaaaaataaaaaaatagaaatattgttaatttgatttgatttatttgtttttttttgttttgttgtagtttatgtatttttggaaattaatttgttttttttaattttatattgatagtttagtaaaaaataatttgagtattttagaaatgtgaatattatgatattttaatatgtgatataaaaattaatgtttggtatattttattttttggtttaggagttgtgattaatgagaattaaaggttatggatgaagatgaatttgaattgtagttataagagttaaatttattttttgatggaataggtattattatttattgggttgttttattttttatttgttagattttgaattatttattaaaattgtagaatttgatgttaatttatatttaggtatttaggtttatatttaggttttgttagaattttatagttaatttataattttgttagttaagttattaatattaaaattttattgttattttttagttattttagtttttttagttatgtaattaaagtttgttagttttttttttgaaatgttttttgtttgtgttagttttttatttttttattggtatattttagtaaatttattaatttaaaataggataaatttattttagagttttataggttagaaatgtggtttaattgagttttgcgtgtagaattatataaggttaaaattaagatgttggttaggtgtggtggtttatatttgtaattttattgttttggaaggtttaattgtgaggattgtttgagattaggaattggagattatcgtgggtggtggataatttaatggaaatttgtgtttatagaaaaaaaaatttttttttaattagttgagtatggtggtgtatatttttagttttagttgttttggaggttgaggtaggaggattgttttattagaagttaaaggttgtggtgagttataatggtatagttgtattttagtttgggtaatagaataagatagtgttttaaaaaataaataaataaataaataaataaataaataaataaataaataaaataagttatttgtagggttggaggtttttgatttcgaagaatatttatatttttagttaaatttagtttttttttgttgtataatggagatattgttgttttttatagtttattatttagggttattttttgtttttagagtttgtttatatttttttttatgttttgtatggtggttttttgaagtagtagtgagtggagtttattttatgtttttagtttttttgatttttttttttattatattcgtttttttgaatttagttagaaaattatttagtttaagagtttatatgattagatttgatgtattagggtaatttaagataattgtttaattttaagtttataattttaattatatttgaaaaattttttttgttatattaagtaatatatttttaagatttataaggattagtttatggatatttttgtgaaaggattattttttttgttattatttttatttcggtttttaaatatgtttttggtaaatgtaaaataatatttatttttttttaaagtttttagtttaaaaaaaaaaaattttatttgaaattaattagtttagaagttttaagtattatttaaattagatgtttattttttgggtattagttattaagtgtaatttttgggatataatttttttttatttgttttttaaagtatagtggtaggatagtttgggatattttggtttaaatagggtgatatgaaaggtaagagaaatttgtttgaagaaattttgaaatgtagttggataaatttttattaggttttaagatttgggaataattttttttggtttgtggtttcgttttttgagttttttttgttattttttttaaagatagtaggtatttgtagttgaatagttttattttttgttttttgtttttggaattttgttagtttaattgtttttattatattgattttgtgttttttttcgtttaagttagtagtgttttttttgaaaaaaattttgcgtgtgttatggggatttattgtattaggtaagaggttaatatattttttttttgagattattttatgtttgtttttgatttttgttaaaatggttgaagtttaatatttttagattttttagaggtgttgggtatgtgtaagttatatttttatttgtttgaaaaagatttaattttttggttttttgattttttttttttttttttttttatttttttttttttttttttttattttattttattttattttattttattttattttatttttttttattttttgttttttttttttttttttttttttttttttttttattttggttttttttttttttttttttttttttaatttttattttttttgtttaatgatcgggtgtttgaaggaattttttgttttttttgagggtttatggaatagttgagaattatatattgtttttttttttttttttaaattagcgttttttatttttttgagtattagggattggttttatggaagataatttttttagagatttgggagtagtggggttcgggggatagttattagatgaatgaagtgtattatatttattgtgtattttatttgtattattattatgtgtaatatataatgaaataattatatagtttattataatttagaattagtgggagttttgagtttgtttttttgaaattatgttattttatttgggggtaggagatagattattaggtattagatttttataaggaatatgtaatttagattttttacgtgtgtagtttatagtacggtttgtatttttatgagaatgtaatgttgtttttgatttgataggaggcgagagtttaggtagtgatgtcggtgatgggaagtggttgtaaatatagatgaggttttgttttgataaggaatttttttaatttaatttttttttttatttttatttttttttcgtttttaagatggatagaaaatttttgattttgttatgttttgttatttttttgtttaataaatattttaattatttattttttttattgaattttattttaagtattaagtagaaataagattatttgtttaatattttgttgaaattttttgagttaaagagttgatttttataagttgttttttttatataattaagggagataattttgttaagtggtttgtttttaagttgtgttttttatataatttagggagatagttttgttaagtggtttgtttttttatgtaataaagttttttttttttttagatagaaatttatttttaagtttttataagtagtgttataaaattttagatttttattagtagttatatatgacgtaggtattttttgagtttatgtaggatttttttattttgattttttttttttttggatttttattggtagagttgttattggttttttttttttgtttttgagatagggttttattgtgttattagggttgaagggtagtgatatgattatggttttttattgtagttttaattttttgggtttaagtgatttattcgttttagttttttgagtagttggaattataggtatatattattatgtttggggaattttttaaaatagagatgaggttttgttgtattgtttaggttgattttgaatttttgagtttaggttatttttttattttagttttttaaagtgttgcgattataggtatgagttattgtgttcggtttgttatttttaatatttatgtttttatttattggtttatttaaggaaatttaggtttttttttatttaatagaatttaagttttttattttgtaaaaataatttttttttttatttttttaagagttggaatttttttttatttttgtaagaaattttatagttggtatttatttaagtgtaaagttattttacgtttttaggtatttgtataagtagttttttatttttcgatattaaaatttgaaattatttttgttattgtaatgaaaattattataaatttagtagtttaaaataaatttattgttttatagtttttgtaggttagaattttattatggtgtagttagttttataaggtattgttagaggtttgtttttttttggtgaatttagttttattgttttttggatgtatttaatttgaggttatttaggttattggttgaatgtagttcgttgtagttataggattgaagtttttatttatgtgttggttgtgagttaataggttagtttttgttttttttgataaaatttgtgttgttttttatgttttttatgtggttattgtaggtaaggttaattcgattttttttatatataaaatttttttaatttatgattttgttttaattttttaattttagatataaaaagttttttgtttttaagttttatttgagcggattgtgtttaataaattatttttaaagtttatgattttaattttatttgtattgtttatgtggtatataagttataatataatatatttataagttttagtgattagagaataaatattttggggatttggttggtggggtatatggtggggtgtagattgtttggggtgttgagagaagtttgtttatgatatagttttttttttatgttagtttttagggttatataggttttattattttatttttaattgataatattaagattttttttttatttttggttttttttttttatttattttagtggtagaatatttagtttcgaaaaatatgtggattatatttttttattgtttaggaaataaattataaattttaggttttttggaattgattttgttcgaatttttgtaatttttttatatgtttataaaaggagtttttatattatgtagatgtatttttattttatttttaaaattgtaaaaagaaaattatatttaaataagagggggaaaaaagtatttttaattttagattggttatggttttaaatatataatgttataattaaattagattttatttttttgttttatattttaagttaaaattttaatgattgtattaattgaattttaaatgaatattgttatatattagtaatagtaattaattttattaagaaacgtaaggaattttaaatatattttttaaattttgtgtgtgtgcgtatatttgttaagtaatttaggatatttttttgatttatcgttaagtatttttaggttgttaatggtaaatgtagatttataattttttttttttttggaatatagtgaaatataattattttgggaggttatagtaagagggttgtttgtggttaggtttttaatattagtttgtattatttttttagattttttgtttgaaagagagattaagtttttagggaaaatttagtattttttagtgtaattttgttataattaagtttgagttagggttaaatggtagattgaagggttattgtattttagttttgattgttaatatttgaaatggtattttttttaaatttgaggaagttatgtaatttgtttaagtttttatttttatatgtatgataataatgaaatatttgattatattttttttaggatatttattatgtattcgtatttggttattatagttttgtgaggtgcgtatgatagatattattgatattattttattgttgaggaaattgaatttagaggttagatgatttggtttaaggttataaaattattaagtatttatattttgttttttgatttagattattataattagtgttgttgttattaaatgttattaaatttatatttgtgtaatggggattatattgttttattgttgtttattattatgaatatagaagataaatgagtagaaaatattttgtagaagatgtataaaaataaaagtaaatatttttttaatatataagttaagtaggttttaattattttaaagattttttgtaatatttattgttggtttgtttttggtgattatttttgttgaagaagttgtgtgtttatttgagggttttgttataggtatataattatcgagttgtgtatttatttggatttagtttattttgagttataattagaaatattaattagataaatagttttttttttttttttttttttttttttttttttttttaagaaaaattcggtgaggtagtgagagtgtagaaggaaaaagagaaattttaattgtttgtgatacgtgaatagtttttaatagttatttatgtttgtttttttttatgtattagtagttataatgtttgatttgttttatattaggttatatttttgttaaagttgtatgaattttttttttatttgtggtgtttatttagaataatatttattgagtatgatgtgttgtgtaagttgtgtgattttggttaagttatttgattttagtgggttttaattggtttttatttttttatttttattgtttaattgtatttagtattagaaaatgtttttatatattttgaggaattattttgggatttggggttagtgggaataggaggaggatagatggaggtggaatattttggtaaaattagggtaggttttattttaattatttttattttttattatttagtttagtttattttatttatttatagaaatttttaaatttaatgttttttttttttttattttttttttaatttttattttgatttttttgttttagatttaaagaattattttttaattattaaagttatagtggatattgatgggatattgtattaggataaagtgggaagattataagggttgaaagagaaaaaagaaagggtaaaaacgagatatgtaggtataatgaaaaaaaaaaaagtaatgtgttaagaaaggagatgatgaaagaaggaagagaaatgaatgaaatatgtaatgaagaaatagtatatttgttttttgaatttgttgtttaatttatataaaaattttaagattttattttagtggggtgagaaattttttattttgatgttttaaaagtattttataaatagtttttttttgttattgttttaaggttttttttatttttttttttttgttagttgattttatattttttttttatttttgtatttttttttttgttagttgattagggttgagtaaaataaatttttatgttaaaaatttgtttgttaagtgaattaaaagtggatttatttttttatttattgttttaatgtttgaggaatattaaggatatagtttgtttttttagaagaaattaaataaaaattatatttagttatgtatatttatttgagatttgttattttaatttttattttttaagg

SEQ ID NO: 1916 - DNA, 12138 bp, Artificial Sequence
  chemically treated genomic DNA (Homo sapiens)
ttttaaagaataaaaattaaaatgataaattttaggtaagtatatatgattaaatatagtttttatttaattttttttgggaaaatagattatgtttttggtgttttttaaatattgagataataaataagagaatgaatttatttttgatttatttaataaataaatttttaatataaaaatttattttatttaattttaattaattaataagaaaagaaatataaaagtaaaaaagaaatataaaattaattaataagaaaagaaaaataaaaaaaattttggggtaatgatagaaaaaaattatttgtgaaatatttttaaaatattaagataaaaaattttttattttattaaaataaaattttgagatttttatataagttaaataataaatttagaaaataaatatattatttttttattatatgttttatttatttttttttttttttttattatttttttttttaatatattattttttttttttttattatatttatatatttcgtttttattttttttttttttttttttagtttttataatttttttattttgttttggtgtaatattttattaatatttattataattttggtaattagaaagtaattttttgaatttaagataaaagaattagggtagaaattaaaagaggaataaaaagaggaaagatattaggtttagaggtttttatagatagataaaatgggttgggttgggtggtgaagggtgggggtggttggagtggggtttgttttaattttgttagggtattttatttttatttattttttttttgtttttattaattttaaattttaaggtagttttttagaatatataaaagtattttttagtgttgggtgtagttaagtaatgaaggtagaagggtgagagttagttaaagtttattgagattaaatgatttaattaagattatataatttgtatagtatattatgtttagtaaatattattttaaatgaatattataaataggaagagaatttatataattttaataaaaatataatttaatatgaaataaattaggtattatggttattagtgtatagagaaaagtaaatatggatgattattaaaagttatttacgtattataagtagttaagatttttttttttttttttgtatttttattattttatcggattttttttaaaaaaaaaaaaaaaaagaaaaggaaaggaaaaaaaggttatttatttgattagtgtttttgattgtaatttagagtaagttgagtttaagtgggtgtataattcggtgattgtgtatttgtggtaaagtttttaaataaatatatagtttttttaataaaaatgattattaagggtaaattaataatagatgttgtaggaagtttttaaagtagttaaaatttatttaatttatatgttgaaagaatgtttgtttttatttttatatattttttataaaatgttttttatttatttgttttttatgtttataataatagatagtaatagaatagtgtaatttttattgtatagatataaatttgatagtatttagtggtaatagtattggttataatggtttaaattagagggtaaagtgtagatatttaatagttttgtgattttggattaagttatttaatttttgagtttagtttttttaatagtaaaatgatgttagtagtatttgttatgcgtattttataggattatagtgattaaatgcgaatgtatggtaagtgttttgaaaaaaatgtaattagatgttttattattattatgtatatgaaaatgggagtttgggtagattatatgatttttttaaatttaaaaaaaatattattttaagtgttaataattaaggttaaaatgtaatagttttttaatttattatttagttttgatttaggtttgattgtggtaagattatattaaaaaatattgagttttttttaagaatttagttttttttttaaataaaaaatttgaaagggtggtgtagattggtgttaaaaatttggttataagtaatttttttgttgtggttttttaaagtaattatattttattatgttttagagaaagaaagaattataggtttgtatttattattaataatttgaaagtatttaacggtgagttaaaagaatattttaaattgtttagtaaatatacgtatatatataaaatttagaaggtatatttaaaattttttacgttttttggtaaagttaattattattgttaatatatggtaatgtttatttaaaatttagttaatataattattaaaattttaatttagagtatgaaatagaaaaataaaatttagtttaattatagtattatgtatttagaattatgattaatttgaaattgagaatattttttttttttttttgtttaggtataattttttttttgtagttttggaaatgaggtaaggatgtatttgtatgatatagaggttttttttgtgaatatgtgaaagggttataaaagttcgaatagaattaattttagaggatttgggatttatagtttattttttgggtagtagaaaggtatgatttatatgtttttcgggattgaatattttattattagggtaggtgaaagaaagaaattaagagtgaaaaaagagttttaatattattagttaagaatgagataatagggtttatatggttttaggaattagtatgaagaaaaagttgtgttataagtagattttttttagtattttagataatttatattttattatatgttttattaattaaatttttaagatgtttattttttaattattagaatttatgaatatattatgttatgatttatatattatatgggtagtgtaggtaaaattaaggttatgaattttaagaataatttgttaagtataattcgtttagataaaatttaaaagtagagggttttttatgtttggagttggaaagttgaagtagaattataaattgaaaagattttatgtatgagagagatcgaattagttttgtttatagtggttatatggaaagtataagaaataatatagattttgttaaaaggagtaaagattagtttgttagtttataattagtatataaatggggattttagttttatagttataacgaattgtatttaattaatgatttgaataattttaaattgggtgtatttagagaataatgaaattggatttattagaaaggaataaatttttggtaatattttatgaaattagttgtattatgatagaattttgatttatagaaattgtgagataataaatttgttttgaattgttgagtttgtggtaatttttattgtagtaatagaaataattttagattttggtgtcgagaagtggagagttgtttatataaatatttaaaaacgtaaagtggttttgtatttggataggtgttagttgtaaaattttttataagaataaagagaaattttagtttttaggaaaatgaaaaaaaaaattatttttatagaatgaaaagtttagattttgttgagtggaaaaaagtttagatttttttaaataaattaataagtaaaaatatgaatgttaaaaataataggtcgggtatagtggtttatgtttgtaatcgtaatattttgggaggttgaggtgggaggatagtttgagtttaggaatttaagattagtttgagtagtatagtaaaattttatttttattttaaaaaattttttaggtatggtggtgtgtgtttgtagttttagttatttaggaggttgaggcgggtggattatttgagtttagaaggttgaggttgtagtgaggagttataattatgttattgttttttagttttggtgatatagtgagattttattttaaaaataaaaaaaaaaaattagtaataattttgttagtgagaatttagagggagaagggattaaggtagagaaattttatatggatttagagaatatttacgttatgtatgattgttagtagaaatttggagttttgtaatattgtttgtaagggtttaaaagtgagtttttatttgaaggaaagaagagttttgttatataaaaagatagattatttagtaaaattgtttttttgggttatgtggaaagtataatttgaagataaattatttagtaaaattgttttttttggttatgtggaaaaaataatttgtaaaaattaattttttagtttagaagattttagtaaagtgttggataagtggttttgtttttatttaatgtttagagtaaaatttagtgagaaaaatgaatagttggaatatttattaaataaaaagatagtaaaatatgataaaattagaagttttttgtttattttgggggcggggggggggtgggggtgaaaggggaggttaaattaaggagattttttgttagagtaaagttttatttgtatttatagttattttttattatcggtattattgtttgagttttcgttttttgttaggttagaagtaatattatatttttataggaatgtaaatcgtattgtaaattgtatacgtgagggatttaggttgtatgttttttataagaatttaatgtttgatgatttgttttttatttttagatgggatggtatagttttaggaaaataagtttagggtttttattgattttaaattatggtgaattgtataattgttttattatatattatatataataataatataaatgaagtgtataataaatgtaatgtattttatttatttagtaattatttttcgaattttattatttttaggtttttggaaaaattgttttttatgaaattagtttttggtatttaaaaaggtggggaacgttgatttagagagagagaaaaaaatagtatgtgatttttaattattttatgaatttttagaaaaaataaaagatttttttaggtattcgattattaaataagaaaagtaaaagttaaggaaaaaggaaagaaagggaaaagttaaggtgaaagaaaaagaaagaggaaagaaaaagaaaaggtaaggggtaaggaaaggtaaggtaaggtaaagtaaagtaaggtaaggtaaggtaaaaagaaaaaggaaaggaagtggagggaaaggaaagggaaagattaaaaggttagagaattaagttttttttaagtaagtaaaagtgtgatttatatatatttaatatttttaagaaatttaaggatattggattttaattattttagtagaagttaaaaatagatatgggataattttagaaaaaaaatatattagttttttgtttaatataataaatttttatgatatacgtaaaattttttttaaaagaagtattgttagtttaaacggaaagggatatagaattaatataatgaagatagttggattgatagaattttagaggtaggaagtaggaaataaaattatttagttgtaaatatttgttatttttgaaaaaaatggtaaggaagatttaaagggcggagttataggttaaaaaggattatttttaggttttgaaatttaatgggagtttgtttagttgtattttaaaatttttttagataaattttttttattttttatgttattttgtttgaattagaatattttaaattgttttattattgtattttgggaagtagataaagaggaattatgttttaggagttgtatttaatgattgatatttagagaataagtatttgatttaaatgatatttaggatttttgagttgattaattttaggtaagattttttttttttggattgggaattttaagagagggtggatgttattttatatttgttagagatatatttgagaatcggggtgaagatggtggtagggagaatggtttttttataaagatgtttataaattaatttttataaattttgaaaatatgttatttgatatggtaaaagaaattttttaggtataattaagattatgaatttaaaattgggtaattattttggattattttggtgtattaaatttaattatgtgagtttttaaattgaatagttttttggttagatttaagaagacggatgtgatagaggggaagattagaaagattaaaaatataagatggattttatttattgttgttttaggaaattattatgtaaagtatgagaagaaatgtgggtaggttttgaaagtaaaaaatggttttggatgatgaattgtagggaataatagtatttttattgtgtaataaaaagaaattaaatttggttaaaagtatggatatttttcgaagttaagagtttttagttttgtagatagtttattttatttatttatttatttatttatttatttatttatttatttattttttgagatattgttttgttttgttatttaggttggggtatagttgtgttattatagtttattatagtttttaatttttggtaaaataatttttttattttagtttttagagtagttagaattagagatatgtattattatgtttagttaattaaaaaaaaatttttttttttgtagatataggtttttattgggttgtttattatttacgatggtttttaatttttgattttaagtaatttttataattgagttttttaaagtaatgagattatagatgtgagttattatatttggttaatattttaattttaattttgtataattttatacgtagaatttaattgagttatatttttgatttatagaattttgagataaatttgttttgttttagattagtaaatttgttgaaatgtattaatagaaaaatagaaaattagtataaatagaaaatattttaaagggagaattagtaggttttagttgtataattggaaaaattggaataattgaagggtaatagtaagattttgatattgatggtttaattaataagattatgagttggttatgagattttgataggatttaagtatggatttaagtatttaaatatggattaatattagattttgtaattttggtaagtaatttaaaatttggtagatgggaagtgaaataatttaataaatagtaatatttattttattaaaaaatgagtttggtttttgtggttgtaatttaaatttatttttatttatggtttttaatttttattagttatagtttttaaattagggaataaagtatattaaatattaatttttatattatatattaaaatgttatgatatttatatttttgaaatgtttaaattattttttattaagttattaatgtaaaattaaagggaataaattgatttttagggatatatgggttgtaataagataggaaagggtaggtagattaaattagattgatagtgtttttgtttttttgttttttaaagattttgggttttgttatgttttttatattagtttagtattttagggtttaagtaatttttttttttttagtttattgagtgggtgggattataggtcgttatatttggtttgtttagattttttaaaaagtttaattattattttatataaaatttataatgtttaagtatttagtataataaatttttatttaagtgttaattggaatttgtattatttatgttaagtacgtaagtgttaattggtatttgtattatttatattaagataatagaatattttttatatattagatgatttttttttgttttttattagtaatttttatgatttttttttttttttttgtaaatagggtttttggttttgttatataggttaaattgtaagtggtatagtttattgtagttttaattttttaggtttaagtaatgtttattttttagtttaattatttgggattataagtatgtgttattaaatttggttaatttttaaagtatttttttgtatagataaggtttaattatgttgtttaggttggtgttaaagttttgagtttgagtaatttttttattttagttttataaagtattgggattataggaatgttattgtgtttggtatttatgattaatttttaattttaatatattttgtaggtttttgttgtaagattgtattatatttttatatttaatatagtttttagtttttttatagtaaattaataaaatggtaaaaaatttaaaatttttaataattataagtattttttagatttttgtgtagtttaaaagttttttttattttttttttttagagatagggttttattttgttatttagattggagtgtagtggtatgattatggtttattgtagtttttaatttttaggtttaagtaatttttttattttagttttttaagtagttaggattaatgatatatgttattatgtttagtttttttattgtatttttagtatatgttatggttatttatgtgtgttaatttttaaatattaaattatatgataaggtaatatgtaagtgagaaattaatggatttttaaagtgtttttttgaaatagatttatttaatttaaagaaagtgtgttttatgatatttaaattgttttaaataaaaaggttatgatgattatattaatattttgttaattatagaaaaagaaaaagggtatttgttttaaataagttgttattgttttttttatttaaataatttttggttttattaatttttttttttttaaaaaaatgtaattataaaattataaatgtaaattaattttttttgtataattaaagaaaattatatgaaattaaggtaatgaatgatggaataaatgtgatttgttggattattgaagtgattttttaatttttttaaaaatagtaattttattagttttaataaaagattaatttgtgggttaggtatggtggtttacgtttgtaattttaggattttaggaagttgaggtaggtggattataaggttaggagattaagattatttggtgttttgatagtatagatagtgaaattttgtttttattaaaaatataaaaaattagtcgggtattgtgacgggtatttgtagttttagttattcggaaggttgaggtaggagaatggtgtgaattcgggagacggagttcgtagtgggtcgagatcgtgttattgtattttagtttgggcgatagagcgagattttattttaaaaaaaaaaaaaaaaagattaatttgtagcgtaatttttttgttttaggtatttattttttttatttgtttgttagagtttgatagatgattagtttttttaattttgaaatttttttttatttttttgtttatatgatattttagttttttttttatttttttaatcgatggttattatagttttgtttaaggttttatatttagtttttttttttattatttttttatttatttttatagtttttaatgacgatttacgtgaagatgatttttaaaatttatacgttgagaaggatttaaaatttttattagatcgtttattgaatatttttaaaaattaaaatttagattttttttggtataattattatggtttttttttttttttttgatagttggttttttagattttgttaattttttttttataatttttttgttatgtttgttttgtttgtatttttattattattaattattttaagttttttattttttgatttttagaaatgaaaatagtttttgaaatggtttttgtaatatttttaaaataaatgattaggaaatttattataagaagggggttttgtaatgttaattaataaggtatttttataatttgtagttagatgaatttttttgaagtattgttttgattatttttttattaagaagtagtttttaatatttagtgatttttatattattaatttaagttattatatgatttatttattgttattatttaattttgtaatttagttggatagtatgttattttttaaacgatttttatgtttttattttggtatttaatattttagaattttttaggaggtgaggttttgaaaaagtggagttatatttagttaattgttattagtagggttaataattgttaatatttataaatatttataaatgtaggaaaatgttattattagtgatttagggatatagtgttagtgttttatgtatgtaattaaatatttgtgttatagatagttaaattttggtttaattattttgaaataggtaataaagagaaaagagtttaaataagtgagaaattaattacgaattgttatattttaggattttatttagtataatatttataaatttaaaattttgaatgaaagagggttaagtataattttacgttatatatatatttttattatgtatttgagtttatgataagggttgattattaatttaatttttattatagtgagtaattattttttaataatatatttgattgattattgttttattttattacggcgaaaattgatagaggtataagaggtttttttgtattttattgtaaagatgattatatttttacgttagtaagtttttttgggttataaatgttaatttttttttataattagaataaaattatgtttttaatggtaataatattaatataattttgataaggtgaaaaataagtttttatgattttatagtaattttttatgtttttgtagtaagaattaagtttagagattagttgaattggaagataaataagtagaatgatttagaggatttattttgaaaaataatttaggtttggtgtggtggtttaattttgtaattttagtattttgagggattacgggagggggattattggagtttaggagttttagataagtttaggtaaatagttggattttttttttataaaaaaaattaaaaattagttggacgtcgtggtgtatttgtggttttagttatttgggaagttgaggtaggaaggattattggagtttgagaggttacgtagttatgatagtgagttatgattatattattgtattttagtttgggtgatagagtaagataatgtttttataaaaaattgtaaaattagttagatgtggtggtgtatgtttttagttttagttatagtggtatgaagatgagaaaataattaatagttagtaaattaaaaaaggagaaataaagtaatgtaaagtagaaaattattttataaatatatatatgagtgtgtgtttgtgtgtgtatgtgtatatatatgggtttttttggtgttttttttttttgagatagggttttgttttgttatttaggatggagtgtagtggtgtgattatgatttattatcgtttcgattttttacgtttaagcgatttttttattttagtttttagagtagttgagattataggtatttattaatatgtttgggtaattttttttttttttttttttttttttttttttgtagatatgagggttttagtatattgattaagttggttttttatttttggttttaaggtaattgtttgtttttgtttttaaagtgttgggattataaatgtaagttattatagttagtaatattgttaaaataatttcgataaaggtttttgaaaatttattagtttttataagtaatgtaagagtgtttattttttaaaaattaataagtattatagattttaattttttggttaggttgggtgtcgtggtttattttagtaattttagtattttgggacgttaaggtaggtggaatgtttgaatttaggaatttaaatttagtttggttaatatggtgaaattttatttttataaataatataaaaattagttaattatgatagtgggtatttgtagttagttatttggggtttgaggagggagaattgtttgagtttaggaggttgaggttgtagtgagttataattttgttattgtattttagtttgggtaatagaattaaattgttttaaaaaaaggaaaaaaaaaatgtgattgtgtatggtggtttatatttgaaatagtaaaggtaagaggatcgtttgaggttaggagtttaatattagtttgggcgatagagtgaaattttttttttattaaaaaaaaaaaaattagttgggtgtggtggtatatttttgtagttttagttattaagaaggatgaggagagagaatggtttgagtttaggag

SEQ ID NO: 1917 - DNA, 6042 bp, Artificial Sequence
  chemically treated genomic DNA (Homo sapiens)
tagttatatttttataggacggtgttatgggttgtgttttttttaaatttatatattgatgttttaattttttagaatatgacgatatttggagatgggtttttaaagatgtaagtaaggtaaagtaaggttattagggtggattttaatttaataggattggtgtttttataagaagagatgagaatatatagatacgttaaagggaagattatgtaaggatacggggaggtgtggttatttataaatttagggagtagttttaggaggagttaattttgttaatagttttaattttgtcgatagtttcgttttagacgttagtttttatcgttgtgagaatatgaatttttattgttgaagttgtttagtttttggtaatttgttatggtagttttagttaagatagatggttagtataaaaaagataaaattaaggattaagagttggttgttgggtacggtggtttacgtttgttattttagtattttaggaggtcgaggcgggttgagattattttggttaatatggtgaaattttatttttattaaaaatataaaaattagttaggcgtggtggtatgagtttatagttttagttatttgggtgtttgaggtaggagaatcgtttgaattcgggaggtggaggttgtaatgagttaagatcgtgttattgtattttagtttggttagagggagattgttttaaaaaaaaaaaaaaattaagaggtggtgaggatgtggagaaattggaatttttttatattgttggtgggaatgttatatggtacggttattttggaaaaatatattttagtatttttttttaaagttaaatgttaattttttattaaatttggtaattttattttttagtaattatttaagagaaagaaaagtatacgtttattaaggttgtgataagaatgtttattataatattataaatagttgataaattggaaatagtttatacggatgaatggatgaaatttggagaatttatgggttaatagtaataatggtcgggcgtggtggtttacgtttgtaattatagtattttgggaggttaaggtaggcggattatttgaggttaggagtttgagattagtttggttaatatggtgaaattttgtttttattaaaaatataaaaattagttaggcgtggtggtatacgtttataattttagttatttaggaggtttaggtaggagaatcgtttgaatttcggaggtagaggttgcggtgagtcgagaacgttttattgttttttagtttgggtaataagagtaaaattttttttaaaaaaataaaattaaattaaaataaaataggtcgggcgtagtggtttacgtttgtaattttagtattttgggaggtcgaggtaggcggattacgaggttaggagatcgagattattttggttaatatggtgaaatttcgtttttattaaaaatataaaaaataatttagtcgggtttggtggcgggcgtttgtagttttagttattcgggaggttgaggtaggagaatggttcgaattcgggaggtagggtttgtagtgagttaagattgcgttattgttttttagtttgggcgatagatcgagatttcgttttaaaaaaataaaataaaataaaataaaaagatagtagtagtaacgggttatcgtttagcgtggatgaaacgcggtatgtttatgagttaatagcgggaataatgggttacggtttagtaatgaaaacgaaggtattattaacgtatgtttttgttattgttgattatttatagttgggagtcgtatttaggtaaatgtttatggagcgttttttgtgtgttgggtattatgcgggcgttagggttatttttagggtgagtgagagttaaatttagttgggtttgatttagtataaaggcggagggtacgggggagtttgagtatttatttaaggtttatttgtagattttggggggggttttagattaaggagtagttagggttgagttggttagggtatttgtttttgtatagtgaggcggcgagcgtgtgtgcgtgtgcgtgagggtgtgtatgtgtaaaatgtgtgtgtgttatatgtgtatgttaggtgtgtgtgaggtgtgcgtgagggttgttaggtgtgttaggtaagtgaaatgtttgcgtgatgtgtgttaggtgtgagaggtgttttgagtgtgttaggtgtttgttggggtgataggtgtgtttgagttaggtgtgtgttaggtgtgtgtgaggaatgtgtgttatttgtgtggtagggtgtatggaaaatatgcgtaggagtgtgtgtgttttaggtgtgaggggtgtgtgtgtataataaaatatatgtgtgaggggtgtcggtatagtaagttaaagggggtttaaagtttgcgcgtaggaaatttaaggaaggattttagttattttatggagcgcgggaattttagtcgtgtttttagataaagattttgtgtatggttttagagaatttttattatttaatttgttatttgtttgtgttattatgagagaattatcgatttcgcgttatgaatttttattaggttattgtttaattattcgagtagtttatggttttttattagtgtatttttttatttatgatgtttagagagtttttagttatatatgtaattttatagtttttttattatattagattagttggtagtttattatatttggttatcggattgtaagattttttttttattttttttatatgtgatttaggagttgaggttagattattatttagtgtttatattttttgttttttttaaaagttgtttatatttgagttgcggggtgtagtggtttttttttttatttattggtggatgcgtgtgagtcgtttttttattcgttggtggatgcgtgtgagtcgttttttcgttcgttggtggatgcgtgtgagtcgttttttcgttcgttggtggatgcgtgtgagtcgtttttttggttgttgatggatatatgtgagttgtttttttgttcgttggtggatgtgtgtgagttgtttttttggttattggtgggtatacgtgagtttttttttcgttcgttggtggaggtgtgtgagttgtttttttgttttttggtggatgtttgtgagttattttttgtgtttttttgtttagattttgttgtttgaattgtatttttattttaattttggtttttttttgtagttttagattttgtttgcgggggaagttatatatcgtacgttttattttacgacgtacggggttttgttgtcgggatggagggaggtcgatcgtttttttagtttgtgggtttcgtaggtgtagtagtttaggtttaggttttagttgggtttagtttattttgttttattcgtgtcgggggtaggttgggatttttattttttttgatagattttagtttggtttgaaatttggggatgttaatgagggttttttggtttttggtaattagggttatttttttagtttttgtgtttgttattggagtttggttagggttgatttgagttgagatattagatgtttacggagatgttggatatataaagtaagttatagttatagtttttagagttattttttttgttttgaggttgttttgttttttttgttttggggttttagtatttgttgttgttgtttttgttttgtttcgggtttaggttgtatagggttttgtgtttttaatttttataattatatatggttttatattttgggttttttgaattttgggttttgtagttgtttttcgtgtttttgtattttcgtggttgttgtttgggatgatagtatagttgataattttttttttgtttattaattgatgttgtattaggcgtttattttataggttcgtagggtattggggagatgaggggtgttttgttttgttttgaggtcgggggttttttggaggaagtgaatatataataaggtttgaaaagagaaacggtgtttagtttatgggagttagggagtgtgtggggcgtgggtagtgttggggtgagtgtgttgggtgttggggggtgttggggtgggggtagtgttttagtgttgtagggttttttatttatagatagaattttaaatgttagggggtttttgttgatttttatagggtatttatttgattttatgttgtgtaataattaagttagggtttttcgtggagttattttaaattgtagtttgagttgttttttttttgagtgtgatgatgtagttgtgatttatgttgttatacgtggattatggatgtcgtgattgggaagttagtagatttatttgttgttattattttttttttggtaagttgcggttaatttgaagttatataatgacgtgttttttttgttttttttagataatagttgatttagaattgggtattttgtttaggaatttcgatgtcgatattatttataagagtttatttatttcgtagtttttttggtataatttgtatatttgttttatatattttgttattgtgtttcgggttttttgatttgaagatgttgttttttttggtgttttttgggtcgaaaggtttattttttttgcgttgtttttaggataggattttttaaacgtatttcgtttttaggtgcggcgcgtttcgttttttttatcggtcgaggggtttattgtttgcggggcgtcggggcggggcgcgcggaaaagagtttcgggttaggagcgtaggaattagatcgtgtttcgcggggttgttattttcgcgtgtgttttttttttcgtttatgcgcggtatcgggttatggttgttgggcgcgatgattttgtttggtgagtggttcgtagggaatcgtttcgggcgtagcgcggggtagggtggtttttttcgtaggacgcgacgcggatttcgagtttttggtttgttcgtatttcgtattttggttcggtttcgggttggtttttggggagcgggttattaggtgtatagtggtttttgggtggagagtttcgggtcggggagatcggggaggtcggagggaatttttaaaggtgaattgtgagagggaagtttcgtttttgagtttgttagtggggtcggggtcgggttaagtaggacgtttgatttgttgcgcgaggcgttttgggtttttgggatttatttgtggggttatttatttttattatttagtcgaggagggaagggagggtagataagttgaggtttggagtgtaggggtgtgggttgaggggattcgttttttgtttgggggaggatatggggttgttgattttggattttatttttgtttttggagtgatttgggttggggtgtgttgaggagttttaggttggaggtcgggttgtttttcgttagttttttgggtagataggggttggttgtttttttgttgtttttttaggttggagatgtggttatggagatacgtttattattgtgttttaatgggagtaaagggttttggggttggtggttttcgaaattttgtttattgtatgttgggattttgttttttgttttcggatattagggagtttttagtttttgggaggtgaatagttttcgggaggtattttttgttttttagttagatgttattagatgattagaagaatggaggaggagaatggaaattggtaggtcggcggttcgagtttttttttttggggggaaggtttatttttgtttttaggtttttttagagatttgagatagtttggagatttgtggagttattggtattcgttggtatttatagcgtttttgagtattgtgtgtgggtgttgtaggatataggtttatcggttatgtttgggggcgtttttggggttttttaggtatagaatttttatttgagtttttgttttagagttatttggtgagttttttaggggagggttaagtttattaagagatagaatttgagggtttaggaggtttttgggaaggaaatttgtttttcggttttttatgtttgttgatttttttttttgtagt

SEQ ID NO: 1918 - DNA, 6042 bp, Artificial Sequence
  chemically treated genomic DNA (Homo sapiens)
gttgtaggagggagggttagtaggtatgaggggtcggggggtaggttttttttttagaggttttttgggtttttagattttgttttttgatgggtttgatttttttttggggaatttattagatagttttgggataaagatttaagtgagggttttgtgtttaaaagattttaggagcgtttttaggtatggtcggtgggtttgtgttttgtagtatttatatatagtgtttagagacgttgtgggtgttagcgggtgttagtgattttataggtttttaggttgttttagatttttggaggggtttgagggtaaggatgaattttttttttagggaggaggattcgggtcgtcgatttgttagtttttattttttttttttatttttttgattatttgatagtatttaattggggagtaggaagtgtttttcggaggttgtttattttttaagaattggaaattttttggtattcgagagtagagggtagggttttagtatgtaatgggtagggtttcggagattattaattttaggattttttgtttttattaaaatataatagtggacgtgtttttatgattatatttttaatttggagaggtagtaggggagtagttagtttttatttgtttaggaaattggcgggaagtaattcggtttttagtttgaagttttttagtatattttagtttaagttattttaggagtaggggtgggatttagggttagtagttttatgtttttttttaggtaggagacgggtttttttagtttatatttttgtattttaggttttagtttgtttgttttttttttttttttcggttaaatagtgggggtgggtagttttataggtgaattttaggaatttagggcgtttcgcgtagtaggttaagcgttttgtttggttcggtttcgattttattaataagtttagaggcgggattttttttttatagtttatttttgaaggtttttttcgattttttcggttttttcggttcggggttttttatttagagattattgtgtatttgatggttcgttttttagggattagttcgaagtcgggttagggtgcggggtgcgggtaggttaggggttcggggttcgcgtcgcgttttgcggggagagttattttgtttcgcgttgcgttcgggacggttttttgcgaattatttattaggtaggattatcgcgtttagtagttatagttcgatgtcgcgtatgggcgggggggggagtatacgcggaggtgatagtttcgcgggatacggtttggtttttgcgtttttggttcgaggttttttttcgcgcgtttcgtttcggcgtttcgtaggtaatgggtttttcggtcggtgggaggggcggggcgcgtcgtatttgggggcggggtgcgtttggaaggttttattttgaggatagcgtagagggaataagtttttcggtttaaggggtattagaaaggataatatttttaaattagggggttcggaatatagtaataaagtgtgtggagtaggtgtgtagattgtgttaaaggggttacggggtaaatgggtttttgtagatgatgtcgatatcggggtttttgagtagggtgtttagttttgaattagttgttatttggagaaaataggaaaagtacgttattgtgtggttttagattgatcgtagtttgttagagagggagtggtggtagtaagtaagtttgttggttttttagttacggtatttatgatttacgtgtgatagtatgaattatagttgtattattatatttagagggaaagtagtttaagttgtagtttaaggtgattttacgaagggttttggtttagttgttgtatagtatggggttagatggatgttttgtaagagttagtagagattttttggtatttggagttttgtttatgagtgagagattttgtagtattgaagtattgtttttattttaatattttttagtatttagtatatttattttagtattgtttacgttttatatattttttggtttttatgggttgggtatcgtttttttttttaggttttattatgtatttattttttttagaaaattttcggttttagggtagggtagggtattttttatttttttagtgttttgcgaatttgtgaagtgggcgtttgatgtagtattagttgatgagtaagaggagggttgttagttatgttgttattttaggtagtagttacgagaatgtaggggtacgagaagtaattataggatttagagtttagggaatttagagtgtggggttatgtgtggttgtggggattggagatatagggttttgtgtaatttgggttcggagtaagataaagataatagtagtagatgttggagttttaaggtaggaaggataggatagttttaaggtaggaaagatggttttgggagttgtggttgtaatttgttttatgtgtttagtattttcgtgagtatttggtgttttagtttaagttaattttggttagattttaataatagatataagaattgagaaggtggttttggttattaaaaattagaggatttttattaatatttttaaattttaagttagattgaaatttgttagaagaaatgagggttttagtttattttcgatacgggtggaatagagtaggttgggtttagttagagtttgggtttgggttgttgtatttgcggggtttatagattgaggaggcggtcggtttttttttatttcgatagtagagtttcgtgcgtcgtggagtaaaacgtgcgatgtgtggtttttttcgtaaataggatttggagttgtaaagaagagttagggttagaatggggatgtaatttagatagtagggtttgggtaaggaaatatagaaaatggtttataagtatttattaagaagtaggaaaatagtttatatatttttattaacggacgagaaaagggtttacgtgtatttattaatagttaggaaaatagtttatatatatttattaacgggtaggaaaatagtttatatgtatttattaatagttaggaggacggtttatacgtatttattaacgggcgggaaaacggtttatacgtatttattaacgggcgggaaaacggtttatacgtatttattaacgggtgggaagacggtttatacgtatttattaatgggtgggaaaggaagttattgtatttcgtagtttaggtgtgaatagtttttagagaaaataaggggtgtaaatattgaatagtgatttggttttaatttttggattatatatggggagggtgggggagggattttgtagttcggtggttagatgtagtgagttattaattgatttgatgtagtgagaaggttgtagagttatatgtgtaattgaaaattttttaagtattatggatgagaaggtgtattgataagagattatgagttgttcggatgattgaatagtgatttaataaagatttatgacgcggaatcggtgatttttttatagtggtataaatagatggtaagttagatggtgagagttttttgggattatatatagagtttttgtttgaaaatacggttgggattttcgcgttttatagagtagttgaagtttttttttggattttttgcgcgtaaattttgagttttttttaatttattgtgtcgatattttttatatatatattttattatgtatatatattttttatatttgaggtatatatatttttgcgtatgttttttatgtattttgttatataggtggtatatattttttatatatatttgatatatatttgatttagatatatttgttattttagtagatatttgatatatttaaaatattttttatatttgatatatattacgtaaatattttatttatttgatatatttgatagtttttacgtatattttatatatatttgatatatatatgtgatatatatatattttatatatatatatttttacgtatacgtatatacgttcgtcgttttattgtgtaggggtaggtgttttggttagtttaattttggttgttttttggtttggggttttttttagagtttgtaggtggattttgggtggatgtttagattttttcgtgtttttcgtttttgtgttgggttagatttagttgggtttggtttttatttattttgaggatggttttggcgttcgtatggtgtttagtatatagaaggcgttttataggtatttgtttgagtgcggtttttagttgtgggtggttagtaatgataggagtatgcgttggtgatgttttcgtttttattgttaaatcgtaatttattgttttcgttgttaatttatggatatgtcgcgttttatttacgttgaacggtaattcgttgttattattgtttttttgttttgttttgttttgtttttttgagacggagtttcggtttgtcgtttaggttggagggtagtggcgtaattttggtttattgtaagttttgtttttcgggttcgagttatttttttgttttagtttttcgagtagttgggattataggcgttcgttattaagttcggttaaattattttttgtatttttagtagagacggggttttattatgttagttaggatggtttcgattttttgatttcgtgattcgtttgtttcggttttttaaagtgttgagattataggcgtgagttattgcgttcgatttgttttgttttagtttagttttgtttttttaagaggagttttgtttttgttgtttaggttggagggtaatggaacgttttcggtttatcgtaatttttgttttcggggtttaagcgatttttttgtttgagttttttgagtagttgagattataggcgtgtgttattacgtttagttaatttttgtatttttagtagagatagggttttattatattggttaggttggttttaaatttttgattttaggtgattcgtttgttttggttttttaaagtgttgtgattataggcgtgagttattacgttcggttattattgttgttaatttatggattttttaggttttatttatttattcgtatgaattgtttttagtttgttagttgtttataatgttgtggtgaatatttttattataattttggtggacgtgtgttttttttttttttgggtagttattgaagagtggaattgttaaatttgatggaaagttgatatttaattttgaaagaaaatgttaaaatgtgtttttttaaagtggtcgtattatgtgatatttttattagtagtataggagggttttagtttttttatatttttattattttttgatttttttttttttttgagatagtttttttttggttaggttggagtatagtggtacgattttggtttattgtaatttttatttttcgggtttaaacgatttttttgttttaggtatttaagtagttgggattataggtttatgttattacgtttggttaatttttgtatttttagtaaagatggggttttattatgttggttaggatggttttaattcgtttcggttttttaaagtgttgggatgataggcgtgagttatcgtgtttagtaattaatttttgatttttgattttgttttttttatattagttatttgttttagttgaggttgttataataaattgttagagattgggtagttttaataatggaaatttatgtttttatagcgatggaggttgacgtttgagacggagttgtcggtagggttggagttgttggtagggttggttttttttgaggttgttttttgggtttgtgggtggttatattttttcgtgtttttatatggttttttttttggcgtatttgtgtgtttttatttttttttataaggatattagttttgttgaattagggtttattttaataattttgttttattttatttatatttttaaaaatttatttttaaatatcgttatattttgaggggttaggatattaatgtatgaatttagaggggatatagtttataatatcgttttataggagtgtagttg

SEQ ID NO: 1919 - DNA, 16811 bp, Artificial Sequence
  chemically treated genomic DNA (Homo sapiens)
  unsure 15109..15110, 15123, 15126, 15128, 15131: n is a or g or c or t
tttttaaatgtttttttttagtgtttttatttagttttatggttttgaagattatgtatgttttgatgattttttaatttttatttttagttttgatttttttttaaattttatttgaatatttaattgtttttttaatatttttatttagatgtttgatggggtaatttaaatatagtttatttataaagaatttgagttttttttttagatttattttttaggttttttatttgtagtagttggtaggtgcgtttatttgattttttaatttttatatttaagagttagtttcgattttcggttttttttattttttatttgcggtttattagtaagttttgtttattttatttttaaagtatattttaaatttgtttatttttttttatttgtatgttaattattttagtttaaattattattaaattattttttaaatgattataggggttttttagttgatttatttgtaattattttattttttatttttgatagttaagtttaaataattatgttatgtttttgtttaaaatttttttatgatttttattgtatttgaaataaaatttaaggtttttaaagtaagatagattttggtttttgtttatttttttatatttattttttttttatttttgttttagttaaattggtttttttattttttaaaaatttaatgtttgtttttattttaggatttttgtattggtagttttttttggaatattttttttttggtgtttgaatgattggtttttatttattatttatattttagttgaaatgttagtatttaaagagattttttttgattattagatcgaagtgggtattttttattttttattacgttattttatttttttttttaattttttagaggagagttatatagatagataggaaaaataggtattttttttttttaatttattttaattaggtattttttttgtttgtttgtttatttcgtttttgggaggtaagttttataagggttgagatattgttttttttttttattattatatttgtaggatttagaatagtgtttcgtattttcgtgtgtgtgtgtgtgtgtgtgtgtgtgtgtgtgtgtgtgtatatatatagtaacgtagtgttgttatatgttgttgaatgcgtgaatgaatggataaataaattagtaatagagttaggattagaatttaggttttttgtttttagtttagtgtttttttttgtatgttatattaagttgttgtttttattagtttgattgttgtttttttgttgattagatgtttggtattattaaatttttaattagttttagagtttagtgagaagggaaatggttattagggtataggagggagaggaaagagggtttttgaatgaataatgaggtttataataagtttagtaaggattgagaatttagtatattttattatttattttattatttacggaatatttagtaaatatttacgtgttaggtattatgtaaggtgttagggataaaaagataattttatttgggtggatttgatcgtttttagaaggagatggaggtataagtatagtgtaatgagtgaggatagggtgatatgtgttatgaaaatataaagtagatgggagaacgttgcgtggggtgggttaggaatttagaagatgatttagggagggggatatttgagtcgagttttaaagagtgaaggtgtattattgaaattttttagtttgtatttttatacgaaaagtatatttgtgcgttttttttattttaattgataaaagaaaaattattttagaaaggtatataggatgattttggtagttgaaagaattatttattaagaaataaagaattttttatttagaaatatgtttttttaggagatgagatagttttttattttttgttataaagagtttatttaaataattgtattttttttgcgggtttgagagtgaaattattgaggtaattatttttatgatgaaagattattatttaataaagaattgtttttcggaaaaattatagattatagattgtttttttaagaaatgcgttgtcgtttgtaatttagtattttgggaggtcgaggcgggtagattacgaggttaggagatcgagattattttggataatacggtgaaatttcgtttttattaaaaaaaaaaaaaaattagtcgggtatggtggtaggttttcgtagttttagttatttaggaggttgaggtaggagaatggtatgaatttgggaggtagagtttgtagtgagtcgagattcggttattgtattattttagtttgggcgagagcgagattttgttttaaaaaaaaaaaaagaaaggaaaaaaagaaatgtgtttttaggtaaaagtaagattttgtagtaggtgaaagaatgaggtagatttatgtgtattgatatagaaagatagatatattgttatattaaaaaataagttttttggttgggcgtagtggcggtggtttatgtttgtaattttaatattttgggaggtcgaggcgggtggattatttgaggttaggagtttgagattagtttggttaatatggtgaaatttcgtttttattaaaaatataaaaattatttgggtgtggtggcgggcgtttgtaattttagttattcgggaggtagaggtaggagaattatttgaattagggaggttgaggttgtagtgaattaagattgtattattgtattttagtttgggtgatagagtgagtgaaggtcggttttaaaaaaaaaaaaaagttttagaatattgaatattgttattattatatagggatttgtatagaaagatttagaggaataattataaataaaataatgtttatttttgaggtgtgggattatgaggtgtttatattttttgagttttgtattttggtgttattttaattgttttgaataaatgtgtatttattttgggatttaaaaataaatatttgtttagaagataggtttgatttgttttatgttgtttaagaatttgttattggttatatattttagaaatatgtgaagagaggatttttttaaggaatatattatttattaatatttatagaaaaaatgaattgagatttaggaagatcgtgtggtttttttttcgttgtgatttttagatttggatttttagttttatggttgtcgattttagtgttgagggttaaaatatatagatatttttaattttaatatatatatttggaaatttaggtaatagtgttttgtggaaaattgtgtaattgtttagaggagagagaattttttgtaataggttgaaaagaggttaattgtgtatttttttaatgataggtaatttttggtggtaaatgtgatataggtgaagaagatagaaatatataggttagtgtttttttagaaatataattgaaattaaaatcgcgtgaatattatttttggggttttttgtatattttagaaatttattaagttttttggatagtatttatttaatttataagtatttattgagtatttagtatgtgtttagttattggggtataatatagagttaaagagataaatttttggtacgttttaagtttttatttttttggggaaaatatattaagtaggataatgtataaataaaggagagaattttaggtaaagatataatgaagtagggaaagggatagtgataagagtgttatttttgaaaggttaggaagttttttagggaaaagtgttatttgattagggatttggagtggggaagggagttatatagagtttttaggggagggtagtataggaggttagcgagaggtaggttttgggtggtagtaggaattttttatgtttttgaaaaggtaaagaatattttaaagaaagcgtttataacgtttgggatgttacggatttgtgttgttgtttttatgtttatagatttagtgttgtaaatgtatttttgttgtttatatattttagaatgaattttatttaggagtttaagtttattacgaaggtattgttttatttaaatgtttttaaatatattttttgtttattataaagatatagaattttatttataagagttaaagttgtttattttattaggagagataaggttggattaaaagtatttttgggtttaagtttatattttttattatttcggtttttatttttaagtagtgatagattgttttgaatttttcgttgtaagggttataaaagggatagagaatagagcgatagaagatgttttttgtatttttaatttttagttttagttgttagagaattggtattttttttatacgtttggttttggtggagaaagaatgatagtttttatttataacgaggagattgtggtttagagaagttagggggttgtttaggattttggagaaagttagttttgatttataattttcgcgttattatttgatttttattagtggagttaggaattttatgttttattttaggaaatgagtttgttgattttttatttatataaaaatgaaaaataaatattagatgtttgaaaatatgttgtaatacgttttgttggaatttaaaagtgtattttgattaaaaaaattaaattagaaaatttatatagtaaaaaaaaaaatgttttggatgaaaatatattttattttttttttatatatattttttttttttttcgtatatatatttatatatatatatatatatatatacgcgcgcgcgaaaataatattttattttttttttagggagtagttgtgaaggaaatcgggggaggaggatggatataatattttatttttgtgtttcgatatagattaagtttttaggttaatttttttgattggatgggggcggcgggcgtggtatgtatgaaaagtaaatattagagatttgaagaagtttataaaatagtttgggagaggttagttattaagataggtattttaaatcggttgattttgtatttggaaattgtttttattttgaaagaaaaggtatgtattgtagttttaagttttttatttatgataataatgtttaaaatagaaatagtttagattttttattgttttattttagttatatataattattattgattgagagtttgtgtcggtagttttagatttgtttttatttttttttaaataaatgtataaggtaggtattattagagttatttttttagtgataaagttgaggtttagatatattagtaatatgtttaagataaaattaaatttagtgtgaatttattttagcgttttttgtttatttttttaaattggataacgaggtgtttttatgtataaatatcgttttaggtgaatttttagtaagttgtttaacggtgtatcgtagtaaaataatttggaaattggaattaatggtgtgattagaaaatgtatttgataatatggtataaaatattgtgtttgggagatacgtgttttgttatatttaatggttaaatgagtttttgagatttaatgatttattggaatttattttattttatgaggtgaaattttaaaatttagttttttacgttttgtagatttttgaggttaggggttgtgtttttaggtattaagagcgcgggtttgtgggagatttaggtttatattttagtttgtttttaggtttaggtttatattgtggtttcgtagtttattaggaagtaattcgggtaaatttatttcgttggtatgaagagagtgttagtagaggtcgtttttagaggaggtgttgtggagattgagcgtatagtatttttaaaattttgggattagggtttttttacgggtaagtttaatgtaagtggagtagtgatttttagttagtgttaggtttaaggtggatgtattgttattttagttggattgttttttaattattttatattttgttaaaaattatatttttttttttttttttttgagacggagttttattttgttatttaggttggagtgtagtggcgcgatttcggtttattatagttttcgttttttaggtttaagttatttttgtgttttagttttttaagtagttgggattataggattgtattattatgtttagttaatttttgtattttttgtttgtttgtttttgttttgtttttttgagatggagtttttgttttgttgtttaagttagagtgtaatggtgtgattttggtttattgtaatttttgttttttatgtttaagtaattattttgtattagtttttcgagtagttgtgattataggtatttgttattatatttggttaattttttgtatttttagtagagacggggtttcgttatgttggttaggttggttttaaatttttaattttaagtgatttgtttatttcggttttttaaagtgttgggattataggtattagttattatgttcggttaaaaataatatttaaattatatttattttgtaaagtatttaaattttttataagaataatttttttattgatattagaagaagatgtaaaaatatatgtcgtatataatttatatgttatttaaagttttaagtatatattaataatatgtttaataagtaatgagtaaattagaatgaaaggatattgaaaattataatggatgttgttcgtttttttttttataaggagtttttttgttgttgttgtttgtttgtttgttttgagacggagttttgtttttgttgtttaggttggagtgtaatgatgtaattttagtttattataatttttatttttcgggtttaagtaatttttttgttttagtttttcgattataggtatgtatgtaattataggtagtatgggattataggtatgtattattatgtttagttaatttttttatttttagtagagatagggtttttttatgttggttaggttggttttgaatttttaattttaggtgttttatttgtttcggttttttatgggattataggtttgagttatcgtatttggtattataaggagttttaattataggaataaaattaatgtaattaagaggtatttttggaagagggttagttaaaggggttgttttgaaatttttttattgaggtaaagaatttgttttagtttataagagagtattttgttagagtaagatgtagaattgatttttgttgtagtgttatgtggtggtgagatttattaggttatagaggtggggggttattgaaaggttttatggcggtgtatagaagaagtagattcggggtgttgtagataggagagggggagatggagttcgagttttagttttttgttttttttaggttttagtttttttatttgtatattttggaagtagagttagaaagatgatttttaaggttttatttagtgtggggattttgtggaatgtgtatagtgtgtggttagtttttgaggtttgattttttgggttaggtttttagtttgggtttattaagtagaatttaagatttttttaaaatggatgtaaatttgtgtgggtttaggttgtatttttataaatttattattttttaaaaggttaaaagataggttttgtttatatagttggtggagtcgatgagaaacggaattttagagattagggaaagtggttttgtggtagatttgtttaaaggggcgtttagtaattattttttcggaggtttacggtatagaacgggttgcggcgcggtgagcggatgatatttttatataggaggtatttaagattatgcgttcgcggaatagttagtgattatttataatatttattattgtgatattatatagagtagttatattgtatttattagtgtgatattatatagaggagtttcgttatatttatcgttgtgatattatatagaggagtttttttgtatttttcgttgtgatattataaagaggagttttatagtatttattattgtgatattatatagagtagttgcgttgtatttattattgcgatattatatagagtagttttagtgtatttattattgtgatattatataggggatttttattgtatttattagtgttatattatatagagtagttttattatatttattattgtgatattatatagacgagttttattgtatttattattgtgatattatatagaggagtttcgtaatatttatcgttgtgatattatatagagtagttttattgtatttgttagtgtgatattatatagaggagttttattatatttattattgcgatattatatagagtagttttattgtatttattagtgtgatattatatagaggagttttattgtatttgttattgtgatattatttagaggagttttattgtatttattattgtgatattatatagaggagttttattttatttattattgtgatattatatagaggagttttattatatttatttttgtgatattatatagaggagttttattatatttattattgtgatattatataggggatttttattatatttattattgtgatattatatagaggagttttattgtatttattattgtgatattatataggaggagttgtgttatatttattattgtgatattatatagagtagttttagtgtatttattattgtgatattatataggggagttttattatatttagtattgttatattatatagagtagttttattatatttattattgtgatattatatagacgagttttattgtatttaatattgtgattttatatagaggaattttataatatttattattgtgatattatatagagtagttttattgtatttattagtgtgatattatatagaggagttttattatatttattattgtgatattatatagagtagttttattgtatttattagtgtgatattatatagaggaattttattatatttattattgtgatattatatagagtagttttattgtatttattattgtgatattatatagaggagttttattgtatttattattgtgatattatatagaggcgttgtgttgtagttattattgtgatattatatagagtagttttagtgtatttattattgtgatattatataggggagttttattatatttattattgttatattatatagagtagttttattatatttattattgtgatattttataggggatttttattatatttattattgtgatgttatatagaggatttttattatatttattattgtggtattatataggggagttttacgatatttattattgtgatattatataggggagttttattatatttattattgtgatattatatagagtagttttattatatttattattgtgatattttataggggatttttattatatttattattgtgatgttatatagaggatttttattatatttattattgtggtattatatacgggagttttacgatatttattattgtgatattatataggggagttttattatatttattattgtgatattatatagaggaattttattatatttattattgtgatattatatacgggagttttattaagtttattattgtgatattatatagaggaattttattatacgtattattgtgatattatatatgggagttttattatatttattattgtgatattatatagaggagttttattatatttacgattgtgatattatatagaggagttttattttatttattattgtgatatatagcggagttttattatatgtattattgtgatattatatagagtagttttattatatttattattgtgatattatatagagtagttttattgtatttattattgtgatattatatagggttgttttattgtatttattattgtgatattatatagaggagttttattatatttattattgtgatattatatagaggagttttattatatttattattgtgatattatatagagtagttttattatatcgattattgtgatattatatagtggagttttattatatttattattgtgatattatataggggatttttattatatttattattgtgatattatatagaggagttttattgtatttattattgtgatattatatagaggagttgtgttatagttattattgtgatattatattttattatttttagtgtatttattattgtgatattatataggggagttttattatatttattattgttatattatatagagtagttttattatatttattattgtgatattatattgataatttttattgtgattattattgtgatattatatagaggagttttataatattttttattgtgatattatatagagtagttttattgtatttattattgtgatattatatagaggagttttattatatgtattattgtgatattatatagaggagttttattgtattttattattgtgatattatatagaggagtttcgttgtatttattattgtgatattatatagagtagttttattatatttattattgtgatattagataggggagtttttttataattattattgtgatgatatatagagtagttttattatagatattatatagagtagttttattatatttattattgtgatatcgtatagaggagttttattatatttattattgtgatattatatagaggagttttattgtatttattattgtgatattatatagagttgttttattgtatttattattgtgatattatatagaggagttttattatatttattattgtgatattatatagagtagtttttttatatttattattgtgatattatatagaggagttttattatatttattattgtgatgttatataggggatttttattatatttattattgtgatattatataggggagttttattatatttattattgtgatattatatagaggaattttattatatttattattgtgatattatatagaggaattttattatatttattattgtgatatcgtataggggagttttattaaatttattattgtgatattatatagaagaattttattatacgtattattgtgatattaaatatgggagttttattatatttattattgtgatattatatagacgagttttattgtatttattattgtgataatatatagaggagttttataatatttattattgtgatattatatagagtagttttattgtatttattagtgtgatattatatagaggagttttattatatttattattgtgatattatatagaggagttttattgtattttattattgtggtattatatagaggaatttcgttgtatttattattgtgatattatatagagtagttttattatatttattattgtgatattatataggggagtttttttataattattattgtgatgatatatagagtagttttattattgatattatatagagtagttttattatatttattattgtgagattatatagaggagttttattatatttattattgtgatattatatagaggagttttattgtatttattattgtgatattatatagagttgttttattgtatttattattgtgatattatatagaggagttttattatatttattattgtgatattatataggggagtttttttataattattattgtgatgatatatagagtaaaaatattatagatattatatagagtagtttttttatatttattattgtgatattatatagaggagttttattatatttattattgtgatattatatagaggagttttattgtatttattattgtgatatcgtatagagttgttttattgtatttattattgtgatattatatagaggagtttcgttatatttattattgtgatattatatagaggagttttattatatttattattgtgatattatatagaggagttttattatatttattattgtgatattatatagaggagttttattatatttattattgtgatattatatagaggagttttattgtatttattattgtgatattatatagaggagttgtgttatattttttattgcgatattatatagagtagttttagtgtatttattattgtgatattatataggggatttttattgtatttattagtgttatattatatagagtagttttattatatttattattgtgatattatatagacgagtttttattgtatttattattgtgatattatatagaggagttttataatatttattattgtgatattatatagagtagttttattgtatttattagtgtgatattatatagaggagttttattatatttattattgcgatattatatagagtagttttattgtatttattagtgtgatattatatagaggaattttattatatttattattgtgatattatatagaggagttttattatatgtattattgtgatattatatagaggagttttattgtatttattattgtgatattatatagagttgttttattgtatttattattgtgatattatatagagtagttttattgtatttattagtgtgatattatataggggagttttattatatttattattgcgatattatatagagtagttttattgtatttattagtgtgatattatatataggaattttattatatttattattgtgatattatatagagtagttttattgtatttattattgtgatattatatagaggagttttattatatttattattgtgatattatatagaggagttttattatatttatttttgtgatattatatagggtagttttattatatgtattattgtgatattatatagaggagttttattatatttattattgtgatattatataggggatttttattatatttattattgtgatattatatagaggagttttattgtatttattattgtgatattatatagaggcgttgtgttgtagttattattgtgatattatatagagtagttttagtgtatttattattgtgatattatataggggagttttattatatttattattgttatattatatagagtagttttattatatttattattgtgatattatattgataagttttattgtatttattattgtgatattatatagaggagttttataatatttattattgtgatattatatagagtagttttattgtatttatcgttgtgatattatataaaggatttttattatatttattattgtgatattatatagagtagttttattgtatttattattgtgatattatatagaggagttttattatatttattattgtgatattatatagaggagttttattatttttattattgtgatattatatagaggagttttattgtatgtattattgtgatattatatagagtagttttattatatttattattgtgatattttataggggatttttattatatttattattgtgttgttatatagaggatttttattatatttattattgtggtattatataggggagttttacgatatttattattgtgatattatatggggaattttattatatttattattgtgatattatatagaggaattttattatatttattattgtgatattatataggggagttttattaaatttattattgtgatattatatagaggaattttattatacgtattattgtgatattatatatgggagttttattatatttattattgtgatattatatagaggagttttttatatttacgattgtgatattatatagaggagttttattttatttattattgtgatgtatagcggagttttattatatgtatttttgtgatattatatagagtagttttattatatttattattgtgatattatatagagtagttttattttatttattataaaaaaattatatagaggagttttattatatgtattattgtgatattatatagaggagttttattgtatttattattgtgatattatatagaggagttttattatatttattattgtgatattatatagaggagttttattatatttattattgtggtattatatataggagttttattatatttattattgtgatattatatagaggagttttattatatttattattgtgatattatatagaggagttttattgtatttattattgtgatattatatagagtagttttattatgtttattattgtgatattatatagggtagtttttttataattattattgtgatattatatagagtagttgtattgttgatattatatagagtagttttattatattttttattgttatattatatagagtagttttattatatttattattgtgatattatatagagtagttttattatatttattagtgtgatattatatagaggagttttattatatttattattgtgatattatatagaggagttatataaaagaatttattattgtgatattatatagagttgttttattgtatttattattgtgatattatatagaggagttttattatatttattattgtgatattatatagaggagttttattatatttattattgtgttattatatagaggagttttttatatttattattgtgatattatatagaggatttttaaaatatttattattgtgagggtttttgtggttcggttttcgttcgcgagaggtcggggtggtgggtggtcgcgggcggggtggcggcgcgttcggcgggttcgcgttcggcgcgttggttgcgtgttgttgcgtgtgttttcgcggtgtcgcgggtcgtgtcgtggtcgtggttttcgtgcgcgtcgtgcgtcgtcgcgcgtcggtcgtcgtgtggcgggtcgtttttgtttttcggtttcgcgtttcggtgtttcgggcgtttgtttcgtttggtttcgcgggttcgcgtcgtgttcgcgtttcgtttttttgggttcgtttcgtcgtttttcgttcgtgtattcgttcggttcgcgtttcgtcgcgtcggaaagcgagataagaaataaaagaaaaaaattttgagnnggaggttattttnggntnggnaaaagatatgtcgttataaaatttttagggttaaaaaaagttattgattattaaagggtatttaggaggtttagtagatttataataaagtagttataattatttttgtaatgatatatttttcgaaatgtttagatttgagaatattttgtttgtattgtattagttattattattatagggagaaatgtagagagttggaaatagttcgtgtgtaagttataggtaaggagttataagggaaaggagtaaattgatagcgagttagtgaaggaaataggggagtttttaatgtttagaatttgtatatagttttgtagtttttgtttttttgttttgttgtttcgttttaaagttagtttttgttgttaaaggatttttggggttgaaatgtttgttgtatagttatatattagttgatagtttttttttgatttaatgaattttatttatgaaaaatatttttaataggtcgggtgcggtggtttaggtttgtaattttagtattttgggaggttaaggcgggtggattttttgaggttaggagtttgagattagtatggttaatatggtgaaattttgtttttattaaaaatattaaaattagtcgggagttgtggtggatatttgtaattttagttatttaggagtttgaggtaggagaattatttgaattcgggagatagaggttgtagtgagtcgagattgtgttattgtattttagtttgggtgatagagtgagattttattttaaaataaaataaaataaaataaaaatttttaatagaatgttaaaaaaaaaaaaagaagaaagaaagaagaaaagaaaagaaagaagaaatttgggaaatattattatttttttgtttttgataataataataattagtatttattgagtatttattttgtattagatatttttttaagtattttttgtatattattttatttaatttttataaaaatttatgagttaggaatgataattatttttatttattagataaagaagttaaggtataaattggatatagttatatttagtatggggtagagttataatttgaatttggttggggtgattttggagtttttagtaggtcgttttttgttaaggtttttaagcgtatttttgggttggtagaatagttagtaagacgagggtagggggagggatggtgttagagaggtatttttttgaagaattttagaggatattaagtgttgggtaatatttggtttggtttcgtgtttttcgtggtttatttggaggttttaattttttattttatatagttttttttacgttgtttttgtttatttgataagtatttattgagtcgatattttgaggttcgtgggtgattttgaggagaattagatatagtgtttattttgggagatgtataattaggtgggataggggtgaaaattaatttaataaattagaatattaggtagagagcgttttcgtggaggtgtagaggttttgaggaaggttttatagtaataaggataggtaggtgtttttttgtaggatgagggtttatatgggttggggagagaagaggagggatcgtttatagaggggattatgggtatagtatttttattttatgattgtgtggttttagaaggtttagaatgataattttagttgttttgcgttttcgtagt

SEQ ID NO: 1920 - DNA, 16811 bp, Artificial Sequence
  chemically treated genomic DNA (Homo sapiens)
  unsure 1681, 1684, 1686, 1689, 1702..1703: n is a or g or c or t
gttgcgggaacgtaaagtagttggggttgttattttgagttttttaaggttatataattatgaagtaagagtgttgtgtttatggttttttttgtgggcggtttttttttttttttttttagtttatgtgaatttttattttgtaggggaatatttgtttgtttttgttgttgtgaggttttttttagagtttttgtatttttacgagggcgttttttgtttggtattttggtttgttggattgatttttatttttgttttatttaattatgtattttttaggatgggtattgtgtttagttttttttagaattatttacggattttaaagtgtcggtttagtagatatttgttaaatgaatagaaatagcgtggagagggttatgtaaagtgggggattaaagtttttaagtgaattacgaaagatacgaaattaaattaaatgttgtttaatatttagtgttttttgagattttttagggagatgtttttttgatattatttttttttttgttttcgttttgttggttgttttattagtttaagagtgcgtttggaaattttaatagggagcggtttgttgggggttttagggttattttagttaggtttaaattgtgattttgttttatattaagtataattgtgtttaatttatgttttagtttttttgtttagtaaatgggaataattattatttttagtttatgaatttttgtgagaattaaatgagataatatatagagagtatttagaggagtgtttgatatagagtaaatgtttaataaatgttagttattgttattattaaaagtagaaagatgatggtattttttaggttttttttttttttttttttttttttttttttttttttttttttttttgatattttgttgagggtttttgttttgttttgttttgttttgagatggagttttattttgttatttaggttggagtgtagtggtataatttcggtttattgtaatttttgtttttcgggtttaagtgatttttttgttttagatttttgagtagttgggattataggtgtttattataattttcggttaattttggtatttttagtagagatagggttttattatgttggttatgttggttttaaatttttgattttaggggatttattcgttttggttttttaaagtgttgggattataggtttgagttatcgtattcggtttgttgagggtattttttatagatgaagtttattaaattagagaaggattgttagttgatgtgtaattgtgtaataagtattttaattttaagagttttttggtagtagaagttggttttgaagcggggtagtaaggtagggagatagaggttgtaggattgtgtgtaggttttgggtattggaagtttttttgttttttttattgattcgttgttaatttgttttttttttttgtgattttttgtttgtagtttgtatacgagttatttttagttttttgtatttttttttgtaatgatgatgattgatgtaatgtaagtaaaatgtttttagatttgagtatttcgaaggatgtgttattataggaataattataattgttttattgtgagtttattaaattttttaaatattttttaataattaatagttttttttaattttggaggttttgtgacggtatgttttttnttngnttnaaggtggtttttnntttaaagttttttttttttgttttttgtttcgtttttcggcgcggcgaggcgcgggtcggacgggtatacgagcgggggacggcgagacggatttagggagacgaggcgcgggtacggcgcgggttcgcggagttagacgaaataaacgttcgagatatcggagcgcggggtcggggagtagaagcgattcgttatacggcggtcggcgcgcggcggcgtacggcgcgtacgggggttacgattacggtacgattcgcggtatcgcgggagtatacgtagtagtacgtaattaacgcgtcgagcgcgaattcgtcgggcgcgtcgttatttcgttcgcggttatttattatttcggtttttcgcgggcgggggtcggattataaagatttttatagtggtagatgttttgaaggttttttgtatgatattatagtggtggatataggaagtttttttgtatgatagtatagtggtggatatagtgaagtttttttgtatgatattatagtggtggatatagtgaagtttttttgtatgatattatagtggtagatatagtgaagtagttttgtatgatattatagtggtagatttttttgtatagtttttttatatgatattatagtggtagatatagtgaagtttttttgtgtgatattatattggtagatatagtgaagttgttttgtgtgatattatagtggtagatatagtgaagttgttttgtatgatataatagtgggagatatagtgaagttgttttgtatgatattaatagtgtagttgttttgtatgatattatagtggtagttatagagaagttattttgtatgatattatagtggtagatatagtgaagttgttttgtatgatattatagtggtagatatagtgaagtttttttgtgtgatattatagtggtagatatagtgaagtttttttgtgtgatattatagtggtagatatagtgaagtttttatatatgatattatagtggtagatatagtgaagtttttttgtatgatattatagtggtagatatagtgaagtttttttgtgtgatattatagtggtagatatagtgaagtttttttgtgtgatattatagtggtatatatagtgaagtttttttgtatgatttttttgtggtagataaagtgaagttgttttgtgtgatattatagtggtagatatagtggagttgttttgtatgatattatagaggtatatatagtaaagtttcgttgtatattatagtggtagataaagtgaagtttttttgtatgatattatagtcgtagatataggaagtttttttgtgtgatgttatagtagtagatatagtgaagtttttatgtatgatattatagtggtacgtatagtgaagtttttttgtgtgatattatagtggtagatttagtgaagtttttttgtatgatattatagtggtagatatagtgaagtttttttgtgtgatattatagtggtagatatagtgaagttttttatatgatattatagtgatagatatcgtgaagtttttttgtatgatattatagtggtagatatagtgaagattttttgtgtgatagtatagtggtagatatagtgaagattttttgtaggatattatagtggtagatatagtgaagttgttttgtgtgatattatagtggtatatatagtgaagtttttttgtgtgatattatagtggtagaaatagtgaagtttttttgtatgatattatagtggtagatatagtgaagtttttttgtgtgatattatagtggtagatatagtgaagttgttttgtatgatattatagtggtagatatagtgaagattttttgtgtgatattatagcggtagatatagtgaagttgttttgtatgatattatagtggtagatattgtgaagtttttttgtgtgatattatagtggtagatatagtgaagtttgttagtgtgatattatagtggtagatatagtgaagttgttttgtatgatataatagtggtagatatagtgaagtttttttgtatgatattatagtggtagatatattgaagttgttttgtatgatattatagtggtagttatagtatagcgtttttgtgtgatattatagtggtagatataatgaagtttttttgtgtgatattatagtggtagatatagtgaaggttttttgtatgatattatagtggtggatatagtgaagtttttttgtatgatattatagtggtatatataatgaagttgttttgtataatattatagaggtagatatagtgaagtttttttgtatgatattatagtggtagatatagtgaagtttttttgtgtgatattatagtggtagatatagtgaagttgttttgtatgatattatagtggtagatatagtgaagtttttgtgtgtgatattatattggtagatatagtgaagttgttttgtatgatatcgtagtgatagatatagtgaagtttttttgtgtgatattatattggtagatatagtgaagttgttttgtatgatattatagtggtagatatagtgaagtagttttgtgtgatattatagtggtagatatagtgaagtttttttgtgtgatattatagtggtatatatagtgaagtttttttgtatgatattatagtggtagatatagtgaagtttttttgtgtgatattatattggtagatatagtgaagttgttttgtatgatatcgtagtgatagatatagtgaagtttttttgtgtgatattatattggtagatatagtgaagttgttttgtatgatattatagtggtagatattgtgaagtttttttgtgtgatattatagtggtagatatagtgaaggttcgtttgtgtgatattatagtggtagatatagtgaagttgttttgtatgatataatattggtagatatagtgaagattttttgtatgatattatagtggtagatatattgaagttgttttgtatgatatcgtagtggaagatatagtatagtttttttgtgtgatattatagtggtagatataatgaagtttttttgtatgatattatagtggtagatatagtgaagtttttttgtatgatattatagtggtggatatagtgaagtttttttgtatgatattatagtggtggatatagtgaagtttttttgtatgatattatagtggtggatatagcgaagtttttttgtatgatattatagtggtagatatagtgaagtagttttgtacgatattatagtggtagatatagtgaagtttttttatatgatattatagtggtagatatagtgaagtttttttgtgtgatattatagtggtagatatagagaagttgttttgtatgatatttatagtgtttttgttttgtatattattatagtggtagttatagagaagtttttttgtatgatattatagtggtggatatagtgaagtttttttgtatgatattatagtggtagatatagtgaagtagttttgtatgatattatagtggtagatatagtgaagtttttttatatgatattatagtggtagatatagtgaagtttttttgtgtgattttatagtggtagatatagtgaagttgttttgtatgatattaatagtggagttgttttgtatattattatagtggtagttatagagaagtttttttgtatgatattatagtggtagatatagtgaagttgttttgtatgatattatagtggtagatatagcgaagtttttttgtgtgatattatagtggtaagatatagtgaagtttttttgtgtgatattatagtgatagatatagtgaagtttttttgtgtgatattatattggtagatatagtgaagttgttttgtatgatattatagtggtagatattgtgaagtttttttgtgtgttattatagtggtagatatagtgaagttcgtttgtgtgatattatagtagtagatatagtgaagtttttatgtttgatattatagtggtacgtatagtgaagtttttttgtgtgatattatagtggtagatttagtgaagtttttttgtacgatattatagtggtagatatagtgaagtttttttgtgtgatattatagtggtagatatagtgaagtttttttgtatgatattatagtggtagatatagtgaagtttttttgtatgatattatagtggtagatatagtgaagattttttgtgtgatattatagtggtggatatagtgaagtttttttgtatgatattatagtggtagatatagagaagttgttttgtgtgatattatagtggtggatatagtgaagtttttttgtatgatattatagtggtagatatagtgaagtagttttgtatgatattatagtggtagatatagtgaagtttttttatatgatattatagtggtagatatagtgaagtttttttgtgcgatattatagtggtagatatagtgaagttgttttgtatgatatttatagtggagttgttttgtatattattatagtggtagttatagagaagtttttttgtttgatattatagtggtagatatagtgaagttgttttgtatgatattatagtggtagatatagcgaagtttttttgtgtgatattatagtggtaagatatagtgaagtttttttgtgtgatattatagtggtatatatagtgaagtttttttgtgtgatattatagtggtagatatagtgaagttgttttgtatgatattatagtggaagatattgtgaagtttttttgtgtgatattataatggtagttatagtgaaggttgttagtgtgatattatagtggtagatatagtgaagttgttttgtatgatataatagtggtagatatagtgaagtttttttgtatgatattatagtggtagatatattgaaaatgataaagtatgatattatagtggtagttatagtatagtttttttgtgtgatattatagtggtagatataatgaagtttttttgtgtgatattatagtggtagatatagtgaaggttttttgtatgatattatagtggtggatatagtgaagttttattgtatgatattatagtggtcgatatagtgaagttgttttgtgtgatattatagtggtagatatagtgaagtttttttgtatgatattatagtggtggatatagtgaagtttttttgtatgatattatagtggtagatatagtgaagtagttttgtatgatattatagtggtagatatagtgaagttgttttgtgtggtattatagtggtagatatagtggagttgttttgtatgatattatagtggtatatgtagtaaagtttcgttgtatattatagtggtagataaagtgaagtttttttgtatgatattatagtcgtagatatagtgaagtttttttgtgtgatgttatagtagtagatatagtgaagtttttatgtatgatattatagtggtacgtatagtgaagtttttttgtgtgatattatagtggtagatttagtgaagttttcgtgtatgatattatagtggtagatatagtgaagtttttttgtgtgatattatagtggtagatatagtgaagtttttttatatgatattatagtgatagatatcgtgaagttttcgtgtatgatattatagtggtagatatagtgaagattttttgtgtgatattatagtggtagatatagtgaagattttttgtaggatattatagtggtagatataatgaagttgttttgtatgatattatagtggtagatatagtgaagtttttttatatgatattatagtgatagatatcgtgaagtttttttgtatgatattatagtggtagatatagtgaagattttttgtgtgatattatagtggtagatatagtgaagattttttgtaggatattatagtggtagatatagtgaagttgttttgtatgatataatagtggtagatatagtgaagtttttttgtatgatattatagtggtagatatattgaagttgttttgtatgatattatagtggtagttatagtatagcgtttttgtgtgatattatagtggtagatataatgaagtttttttgtgtgatattatagtggtagatatagtgaagttgttttgtatgatattatagtggtagatatagtgaagtttttttgtgtaatattatattggtagatatagtgaagttgttttgtatgatattatagtggtagatatagtgaagtttttttgtgtgatattatattggtagatatagtgaagttgttttgtatgatattatagtggtagatattgtgaagtttttttgtgtgaaattatagtgttagatatagtgaaattcgtttgtgtgatattatagtggtagatatagtgaagttgttttgtatgatataatagtgttagatatagtgaagtttttttgtgtgatattatagtggtagatatattgaagttgttttgtatgatattatagtggtagatatagtatagttttttttgtgtgatattatagtggtagatataatgaagtttttttgtatgatattatagtggtagatatagtgaaggttttttgtatgatattatagtggtagatataatgaagtttttttgtgtgatattatagaggtagatatagtgaagtttttttgtatgatattatagtggtagataaagtgaagtttttttgtgtgatattatagtggtagatatagtgaagtttttttggatgatattatagtggtagatatagtgaagtttttttgtgtgatattatattggtagatatagtgaagttgttttgtatgatatcgtagtgatagatatagtgaagtttttttgtgtgatattatattggtagatatagtgaaattgttttgtatgatattatagcggtagatattgcgaagtttttttgtgtgatattatagtggtagatatagtgaagttcgtttgtgtgatattatagtggtagatatagtgaagttgttttgtatgatataatattggtagatatagtgaagattttttgtatgatattatagtggtagatatattgaagttgttttgtgtgatatcgtagtggtagatatagcgtagttgttttgtgtgatattatagtggtagatattgtgaagtttttttttgtgatattatagcggaagatatagggaagtttttttgtgtgatattatagcggtagatatagcgaagtttttttgtgtgatattatattggtggatatagtgtagttgttttgtatgatattatagtggtggatattgtgaatgattattgattgtttcgcgagcgtatgattttaggtgttttttgtgtgagagtgttattcgtttatcgcgtcgtagttcgttttgtgtcgtgagttttcggggagatggttgttgagcgtttttttgagtaagtttgttatagggttattttttttggtttttgaggtttcgttttttatcggttttattagttgtataaataaaatttgttttttaattttttgggggatgatgaatttatagaaatgtagtttaaatttatataaatttgtatttattttaaagagattttgaattttatttagtaggtttaagttgaaagtttggtttagaggattaaattttaaagattggttatatattatgtatattttataaggtttttatattggataggattttagaggttatttttttagttttatttttaaggtgtatagatggggaagttggggtttggaaggggtagagagttgggattcgagttttattttttttttttttgtttgtagtatttcgaatttgttttttttgtgtatcgttatagggttttttaataattttttatttttgtgatttgatgagttttattattatatgatattgtaataaaagttagttttatattttattttgataaaatgtttttttgtgagttgaaatagattttttattttagtaggaggattttagaataatttttttgattgatttttttttaaagatgttttttggttatattagttttatttttgtggttaaaattttttgtgatgttaggtgcggtggtttaagtttgtaattttatgggaggtcgaggtaggtggagtatttgaggttgggagtttaagattagtttgattaatatggagaaattttatttttattaaaaataaaaaaattagttgggtatggtggtgtatgtttgtaattttatgttgtttgtaattatatgtatgtttgtaatcgggaggttgaggtaggagaattgtttgaattcgggaggtggaggttgtggtgagttgagattgtattattgtattttagtttgggtaataagagtaaaatttcgttttaaaataagtaaataaataataataataaaaaaattttttgtgagagaaagggcggatagtatttattatagtttttaatgtttttttattttaatttatttattatttattgagtatgttattaatgtgtatttaagattttgggtaatatatggattatatacgatatatatttttgtatttttttttgatattaataggaagattgtttttatgaggagtttaaatattttataaaataagtataatttaaatattatttttggtcgggtatgatggttaatgtttgtaattttaatattttgggaggtcgaggtgggtagattatttgaggttaggagtttgagattagtttggttaatatggcgaaatttcgtttttattaaaaatataaaaaattagttaggtgtggtggtaagtatttgtaattatagttattcgggaggttgatgtaggataattgtttgaatatgggaggtagaggttgtagtaagttaagattatattattgtattttagtttgggtaatagagtaaaaattttattttaaaaaaataaaataaaaataaataaataaaaaatataaaaattagttgggtatggtggtgtagttttgtaattttagttatttgggaggttgaggtataagaatggtttgaatttgggaggcggaggttgtagtgagtcgagatcgcgttattgtattttagtttgggtgatagagtgagatttcgttttaaaaaaaaaaaaaaagaaatatgatttttaatagaatatgaggtaattaaaaagtaatttaattaaggtgatagtgtatttattttgggtttggtattagttggaaattattgttttatttgtattaagtttattcgtggagaagttttggttttaggattttaagggtgttatgcgtttagtttttatagtattttttttggaggcgatttttgttgatattttttttatattaacgaggtgaatttgttcgggttattttttggtaaattacgaagttatagtgtaagtttaggtttggggataggttagaatgtaagtttaggttttttataagttcgcgtttttagtgtttggggatatagtttttgattttaaagatttgtagaacgtgaaggattagattttgaaattttattttataaaataaaataggttttaataagttattaggttttaaagatttatttagttattaaatataataagatacgtattttttaaatataatattttatgttatattgttaaatgtattttttagttatattattaattttagtttttagattattttattgcgatgtatcgttggatagtttgttgagaatttatttaggacggtgtttgtgtatggaaatatttcgttgtttagtttggaggggtaagtaaaagacgttgggatgagtttatattgggtttggttttattttaggtatgttgttagtgtatttgaattttagttttattattggaaaaatggttttgatgatatttattttgtatatttgtttgaggaaaaatgagaataagtttaaagttatcggtataagtttttaattagtggtagttatatgtagttgaaatggggtaatggagagtttagattgtttttattttagatattattattataaatgaaaagtttaaaattatagtatatatttttttttttaagatgaaggtagtttttagatgtagaattagtcgatttgagatgtttgttttggtgattggttttttttaagttattttataagtttttttaggtttttgatgtttattttttatgtatgttacgttcgtcgtttttatttagttaggagggttggtttaaaagtttagtttgtatcgaaatataaagatgggatgttgtgtttatttttttttttcgattttttttatagttgttttttgaagaagaaatgagatattgttttcgcgcgcgcgtgtgtgtgtgtgtgtgtgtgtgtgggtatgtgtgcgagagagagagagagtatgtgtgagagaaagataaagtatatttttatttaaaatatttttttttttgttatgtggattttttaatttaatttttttggttagaatgtatttttaagttttagtaggacgtgttgtaatatgtttttaaatatttggtatttattttttatttttgtgtaaatgaaaaattaataagtttattttttgaagtggaatatggagtttttgattttattaatgggagttaggtaatggcgcgagggttatgagttaaagttggttttttttaggattttgggtagttttttaatttttttgagttatagttttttcgttgtaagtaggggttgttattttttttttattagagttagacgtgtaggggagatattagttttttaataattggggttaaaagttgagaatgtagaagatattttttgtcgttttgttttttgttttttttatgatttttgtagcgagaagtttaagatagtttgttattgtttgggggtgggggtcggggtggtggggagtgtggatttaaatttaggggtgtttttggtttagttttattttttttggtggaatgaataattttgatttttgtgagtgagattttatgtttttgtgataggtaggaggtatgtttagagatatttagataaggtagtgttttcgtagtagatttagatttttaaatgaaatttattttaaaatatgtaagtaatagagatatatttatagtattgagtttataaatatgaaaataataatatagattcgtaatattttaaacgttgtgagcgttttttttaagatgttttttgtttttttagaaatataagaaatttttattattatttagggtttgtttttcgttgattttttgtgttgtttttttttaagagttttgtgtagtttttttttttattttaggtttttgattagatgatatttttttttaaaaagttttttgattttttaaaaatagtatttttgttattgtttttttttttgttttattatatttttatttgaaatttttttttttatttatatattattttgtttagtatgttttttttaggaggataggagtttgaggcgtgttaggagtttgtttttttgattttgtgttgtgttttagtggttaagtatatattaagtgtttagtaaatatttataaattaaatggatgttatttaaagaatttaatgagtttttaagatatataaaaggttttagaggtaatatttacgcgattttgattttaattgtatttttggagaagtattagtttgtatgtttttgttttttttatttgtattatatttgttattaagaattgtttgttattgaagaaatatatagttagtttttttttagtttattataaaaaatttttttttttttaagtagttgtatagttttttataaagtattgttgtttaagtttttaaatatgtatgttggagttggagatatttatgtattttagtttttagtattgaagtcggtaattatggagttgaaggtttaggtttaggagttatagcgggagaaaagttatacgatttttttaggttttagtttattttttttgtaaatattggtaagtgatatattttttagggaaattttttttttatatgtttttggaatgtatagttagtaataaatttttaagtagtataaaataaattagatttattttttaagtaagtgtttatttttaagttttaaaataaatatatatttgtttaaaataattaaaatagtattaaaatgtaggatttaggaaatgtaagtattttataattttatattttagagataagtattattttgtttgtaattatttttttagatttttttatatagatttttatgtaataataataatatttaatgttttgaaatttttttttttttttgagatcgatttttatttattttgttatttaggttggagtgtagtggtgtaattttggtttattgtaattttagtttttttggtttaagtgatttttttgtttttgtttttcgagtagttgggattataggcgttcgttattatatttaagtgatttttgtatttttagtagagacggagttttattatgttggttagattggttttaaatttttgattttaggtgatttattcgtttcggttttttaaagtgttgggattataggtatgagttatcgttattgcgtttagttaagaaatttgttttttaatgtaataatgtatttatttttttatattagtatatatagatttattttatttttttatttgttgtaaaattttgtttttatttgagagtatattttttttttttttttttttttttttttttgagatagaatttcgttttcgtttaggttggagtggtgtagtggtcggatttcggtttattgtaaattttgttttttaggtttatgttatttttttgttttagttttttgagtagttgggattacgggggtttgttattatgttcggttaatttttttttttttttagtagagacggggttttatcgtgttatttaggatggtttcgattttttgatttcgtgatttgttcgtttcggttttttaaagtgttggattataggcgatagcgtattttttgaagagatagtttgtggtttgtggttttttcggaaagtagttttttgttgggtgatgattttttattatggaggtgattgttttagtggttttatttttagattcgtagggaagatgtagttatttgaatggattttttgtggtaagaaatagagaattattttattttttaaaaaaatatgtttttggatgaagaattttttattttttaataagtggtttttttaattattagagttattttgtatgtttttttaaagtgattttttttttgttagttagaataaaggggacgtataaatgtatttttcgtgtgaaaatgtagattgagaggttttagtagtgtatttttattttttaagattcggtttaaatgtttttttttttgggttattttttggatttttagtttattttacgtagcgtttttttatttgttttgtgtttttatggtatatgttattttgtttttatttattatattatgtttatgtttttatttttttttggagacggttagatttatttaagtaggattgtttttttatttttggtattttatatgatgtttgatacgtaagtgtttattaaatatttcgtgaatgatggaatgaataatagaatatgttagatttttagtttttgttgggtttgttatagattttattatttatttagaggttttttttttttttttttttgtgttttggtggttatttttttttttattgggttttggaattagttgaaagtttaatggtgttaagtatttggttaataggaagatagtaattaaattggtgaaaatagtagtttgatatggtatgtagggaagaatattggattgggggtaggaggtttgggttttggttttagttttgttattaatttatttatttatttatttacgtatttaataatatatagtaatattacgttgttgtatgtatatatatatatatatatatatatatatatatatatatatacgggggtgcggggtattgttttgagttttgtagatatagtggtaaagaagaaagataatgttttagtttttgtgggatttattttttagaggcgagatagatagatagataggaaaaatatttaattagagtgggttgaggagggagagtatttattttttttgtttatttgtgtgatttttttttgggaggttagaaaagagaataggatgacgtgataggaagtgaagggtgtttatttcggtttggtggttaggaagagtttttttgaatattgatattttagttgagatgtgagtgatgaatgggaattagttatttaaatattaaaggaagagtgttttaggaagaattgttagtgtaggggttttaaggtgggaatagatattaagtttttaagaaatggagagattagtttggttggagtagaggtgaggaggaagtgagtgtggagaggtagatagaaattagaatttattttgttttgaggattttgaattttattttaagtatagtaggagttatgggaaggttttaggtaagagtatgatatggttatttgggtttgattattaagaatggagaataaaatggttatagatggattagttgaggagtttttgtggttatttgggaaatagtttgatggtggtttgggttagagtgattagtatatagatggagagaagtgggtaaatttggaatgtgttttggagataaagtggataagatttgttgatgggtcgtaggtggaagatgaggaaagtcgggaatcgagattggtttttagatgtaaaggttgaaaaattaggtgaacgtatttgttagttgttatagatgggaagtttggagggtgagtttgggagaagaatttaagttttttatggataagttatgtttgagttgttttattagatatttaagtgaaaatgttaagaaagtaattagatatttaagtgaagtttgggggaaaattagggttggagatagagattgggaagttattagaatatatatggtttttaaagttatgagattggatgggaatattaagggaggatatttagaaa

SEQ ID NO: 1921 - DNA, 18218 bp, Artificial Sequence
  chemically treated genomic DNA (Homo sapiens)
ttagtaatttatatttatttattagagagatgttatgtggaaatatgtcgattgtatttgaggaaggatatttaatttaatttttataggtgaatttagcgatttttttaaatgatttgtattttttaaagtgattattttagttggtatttcgaaatataatttaaagttttttgttagttataaatttatagaaatttataaaatttagagtgttttatgttattattattaaatatttattgaattttttattaatgattttttagttattatatagagttaaatatttattttgttatttttatgtagagagatttataatttaaatttggtttaaatagagtgggaaatttataaaaattatgtttatgaggttaaatagttaagtaatataagtttttgttttttattgtaatgatttataaatgatagtggtaataattttaaatagagaatttaaattttttagttagtaatttttgtaattattttttagttttatggggttaattttattggggttgattaaatttaagttgtgattttttataaaaatttaatagagagtttagatggtttaataatatttttttttgtgagaggaaataatttgaagattttgtttaattaaagtatttgtgttggtgggatttgaatgaattgttttttttttaaaaggagtttgtattataaataatttttataaaatacgaattatttaaaaatagtgtgttgtttttagtattttagttatgttttaggattagagttttatgagtatgatattttaaagttagattttgatattatttttgggattttagtttgaaaatatagttttggaatattaatagaataaggttgtgtggaataaaatgttaagaaggttaatgtattattttttttttgttttagttttatgtttataattattttaatttttgttaaaatattttttatagtaatagttaagatataattagtattttttttttatgttgaaaatattattggtatttataaaataaatttggggaaagtttttaagtattttaatgtagtaaatggttattgtggattgatatattattatttgtttagttgaaggattaatattttattttattttgttttttttttttttttaagtaggtttaattgtatgagatagagagaaaaagagaagtttaggtaggagatggggataaggtaaagagtggaaatatagttggaaattaagtaaatattttataagtgttttggttatttagttatttatattattattttttattttttttgtgtattttgtttgtaattaaggtgatattttgatataggttgttttttaaaagtttgttttgtattagataggttaaagtattggttaattttgttatgagtggtaaggttttttatttggttttttatatgtttttgattgagattatagaagttaaagttgttatgattaaagatttttagtagggggtgtagttgtttttatagggtaagtttttttgaagttataatatatgaaatatttgaatattgtagtattattattaatggtagaagttggaattatgataattttttttatgattgttatgttttttgattttaaaaagattatgtatattaatattttattaggatgtgatgaagaattagagatttatgaagaaaatttaaattaaaaatcgaaaatgtttgataaattttattttaatttttttaaagtaaacgaggaataaagagtttagttattttaattatttagtatagtagaagagaggtttaatttttttattttagataagaagagtagttgatttgagagggtttgttaatatttattttatttttatttttgttcgatatttgtgcgcgcgtatgtgtgtgtgtgtaaataagttatttatttttttaaaaattatttttttgagtagggagggtgggtgttttaaagttttttttttgaagttttggtttttgattaatttttaaagatgttattttatatatttttttttttgttttttgatgttttttatttatggatatataggtattattagttatagaattgtggtttttattttagatttttattgatatagaaaattttattttttgagaagagtaaattatatataataatttatttgtattggtaaatatttttagattattagtattaataagaaacgaagttttaaatttttaggttttttaaattaagataaagaattgaaaataatgtcgattatgaaaattattgtttggaaatcgtgattttttttttttttttaacgttttttggtgtttttattataagaaaataaatgagattttaagttttttttgtttttagtattatgttttataattgaatattatatttttttaacgttttttttagaagttttgatttatttggttttggtttatgttgatatatgtttatgattattaaaatttttgattatttaggatataatttttaaggtatttttagggtgtatattttatagtatttaatattttatttaggttatgattttgaattgtattattataatattaaaaagtaattttggttaattttagtattttacgtaatataagaaataaagaataatttgaatttaaaatattttttatatgtttatttcgggtatttttaagggtttttagtataaagataaaaatatgcgttggaatgtattaatattttaatttatataagtggtgtagatatttatggtattagtattatattttgatggttggattatttattaaatttttttttttttttttttatttttttttttttttgtttgttttttttgtaagttttttttcgtattttttttttttatttataatttgtaattgaaagaaagaagtagttatagattttatttaatttatttttaatttatttggtaggtagggtttagatgtaagggagtggttcgaataaagtattttagttatgttttttagaaattagggagtaagagatatatagaaaaattagaaatgttttttttatttttattaagtttatttttgagaaatatgaagggtaggaagacggaaaaacgaatagaatttttgttggaatattgtgataaatttattgataaatattttttaatagatttttattaataggtagtttttgttttttttattgatagatcgtaaatgtatttttggttggtagtagttgtattattataatataaaagtaattttggttaattttagtattttatgtaatataagaaataaagaataatttgaatttaaaatattttttatatgtttattaatattaaattatttttaatgtaggaaataaatatttttttaaagaggaatttttttttaattatttttttttagatttaataaattggagtagatgtggttttgtttatttttttatttgttggtaattattttaagttttttgtgtaaggtagatttcgatgatttcgggaaagttataggattttagtttttttaatggtaaaagtaaaggtagtggtttttatcgtttttttttattgtattatttagcgttagtgtttttatgagaaatatatttaaagtttagtgtgttttattttaaaatttgtgaaatttttagagttttaaaaaagtgaatatgtttaaggtagtataataaaagttaggtggacgatagtttttaaagttaggttggtagtggcgtgaataggggttttttgggttattttgagattcgttttacggggtttttcgatttacgttttggtttttcgttttatttttatagaacgtattgaattaggggtttgtattttcgtgtcgtgtcgagtcgacggagaaatggattttttttttcgtttttgtggagtttcgttttttgggtgagtgtggtatcgggttttgggcgggtgatgtttgtagttggcgagcgatttttagttagaaaattggttgcgtatataggcgtagatacgcgaatatgtttttgcgaacgagtttgggcgtatgttttttttttttgttttttttaatgtttagagattataaggggatttatcgagaagtattcggtgtttatgttcggtttggaatcgcgagtataatatttggtttttttgtagtacggtggtttgtttttgagttacgattagaaatcggaatagaaggaaagggagaagtaggggaggttcggggacgacggcgtttcgggtagtaaggtagtagtttttaaagcgtggaggatgggattgaggaggagtagaatacggagaaagagggaagttgaggaaaaatatttacgttaatgggtaaaagggaaaaggtgagaaggaatggagtaggggagggaattaatggtgggagaggcggaggaagaagggggaggggtagaagttaatgggggagtggaggggagggagaagtagaggggaggagggagcggggacgcgagcgaggacgcggtttcgcgcgttcgttttttttttttcgattggatagttcgcgtttttttaggttttcgggagacgagggtaggggcggggtcgtgtcgggtgcgcggcgcgggaggcgtcgcgaggtgaaggggcggggacgggggattgtggggagggtagcgcgggttcgcgcgcgcgcgcgcgtttcgtttaggttgcgtcgtcgcgtcgtcgtttcgttttcggtcgggtgtgtggttgcgcgcgtcgggagagatgttgaggtaaagttcgggagagagggagagaaattcgttagcgcgagggagttcgagtggtcgttattattgagttcggcgcggcggcgggcgttggggaaggggggagggacgggtcgtcgttggtggcggggagggagggagggagggtgggtgagttggttgcgggagtcgtggggtttagggtttcggggcgtgtgtgtcggggagggcggggggaggtggttgaagggacgcgtcgttcggtgagcgcgtcgaggaagagaggcgagcggagagtggaggaggaggcggcggcggcgggagcggtttttaggaatgtcgttgtcgtcgttatcgtcggggtcgttgtcgttgaggaggagacggaggagatcgacgttgttaggtaggattttgcggatttcgtttttttaagtttgtttgttttttttcggacggggatttttttgcggttagttgtttcgttcggtcgtcgttgtcggttgtaattagttgaaggggttggggtttcgcggtcgtcgaggggagtttggcgttgcgttcggttttcgtaggtcgggcgggtagtagttgtagcgttagggatacgttcggcgtgaagggtagagaggtcgggggagggggtgttttttttataggtgacggggttagggtcggcggaggtttgatgttggtcggggatcgtcggtttcgttaggcgttcgttttcgttcgtcgttttatttgttcgagtttcgggtggttcgtcgagaggggaggtggcggtgttcgttggtcgggttgttgttgttaacgagttttatttggaaagggtatacggggcgggtgtagattcgcggaaatatagtttcggttgtaaatttaaacgttttgtaggggggatcggtttttttatttttttttattttttcgatttttttttgggttttttttattaattttttatttgttttgaagtttggagtaagatatgagaagttgtattgcgtatttagagtttagagttttatgggttgattgcgattgggttgaggttttgatattgagttttcgttagaataatttttagattttttttttttttttattaaagaaaagtatcggggtgggggtggggagtcgcgcgggagcgcgcgcgtatttatttatatagaaatatttttttttattttttttttttagcgttattagaaatgtaagagagttggaggttcggggtgtagttgaggttgaaaggtgtacggaagtaagggtaaattgttattaggtcgtttagtaaaatttcgaaaaagttgtaggggagacgtttatatttttattatgtgatagaaattcggatttggttatcgtttaataaatgggaatttaaatattttgagatagagtaagataggtatatagatgggtttgtgtttacgttttaagtttaaatttttatcgattatttatttttttttttgtgataggtaggaaattgaatttttttttaaatgtttaggtgtaaaatagtaaaatgtttcgttgtatttattagtatttgtttatgttgttttttataggtaggggcggggggcgagtttgttaattttatttaaatttagaattagtatttagttagaatgttaggtggtgtttattcgtatgaaggatttcgtttattttatgggagtttgttttatatttttatttaaaatggtttttttaataaaaattttatttagatgtagcgattagatatttggaataatgtttggtttaaaaatacgttaatgaaattttttgttgttaattttagtttatttgtattgtaatacgataaaacggtatttttatttagtgtttgtagataagtattattaatcgtttaggtaatttattagatagttttttgagtaagattttgtttttattttaaattttttttttattttttgtttttatttattttttgtatattaattgatttttattatttttatttgtagtataaagagcggtaagtatgtgttattaaaaatttgtaaagatattggagtaatttatgattaaacgtattggagtgaaaggttgcgtatatttatgtttgtaatttttaagaaatagtattattgatttaattgatttaaagtagaattagacggtatagatgattaaataattattgatttggttgttttgtgtaggttgtgtttttaaatttagattaatatgttttattttgttattttttgtatattaattattaagagtattggggagtgaggtgggttatattttgatgtaagaattgcggtagaattttgttatttttatgagttttgtagtgtttttttttatttaaacgattttagtaatttttaaaatgtgttgtaaaattattattttaattttgttataagatatttattttaaatgttttgaaaatcgttttttttttttatttgtgtttgaaaagtatattagtatagttatttttttggagagttattttgattttgaaagttaagattatttaaggaatgaatattgtatttgtattttttttttggatttgaagtagcgataataagttttttaatttattttttttaattgaagaaaaagttaggttttataaagattttattaaattttattaatattggtaggatgtaagatgagtgttggtttttagtggttattttttaaatatgaaatggtataatagagatttttttggtagttatagaataagttttgtcgtaattgtagtttttatagatattattttaagaattatttatttgggttgtatggtttatagttttttttttgtatattaagaaggtgtgtagtaatataattggttgaagaagtattgtatagtgttgttttagtgatgtttatgtttttaaaagatatttgtattatatatttaaagtatattaagggaatttaatttttaaaagatttgtgaagaaatattagtagatttattatttagtaatttgagtaattaggtttttgttttaagtgtaggtttttgtcgattattttattgaaataggaaaaattatattagaaattaagaaaaatgttttaatgttaagaattttaagtatgaattttaattggtttttaaattttgttttttggatttttgtgggttttttttttagatgttttgagattttttatgataatttatttttttaaattaggatagtttttatttttatgtattaagtgtattgtatttaaatataagaatatttaatttaattaaatataagaaaaatatttattatttaaatataagaaaaataattaatgggtattaggtttaatatttgggtaataataaatttttttgatatgagtttatttttaaaataaatttgtatatttatttttgaattttaaagttaaaaaaaaaattttttttaaaaaaaaataaaattgatttgtattaattttttttaagtttttgattcgttatttattagtttagattatttttatttagtatttattatgtgtttagttttggaaatattaagataaattagatataggtataatagtttaagttgtataaaggagtaaatagttaaaagtattaagaggtgtaggaaagagaatgtttgttttttttaggatttttgggaattatttatagaagaagaaatattttgagttttaattgtaagtaggagtttagatgtaagagagattaaaaaggataattttttttttttttttattgtgttttggaagttgtttatagtattttagatttgtagggaaatgaaatagattgttgatgtttggttatatttgtgttttattttatagaattattatttgggaaaaagagtataattttgtaattttgtggttaaaatgattagtatgttatttgtttagagttttaagttttttattatgaagagttaatggtaaaaatggatatttatttttttagtgttagattagatttagtttattttattatttttgattaatattttattgagtagttaggtattgagtgatataaaaagtataaaatattgtttttttaaaagattttttaatttttgtggagagatagtaagtatgatattttaagaatttgaggtatatttagggaagtatatattgatttaaaagttagtagaaaggaatttagttaaaggaagtgttatttggattatatattgatttaaaagttagtagaaagttatttagttaaaggaaagtattatttggaagtagtatataattgggataatgaagggggaaaaagatatttagggaagttaatgatagtgtggattgaaagtataggtaagtagaggatagattagtagatgggaagaaaatataaaaatgtgtagttttagttatttgggaggttgaggtaggagaatggcgtgaatttaggaggcggagtttgtagtgagtcgagatcgcgttattgtattttagtttgggcgatagagtaagatttttttttaaaaaaaaaaaaaaaaaaaaaaagatgtaagagtattagttttgtattttatgagttagagtgaaagatttggagaaggtattaatgtaagagtgatagaaggggtgatgtagaaataaatacgtaacgttggtataattatttgtttagttattgtatttggtttgttaaatagttttggaaaaatttttattttggtttttgatatggtataatttgtttattttttttttgttgattatgtttttttattgatttaaaattgtttttttttatatttatttttttagagttaaggtaatattttttttagagaattagtaaaaaattaatattattataatttagagtagcgattttttttggtattagggattggttttgtagaagatagtttttttacggaatcgggggtatggttttgggatgaaattgtttttttttagattattaggtattaattagttagatttataaagggagtaagtaatttatagtttttgattttttgagaatttatcgttgttgtggaggcggagtttaggtggtaatgttcgttttttaggttattttttattttttgttgtgtagtttagtttttaataagttatagatggttattagatcggggttggggatttttgatttagagaatttaagatttagatttttatttttttgtattaattaagtatttaattttttatatgttttttttagaaaataagagtattatattaaatggttttataggtaattttttgaagtttatgatgttgaaatttatgttaataattttgaatttgttttgttttattatcgaggttttatttgtttttggaaataatatttgaaagtgaaatgaattattatttattgttgaaattgattagttttttattaagaaatattggtttaatgtgttgttttgtattttttatgtttagtagttagttattaagttttttttgttttgtattgtttttttattgattaattaattaattttttttttgagatggggttttgttttgttatttaggttggagtgtagtggtatttagtttattgtagttcgttttttgggtttaagttatttttttgttttatttttttgagtagttgggattataggtatacgttattacgtttggttaatttttgtattttttagtagagatggggttttattatgttggtcgggttggtttcgattttttgattttaagtgatttgttggtttttgttttttaaagtgttgagattataggtatgagttattgtatttggttggattgtttttttaaattttgtgatagtttacgtgtatttagtttgtagtatttgtttattttttgggttttgtgtttagttttgtattttttttttagattaatttgtagtggtttttttatggtttatgataaagtttaatttttgtttttttttgagatttagggttataatttatatgtttaaaatagtatttttttttaatatgggtattgtggttagttattttattttaattgtatatttggagagacgattttataatttaaatttcgtttattttttaaggtttatttaaattttttttttttattgaaattatttatttgttttaggggtttgtaaattatggtttttgggttaaattttgtttattttttatttttgtaaaatggttttttatattttgaaatggttggggggtaaattaaaagaatattttgtgatatgtgaaaattatatgaaatttaaatttttttaagtaaagtttattgtaatataattatgattatttatttaagtatagtttatgagtgtttttgtagtatgatagtagagttgagtagtgtgatagatattgtgtagtatgtaaagtttaaaatatttattgtttggttttttatagaaaaagttttttaaattttgagttattttaatttgtatttttatttttttgaatttttgttgtatttattagtattatggtatagtatattgtttttatttttttggttatggtattgtttattattatgttttttaatgtagtgtggaaagtgttttttagttttttttttttttaatttatattttttttaaagtttatattttttgttgatatttttatttaattaggtgtttttattttaaaaattgttaagtcgtatttaaagttgtttgtatgatgaaaatgacggtttttttattatatggtattgtaatattgtatattaaattatgtttttttttttattttttggttttttaaggtggagagaaaaggatttagatattggaaggaaggtgaattattaagttatagttattggtttggtagatttttttatatgtatttttatatattgaaaatttttgataaagttaaattgatagtagttaagtatagtaaataaatatttatagttgtttatttaggttgatgaatatgggatgatttttgatttttttgttttttatatagaaatgaaagaatttagaatgatttgtatattaaggttttagggaaataatatgttattagagtagggtgtatattaaataatagggtagaagttaatgtgtttgggaatagttttggttattggttttttatatatttttagtagtgaagttttttttaaataaattgaaatattagaagataaaaatggttaaaagtagaattatttttgttgcgtgggtttgcggagtttttagagtattgtttatttggattttttttgaagtattatatatttttagatttattgtttatatatttttattgtgtgttaatgattatattatagttttggggaaaaaaattggattttttatgttagtatattttgttgtattagatgtaatgggtttaaagtagtatataatttttgttaattgtgtttataagtgtgattttaggattatttagcggtttggaagttgattatttttagtttggagattgagttatttatttatgaaatatttattgagtttttattgtgtattaggtattgttgttggagatttgattttaaaataaaattttaatgtttttacgttatttagttattacgtaaattgtttaaatttttaataggttggttttttttttatttgtttgattatatttttgttttaagattaatttataggaataatgattttttagggtttattttatatataaattgtgtgttttttggtataaattgtggtttaaagatgaagtattatttcgagtttaggattttgagattataatatagtgagattttttataaaaaaatttaaaaattatttatgtgtggtggtgtatatttgtagtcgtagttgtttagaaggttgaggaaggaggattatttgagtttaggtgtttgaggttgtagtaagttatgattttgttattgtattttagaatgggtgatagtgatattttatttaaaaaaaaagatagattatgggatatgagttatttttttataggtattatattgttgaattatttagttattttatgtgtgttagaatgattttttgatttttttttattttttatagtattgataaatttattagaaatagtaatattaagaaaaggtaggttgggaggtggtttacgtttgtaatatttatattttgggaggttgatggaagaggattgtttgagtttaggagtttgagattagtttggggagtataaggagaatttttttttataaaaataatttttaaatattagttgggtgtggtggtgtatgtttagagttttagttagataggaggttgagatgagaggattatttgagcgtaggagttcgaggttgtagtgagttatgattatgttattgtattttagtttagatgatagattaggagatttattttataaataaataataaatagtaaagtaatgtattagtattatattttgtttatttttttgttgttgttttttattgttgttgaataaattatttattttttagtgtgtagttgtttttttattttttagttgtttgtaaaagtttgtttaagattgtagaatatatgataatttttgggttttgtttttgttttttttgaatatttgtttatataagggatagttatgtgatttaaagaagatagagtatgtaattattaagttttttttgtgtgattaggttttggaaatataattttttattataaattttgtgattttattaaagtttttaaatagttaaaaattttgatattaattatatttggggttgtatttaattttatttttgaaaaaaaatttttttaagatgttataaaattagattgttatgttggttaagtatattattatagattgtagttagtttttatttttatggttttatttttgattaaatatttgagtttaaattaggatttatgtatttaattagtagttgttatgtgggaggtattgttgtaggtttttgatatattggtgaaataaagatttgtgttttgtgatttttttattaagagtgggatgcggagagggatagagttaatgatataaataaggtgtatagtaagttaggaaggtaaagagttagtagtggggatttttggggatattgtgaaaagttaagtgtaaagaatatgttttagtatgttgtttttttttattgcgattgaagtagaatgagaaaggtagaatagtattaggggaggttagagaggtgagagagggttggagaagattttgtaagttattgataggatttgttttttatttttagtagtattcgagagttttaaataaaagaatgggaagttttgatttatgttttaaaaggagtattttggttgttttgatatgaatagattgggaaaagggagtagaagtgaagtaaaggagttagtttagaagattttggagtaattttgggttagagatattgatgggtgagagtagtaaaagtagaaaaaattgaaaagttaaggatatattttaaagataggattattaggaattttttgatatggtataatttaaaagtataaaatatttttaaatatatattttttattaatgaatgtattaattttgtgaaaaggtatatgttttagttttgatttattgagattttatttttttagattttttgtagaatttttttttttttgatttgtaaaggaggatgtagtgtttgaatggtttagtaaaatattttagaaaatttagttgtgaatatagttttgttttgatataattttaatttttataaggatatagataatttttataagattattttaaagataattttaaaggtagaatgagagattgtattgtaagttattaaaagtagtattattgtttaaaaaagtaaaagattgggaatgaagagattttttttttaattttataatttttagtaggttattgttatttttgttttggtttttttattagtaaaaataaatatggtgttagatattataagaataagttgtatgaaagtaagtttatattaaaaatagatgtgtatgattgatatagatattaagattgaaaggaatttttaagttaatttaaatagtttttatattattgaagatattgggtattagtttattagtgggagtatgaaaaaaaataataaattttttttgtttttagtattgaaaaaaaaaattgtttggttaatagaggatagttttgatttggttgtaaggggttaatggataatttgtatatatatatgaattattttagtgtttgaaatgaagtttttttaaaatttgttagagttaattttatgagattttttgtttattgaggtggtaatattatatttatttaaataaatagttaaatttttttgagggtaaggtgataatagtttttttttttttattttggggttttttaaattattttttcgttcgttttttttcgttttttttttttttaaattaaagttttttgaattaagtaaatttataaattagataaggaaggtatttttttggtgagagttggaaggatttttttaatattttttttatatttaggtggaagaatttttttgttatagtttgaaaattattatatggtgatttatgatataagttttggagttgattttaaaatattagtaggtggtttgtttaatagttttgttagaagaataaggatgtttttttttgtatttaatgggtattttattgtgaattgttgtggaaattatagaagttatgtgaaattattttatttttaaatttgaatatttaagatttatattgttattgttaaattaattaggatgtgttgaagttttagtattaaattttagttttattatagttttatttttgttaaaaagttttttagtttttagtgattaatgaaagggttatgatttaatgtttttattttttatttaagatttttttgtttttgaaattttaaaaatatattttatgatagagtgtttttatttttattttatttttttattttaatatatagagtatattttagtattttggggtttatgttattggagagtagaagtgagttttaatgagtaatagtatttagaattatattatttgggtaagtatatatgattggaagataagggacggttttatttttatatgtttttgaattatttttggtttttagaatagatgtttgtttaataaagagttatattttattatgtaattgtagtgtttttattgtattgtaaaaatttttcgaagtaattattagataagtttttttttgatgtatattttaaagtatattatttgtaggttttgtttttttaataaaaaaaaagaatagattttgtatttttttgtgtttttaatattttttttaattgttagatatggaattattgtgttgttttttatattaagttttatttttattattgtgtatataattttgttgtttagaatatattatgtttttttttttgtaaatatttataaataaagtgtttatttgtttttttatatagtttaggtaaagaatattaaagttgatgttaggtatagatttttagttgggttagattaagatttgtaaatattttatttaataaaaaaagttaataggattgaacgggattgttttagttttttttattatatgtatatattgttgttatataaatatttgtaagttataagttttattatattattttttataaattttaagtagttttttatggttttaagaattaaataaagaattggaattaatatttattaagttttttggttaggtattttatattttaaaaaatgatttatagatatagttttgttttatagatgaaggaatttttttaagaggtgtagggttttattgttgttattaattagtaaatgataggagtcggattttgaaattagttgtatttatacgtggtttttatttttttgtattgttattttaatatagtaatatttattataaaagtgaatttaatatatattttgtttgattgttagatggttgattgttaaagttaatatttagttgaggttgatggaataaatttttaaaatatgagaataaatttgaaattttatttttaaaaattattttattagaaatgttagttaagattttaaattatgagtatagtttatttttattattagttagtgtaatatatgttcggtgtaattgaaatagatgtttatttgtaatagaggttagtggataagtaggtatttgtgggagaggggaggaagtggtttttttttattttttttagattttttttgttttttattttgtttggattgaggatattttttatatgtgttgatgtacgttgttagtgatttttttttattttatgaaatttggaggtggtggaaatgatgtagtttttttaatttggttttaaaagaatgtgaaaaatttttaaaaatttttttaaaagattaatttattatttatatgaaaataagtaattaaaattaaattttatgtaatttttaaaagttattttgtgttgttagtatattaaataattttaaaagattgttttagatatattattttaaaattatttagtttggtgttatttaaaatgtggtttttgtgttttttgtaattattatgagaggaagtatatttagaaattaagagcgtttaggaatagtttggtagttttaagttttttgaatttaataaaaaattaaggtttcgatgtaaaaataaatttcgttatattttgtagttggttttataggtttgaaataaaatttggtttttagtttaagaagtagtgatttatgtaaatgttattattatttgtattaagtgtttatttatttttgtttttttttaagtatttaaatatttttaattttgggggggtataatatttggtagattttttaaaatatatttgaaatttattgtaaaaaatttgtatattttaaaattttattaaatttttatgaaattttgttttaaggaataagttttaaggaattttataatgtaaaaagtaggttgttttgtatttttaagttgtgagggagttgtaagttaattagtatattttagttattattagtatcgtttttagtgatagaaggtaggaaaattaagggagtggaaaggattagttgtttttttaaatttataggaaggggtaattagaggtaaaatgtatatttggtttaatagaggtttattttaaagtttgtgagatattatgttagattttgtattttgttaggtttgttttaaattttgaggttattttgtatttataatagtaaattataaattgtttatgtagttattttttaaaatatatgtattattattattaatttgtatggtgttttgttgtaaatatttttattgtaatttagtgtatgtaatttgtgattaagatttgtttttttttttttttttttatagg

SEQ ID NO: 1922 - DNA, 18218 bp, Artificial Sequence
  chemically treated genomic DNA (Homo sapiens)
tttatagagaggggagaaaaagaataaattttaattataaattatatatattgaattataataaagatgtttataataaagtattatataaattaataataatgatatatgtattttaagaggtaattatataaatagtttatgatttattgttataaatataagatgattttaaaatttaaggtaaatttaataaaatataaaatttaatataatgttttataaattttaaaataaatttttattaaattaaatgtgtattttatttttaattatttttttttatgagtttgaagaaatagttagttttttttatttttttaatttttttgttttttgttattggaggcgatgttggtgataattaaaatgtattagttgatttgtaatttttttataatttaaaaatataaaataatttgttttttatattatagggttttttaaaatttattttttaaaatagaattttataagaatttgataagattttagaatatgtaaattttttgtaataaattttaagtgtgttttaaaaaatttattaaatgttatatttttttaaaattaagaatatttaaatatttaagagaaaatagaaataagtgaatatttaatataaataatgatagtatttatatagattattgttttttaaattaaggattaaattttattttaaatttataagattaattgtaaaatataacgaaatttatttttatatcgaagttttgattttttattagatttaagaaatttaaaattgttaaattgtttttaaacgtttttaatttttggatatatttttttttataatagttataaagggtataaagattatattttgagtagtattaagttaaataattttaaaatgatatatttgagataattttttagaattatttgatatattagtaatataagataatttttaagaattgtataaaatttaattttgattatttgtttttatgtaggtaataaattggttttttaaaaaagtttttagagattttttatatttttttgaggttaaattaaaagaattgtattatttttattatttttaaattttataagataggaaaaaattattagtaacgtatattagtatatatgaaaagtatttttaatttagataaaataaagaataaaaaaaatttaagaaaagtaagaaaagattattttttttttttttttataaatatttgtttgtttattgatttttgttgtaagtaaatatttattttaattatatcgaatatatgttatattaattaatggtgaagataaattgtgtttataatttaaaattttgattaatatttttgataaaataatttttaaaaataaaattttagatttatttttatattttagaagtttattttattaattttaattaaatattaattttaatagttagttatttgatagttaaataaaatatatattaggtttatttttgtaataaatattattatattgaagtggtaatataaggaagtagaaattacgtgtaaatataattaattttaaaattcgatttttattatttattagttgatgataatagtaaagttttatattttttaagaaagtttttttatttataaaatagagttatatttataaattattttttaaaatgtgaagtgtttagttaaggggtttaataaatattagttttagttttttatttgatttttggaattatgggaagttgtttaagatttatgaaaaataatgtgatgaggtttgtgatttataaatatttatgtggtagtagtgtatatatgtaataaaggaaattagggtagtttcgtttaattttattaattttttttattaagtaaaatgtttataaattttaatttggtttaattgaaaatttgtatttagtattagttttaatgttttttatttgaattgtgtaaaagaataagtgaatattttatttatggatatttatagagaagaaaatatagtatattttagataataaagttatatatatagtgatagaaatggaatttagtatggaaaatagtataatgattttatatttaataattaaggaaaatattgaaaatataagagaatataagatttattttttttttttattagaaaagtaaaatttgtagatgatatattttaaaatgtatattaaaagaagatttatttggtgattatttcggggaatttttatagtatagtaaaaatattatagttatataatgaaatataattttttattaaataaatatttattttgaaaattaagagtaatttaaagatatataaaagtaaaatcgttttttgttttttagttatatatgtttatttaaataatataattttgaatattattatttattaagatttatttttgttttttaatagtataaattttaaaatattgagatatattttatatgttaagatagaaaggtaaagtagaaatgaaaatattttattataaaatgtatttttaaggttttagaaataaaagggttttaaatgaagagtggaggtattaagttatgatttttttattggttattgaaaattggaaagttttttgatagaaataaaattataatgaggttaaaatttaatattaaggttttaatatattttaattaatttgatagtggtaatatgaattttaaatgtttaagtttaaaaataaggtaattttatatgatttttatggtttttataataatttatagtaaaatgtttattagatatagggaggaatatttttatttttttaataaggttgttaggtagattatttgttggtattttgaaattaattttagagtttatgttatgagttattatatagtgatttttaaattgtgatagaaaaatttttttatttagatgtgggaagggtgttggaagaatttttttaatttttattagaggagtgttttttttatttgatttataggtttatttaatttaagaggttttggtttgaaaaaaaaaaaagcgggggagggcgggcgggggaatagtttgagaaattttaaaatagaaaaaaaaaaattgttgttattttgtttttaaaagggtttggttatttgtttggatgagtatggtattattattttaatggataaaagattttatgaagttggttttaataggttttaagggaattttattttaaatattgagatagtttatatatatatataaattatttattggttttttataattagattaaaattgttttttattagttaagtaatttttttttttagtgttaagaataaaaaaaatttattgtttttttttatgtttttattaataaattaatgtttagtgtttttaatgatatgaaggttgtttgagttaatttaaaaattttttttagttttaatatttatgttaattatgtatatttatttttgatgtaggtttatttttatgtaatttgtttttatgatatttagtattatgtttatttttattgatgaagaaattaagataaaagtagtaataatttattagaaattataaggttagaaggaaaatttttttatttttaattttttatttttttaagtaatagtgttgtttttaatagtttgtaatgtagttttttattttgtttttaagattgtttttaggataattttatagaaattatttatatttttatagaaattaaaattgtgttaaaataaaattatgtttataattaagttttttaaggtattttattagattatttaaatattgtatttttttttgtaaattaagaaaaaaaaagttttataaggaatttaaaaaaataaaattttaataaattagaattaaaatatgtatttttttataaaattgatgtatttattaataaaaggtatatatttaaaaatattttatgtttttaaattatattatgttaggaaatttttaatggttttatttttaaaatatatttttaattttttagttttttttatttttattgtttttatttattaatatttttggtttaagattattttaaagttttttaaattaatttttttgttttatttttgttttttttttttagtttatttatattagagtagttagagtgttttttttaaaatataaattagagttttttatttttttgtttaaaattttcgagtattgttaaaaataaaaagtaagttttgttaatggtttataagattttttttaatttttttttatttttttggttttttttaatattattttattttttttattttgttttaatcgtagtggaggaagataatatgttaaggtatgttttttgtatttaattttttataatatttttaaagatttttattgttaattttttatttttttaatttattatatattttatttatgttattaattttattttttttcgtattttatttttaataaaagagttataaggtataaatttttattttattagtatattaaaagtttataatagtgttttttatataatagttattaattaaatgtataaattttaatttaaatttaaatatttagttaaaaatgaaattatgagaatgaaagttaattataatttataataatgtatttagttagtataataatttaattttatgatattttaaaaaaatttttttttaaaagtgaagttgagtataattttaaatatagttaatattaaaatttttggttgtttaaagattttagtaaaattataaaatttatgataagaaattatatttttaagatttaattatatagagggaatttagtaattatatgttttattttttttaaattatataattattttttatgtaaataaatatttaaaagaaataagaataaagtttaaagattattatatattttataattttaggtaaatttttgtaagtagttgaagaataaaaaaataattgtatattaaaagatgaataatttgtttagtagtaatagaaaataataataaaaagatgaatagagtgtagtattgatgtattattttattgtttattgtttgtttatgagataggttttttaatttgttatttaggttggaatgtagtggtatgattatagtttattgtagtttcgaatttttgcgtttaggtgatttttttattttagttttttgtttagttgggattttaggtatgtattattatatttagttaatatttaaaaattatttttgtagagaggggttttttttatgttttttaggttggttttaaatttttgggtttaagtaatttttttttattagttttttaaggtatgggtattatagacgtgagttattttttagtttgtttttttttaatgttgttatttttggtaaatttattaatgttgtgaaaagtgagaagaaattaaaaagttattttaatatatataaaatagttaagtaatttaataatgtaatatttgtaggagagtaatttatattttataatttgtttttttttttaaatagggtgttattgttatttattttagagtatagtggtaggattatagtttattgtagttttaaatatttgggtttaaatgattttttttttttagttttttaagtagttgcgattatagatgtgtattattatatataggtgatttttaaatttttttgtagagagttttattatgttgtggttttaaagttttggattcgaaataatattttatttttgaattatagtttatattagaaagtatataatttgtatgtgaaatgagttttaaaaagttattatttttatgaattagttttgaaataagaatataattaggtaaatgaagagagaattaatttattaaaaatttgaataatttacgtggtgattaaataacgtagaagtattgggattttgttttggaattaaatttttagtaatagtgtttgatatatagtgagggtttagtaaatattttatgaataaatgatttaatttttagattaagaataattagtttttaaatcgttgggtaattttgaagttatatttgtaaatataattaataaaaattatgtattgttttgggtttattatatttagtatagtaaaatatattaatataaaaagtttagtttttttttttaggattataatgtgattattaatatataataggggtatataaatagtaagtttaaaggtgtgtagtattttaaggagggtttaagtaggtagtattttgggagtttcgtaaatttacgtagtaaaggtaattttgtttttaattatttttattttttgatattttaatttgtttgaaaaaaattttattgttgaaaatatgtgaaaaattaatgattaaaattatttttaaatatattaatttttattttattatttaatgtatattttattttgataatatgttatttttttgaggttttggtgtgtaagttattttaaatttttttatttttgtatgggaaatagaaggattaaaggttattttatgtttattaatttaggtaaataattataagtatttatttattgtgtttagttattattagtttaattttgttagagatttttaatgtataaaggtatatataggaaagtttattaagttagtaattatggtttggtagtttattttttttttagtgtttgagtttttttttttttattttggagaattaagaagtggggagaagggtataatttgatatgtaatattataatgttatatagtagaggaatcgttatttttattatataaataattttagatacggtttaataatttttaaaatgagagtatttgattgaataagaatattaataagaggtgtaagttttaaaggaagtatggattaagggaaaaaaagattgaaaagtattttttatattatattaaaaagtataataataaatagtattatagttaaggagataaaggtaatgtgttatattatggtattaataaatgtaataggaatttaaagaaatgaaagtataagttgaaataatttagggtttggaaaattttttttgtaaagggttaggtagtaaatattttaggttttgtatgttgtatagtgtttgttatattatttaattttgttgttatattgtaaaagtatttatagattgtatttaaatgaatgattatggttatgttatagtaaattttatttaggaaaatttgaattttatgtaatttttatatattataaaatatttttttaatttgttttttaattattttaaaatgtagaaagttattttataaaaatagagagtaggtaagatttggtttagaggttatagtttgtagatttttgaaatagatgaatggttttaatgaagaggaaggatttgagtgaattttaaaaaatagacgagatttggattgtaaagtcgtttttttaggtgtataattagggtagaatggttgattatagtatttatgttggaaagaaatattgttttgaatatataagttatgattttaggttttaagggaaaataagagttagattttgttataagttatagagaagttattatagattagtttagaggaggaatataagattgggtatagagtttaagagatagataaatattataggttaaatgtacgtgaattattatagaatttaaaagagtaatttagttaggtgtagtggtttatgtttgtaattttaatattttgagaggtagaggttagtagattatttgaggttaggaggtcgagattagttcgattaatatggtgaaattttatttttattaaaaaatataaaaattagttaggcgtgatggcgtgtgtttgtaattttagttatttaggaggatgaggtaggagaatagtttgaatttaggaggcggattgtagtgagttgagtgttattgtattttagtttgggtgatagagtaagattttattttaaaaaaaaaattaattaattaattaataaaagagtaatgtaagataaagagagtttggtaattggttattagatataagaaatataaggtaatatattaagttagtgttttttaatgaaaaattaattagttttagtaatagatggtggtttattttatttttaggtgttatttttaaagataaatgaaatttcggtaatgaaataaggtaagtttaggattattaatataaattttagtattataaattttagaaaattatttatgagattatttggtgtaatatttttattttttaaagaaaatatatgaagaattagatatttggttaatatagaagagtagaaatttagattttaaattttttagattaggggtttttaatttcggtttggtaattatttgtggtttattaggaattgggttgtatagtaggaggtgaggggtggtttggaaagcgggtattattatttgagtttcgtttttatagtagcgatagatttttagaggattaagaattgtaggttgtttgttttttttgtgaatttaattaattaatgtttgatgatttgagggggaatagttttattttaaaattatgttttcggtttcgtgaaaaaattgttttttataaaattagtttttggtattaaaaaggatcgttgttttagattatagtaatgttaattttttattagttttttaaaagagatattattttggttttgaaaaggtaagtataaaaagaaataattttgaattagtaaaagaatatgattaatagaaagaaaatgaataaattatgttatattagaagttaaggtgagagtttttttaaggttgtttgataaattaaatatagtaattagataaatagttatgttaacgttacgtgtttatttttatattattttttttattatttttgtattaatattttttttaaattttttattttggtttataaggtataaaattgatgtttttatatttttttttttttttttttttttttgagaaggagttttgttttgtcgtttaggttggagtgtagtggcgcgatttcggtttattgtaagtttcgttttttgggtttacgttatttttttgttttagttttttaagtagttaggattatatatttttatattttttttttatttgttaatttgttttttatttatttgtgtttttagtttatattgttattaatttttttaaatgtttttttttttttttattattttaattgtatgttatttttaagtaatatttttttttagttaaataattttttattaatttttaaattagtatgtaatttaagtaatattttttttagttaaatttttttttattaatttttaaattagtatgtatttttttaaatatattttaaatttttaaagtgttatgtttgttgtttttttatagaagttaaaagattttttaagggagtaatattttatattttttgtattatttagtgtttagttgtttaataaaatattggttagggataataaaataggttaaatttaatttaatattagaaaaatgaatatttatttttattattaattttttatgatgaaaagtttgagattttaagtaagtaatatattagttattttaattataaaattataaggttatgtttttttttttaagtaataattttatgaagtaaaatatagatatgattaagtattaataatttgttttatttttttgtaaatttaaagtattgtagatagtttttaaaatatagtggggggaaaaaaaaaattattttttttggttttttttatatttaaatttttgtttgtaattaaaatttaaaatgtttttttttttatgaatgatttttagaggttttgaggaaaataggtatttttttttttgtattttttaatatttttaattatttatttttttatatagtttgagttattatatttatatttaatttattttggtatttttagggttaggtatatagtaagtgttaaataaaagtaatttgaattaatgaataacgaattagagatttaaaaaaaattaatgtagattagttttgtttttttttaaggggaattttttttttaattttgaagtttaggagtagatgtgtaggtttgttttaaaggtaaatttatgttaagggggtttgttgttatttaggtattaagtttagtatttattagttattttttttatatttaaataataaatattttttttatatttaattaagttaaatatttttatatttaaatataatatatttaatatatgaaaatagaagttgttttggtttgggagggtgggttgttataggaagttttaaggtatttaggaaaaaaatttataggaatttaaggaatagagtttgaaaattaattaaagtttatatttaaaatttttagtattgaagtattttttttaatttttaatatggttttttttattttaataaaataatcgataaaagtttgtatttaaaataagagtttgattatttaaattattgaatgatgaatttattgatgtttttttataggttttttagaaattaaatttttttggtgtattttaaatatataatataagtattttttaggaatatagatattattaaaataatattgtataatgtttttttagttaattatattattatatatttttttggtatgtaaagaaaaaattgtggattatataatttaaataaatagtttttaaaatagtatttatggaaattatagttgcgataaaatttattttgtagttattaagaaaatttttattatgttattttatatttaagaagtgattattaaaggttaatatttattttatattttgttaatgttggtaaagtttagtaaagtttttatgagatttaattttttttttaattaaaaaaagtgagttagaaaatttattatcgttattttaaatttaaaaaaggaatgtaaatataatatttattttttaaataattttaatttttaaggttaaaataattttttaaaaaaatgattgtgttaatatgttttttaaatataaataagaaggggagacggtttttaaaatatttaggataagtattttgtgatagaattaaggtaataattttgtaatatattttaaaaattgttaaggtcgtttaaatggggagggatattataaaatttataaagataatagaattttgtcgtaatttttatattaaagtgtaatttattttattttttagtatttttaataattaatgtataaagaatggtaaaataagatatgttgatttaggtttaaaaatatagtttatataagataattaaattaatagttatttaattatttgtatcgtttgattttgttttaagttaattagattaatagtgttattttttgaaagttataagtataggtatgcgtagttttttattttagtgcgtttagttataaattgttttagtgtttttgtaagtttttggtgatatatatttatcgttttttgtattatagataaaggtaatggaggttaattagtatataaaggatagatgaaagtaaaaaatgagaaaggaatttaaaatgaaagtaaaattttatttaagaaattatttagtaggttatttagacggttagtaatatttatttataaatattgaataagaatatcgttttatcgtattatagtataaataaattagaattgatagtaaaaggttttattaacgtatttttaaattaaatattattttaaatgtttaatcgttgtatttagatgaaatttttgttaggagaattattttaagtggaaatgtagagtaagtttttatgaagtgaacgagattttttatgcggataaatattatttaatattttaattgaatattggttttggatttaagtggaattgataaattcgtttttcgtttttatttgtagaaagtaatataagtaagtattagtaaatatagcgaagtattttgttgttttatatttgaatatttaaaaaaaaatttagttttttgtttattataaaggaaaaaataaatgatcgataagaatttaaatttaaaacgtaagtataaatttatttatatgtttattttgttttattttaaaatatttgaatttttatttattaagcgatggttaaattcgaatttttattatatggtagaagtataagcgttttttttataattttttcgggattttattaaacggtttaataatagtttgtttttattttcgtgtattttttaattttagttatatttcgagtttttagtttttttgtatttttaataacgttgaagagggagggtgagagggagtatttttgtgtggataagtgcgcgcgcgttttcgcgcggttttttatttttatttcgatatttttttttagtggaaagagaggaagaatttggaggttattttagcgaaaatttagtattaaagttttaatttagtcgtagttagtttataggattttgggttttggatgcgtagtgtaattttttatattttattttaagttttaaagtagatggaaaattggtgaagagaatttagggaggagtcgaggagatgagggaaagtgaaagggtcgattttttttataaggcgtttaagtttgtaatcgagattgtgttttcgcgaatttgtattcgtttcgtgtattttttttaggtggaattcgttaatagtagtaattcggttaacggatatcgttattttttttttcgacggattattcgagattcgagtaagtgaggcggcgggcgagagcggacgtttggcggggtcggcgattttcggttagtattaggttttcgtcgattttggtttcgttatttgtggagaaagtattttttttttcggtttttttgttttttacgtcgaacgtatttttaacgttgtagttgttgttcgttcggtttgcgaaaatcgagcgtagcgttaggtttttttcggcggtcgcggggttttagtttttttaattggttataatcggtagcggcgatcgagcggggtagttagtcgtaggagggttttcgttcgggagggggtaggtaggtttggaggagcggggttcgtaaggttttatttaataacgtcggtttttttcgttttttttttaacggtagcggtttcggcggtggcggcggtagcgatatttttggggatcgttttcgtcgtcgtcgtttttttttttatttttcgttcgtttttttttttcggcgcgtttatcgagcggcgcgtttttttagttattttttttcgtttttttcgatatatacgtttcgaaattttgagttttacggttttcgtagttagtttatttatttttttttttttttttttcgttattagcggcggttcgtttttttttttttttttagcgttcgtcgtcgcgtcgggtttagtaatggcggttattcgggttttttcgcgttgacggatttttttttttttttttcgaattttattttagtatttttttcggcgcgcgtagttatatattcgatcgggggcggagcggcggcgcggcggcgtagtttggacgggacgcgcgcgcgcgcgcgaattcgcgttgttttttttataatttttcgttttcgtttttttatttcgcgacgtttttcgcgtcgcgtattcggtacggtttcgtttttgttttcgtttttcgggagtttgggaaggcgcgagttatttagtcggagggagggggacgagcgcgcggggtcgcgttttcgttcgcgttttcgttttttttttttttttgttttttttttttttttatttttttattggtttttatttttttttttttttttttcgttttttttattattggtttttttttttattttatttttttttatttttttttttttatttattggcgtgagtatttttttttagttttttttttttttcgtattttgtttttttttagttttattttttacgttttggaagttattgttttattgttcggagcgtcgtcgttttcgaattttttttgtttttttttttttttttgtttcggtttttggtcgtaatttaagagtaaattatcgtattgtaaaggaattagatattgtgttcgcggttttaaatcgggtatgggtatcgaatgtttttcgataaatttttttatggtttttgagtattaaagaaagtaagggaggaaaatatgcgtttaagttcgttcgtaggaatatgttcgcgtgtttgcgtttgtgtgcgtagttagttttttggttgaggatcgttcgttaattatagatattattcgtttaggattcggtgttatatttatttagaagacgaaattttataggagcgagaagaggagtttattttttcgtcggttcggtacggtacggggatgtaggtttttgatttagtacgttttgtgaaagtggagcgagaagttaagacgtggatcgagaagtttcgtggggcgggttttagggtggtttaaaagatttttgtttacgttattattagtttaattttaggaattgtcgtttatttggtttttattatattgttttaaatatatttatttttttgagattttagaaattttataagttttggggtagagtatattgggttttgggtgtgttttttatgagggtattgacgttgaatggtgtagtgagaaaggacggtagaaattattgtttttgtttttattattgaagaaattgaggttttgtgattttttcgaggttatcggaatttgttttgtataggagatttaaaatagttgttagtagataaaagaatgagtaaaattatatttattttaatttgttaagtttgaaagaaagtaattgaggggggatttttttttggggaaatatttattttttgtattgaaaatagtttaatgttagtaaatatataaaaagtattttaaatttaagttattttttattttttatgttatataaggtattgaagttagttaaggttgtttttgtgttataatgatgtagttgttgttaattagaagtatatttacggtttgttagtaaagaaaataaaaattgtttgttggtaaaaatttattagaaaatatttgttagtaaatttgttataatattttagtagaagttttgttcgttttttcgtttttttgttttttatattttttaaaggtagatttaataaaggtagaagagatatttttaatttttttatatattttttgttttttaatttttaaaaggtataattaaaatgttttattcgagttatttttttgtatttgaattttatttattaagtaggttaagagtaggttaggtaaggtttgtagttattttttttttttagttataaattgtaggtgggaaagaaggatgcggaaggaaatttgtaaggaaagtaaatagaaagaaaaagaagtaaaaaaggagagaagggaatttggtgggtggtttaattattaaaatgtggtattaatgttataggtatttatattatttatgtaagttggaatgttgatgtattttaacgtatgtttttatttttgtattgaaagtttttaagaatattcgaagtaaatatataaaaagtattttaagtttaagttattttttattttttatgttacgtaaggtattgaagttagttaaggttgttttttagtgttataatgatgtagtttaaagttataatttgaataagatgttaagtattatagagtgtatattttaaagatattttaaaaattatgttttaaataattagaaattttaataattatggatatgtattaatataaattaaagttaaataaattagggtttttaaagaaaacgttaaaaaggtgtaatgtttagttataggatatgatattggaggtagggaagatttgaaattttatttatttttttataatgaagatattagaagacgttaaaaaaaaaaaaaagattacgatttttaaataatgatttttatagtcgatattatttttagttttttattttgatttagggagtttggaaatttaggatttcgttttttattaatattaatagtttaaaggtgtttattagtataaataagttattgtatgtaatttgttttttttaaaaaatagagttttttgtattaataaaaatttgaaatgggggttataattttgtggttaataatgtttatatatttataaataaaaggtattaaagagtaggaggaaaaatatgtaagatggtatttttaaaaattgattaggagttaagattttagagaaaaagttttaaaatatttattttttttatttaaaaggataatttttaagaaaataggtaatttatttatatatatatatatgcgcgcgtataaatatcggatagaaatggaaatggaataaatattaataagtttttttaaattaattattttttttatttagaataaaaaagttaagttttttttttgttgtattggataattaaaataattggattttttgtttttcgtttattttgaaaaaattagaataagatttgttaggtattttcggtttttaatttaaattttttttataaatttttagttttttattatattttaataaagtattaatatgtatggtttttttgagattaaaagatatgatagttataaaaaaagttattataattttagtttttattattagtggtaatattgtaatatttaaatgttttatatgttgtggttttaaaagaatttattttatagaggtagttatattttttgttggaaatttttgattataataattttggtttttgtagttttaattaggaatatatgaaaagttaaataaagggttttattatttatgatagaattgattaatattttagtttgtttgatataagataggtttttggagaataatttatgttagaatattattttgattatagataaaatatataaagaggatggagaataatgatgtaaatagttaaatagttaaaatatttgtaagatatttgtttaatttttaattgtatttttattttttattttatttttattttttgtttagatttttttttttttttttattttatataattaggtttatttgaggggaggaagaaggtaggataagatgggatattaattttttagttaggtaaataatggtgtattaatttatagtagttatttgttgtattaaggtgtttaagggttttttttaaatttgttttatgggtattaatgatatttttaatatgaagaaaaggtgttaattatgttttggttgttattgtagaaaatattttgataagagttaaggtaattgtgagtatgggattggaataggaggaaagtagtgtattgatttttttggtattttgttttatatagttttgttttgttgatattttagaattgtatttttagattgaaattttaaagatggtattagagtttagttttaaaatgttatgtttatgaaattttagttttaggatataattgaaatattgaaagtagtatattatttttaaataattcgtattttgtaaagattatttgtaatgtagattttttttaaaggaaaaataatttatttagattttattagtataaatattttaattagataaaatttttaagttatttttttttataaaaggaggtattgttgggttatttggattttttattgagtttttatgaaagattatagtttgaatttaattaattttaataaagttaattttataaagttaaaaaataattgtaagaattgttaattgaaggatttgaattttttgtttgagattgttattattgttatttgtaaattattataatgggaaataggaatttgtattgtttgattatttaattttatgaatataatttttgtgaattttttattttatttagattaaatttagattgtgagtttttttatataggaataataaaatgaatgtttggttttatataataattagaagattattagtagaaagtttaataaatgtttgataataataatatgaaatattttaggttttatggatttttgtggatttgtggttaatagaaggttttagattatatttcgaagtgttagttgagataattattttggaaaatataaattatttaaagaaatcgttgaatttatttgtgaaagttgagttagatgtttttttttaagtataatcgatatatttttatataatatttttttagtaggtaaatgtgagttattaa

SEQ ID NO: 1923 - DNA, 5771 bp, Artificial Sequence
  chemically treated genomic DNA (Homo sapiens)
aaatatatttaaagtgtattgattttttatattttttagaatttttattttttgaatgattatggatgtatattattgtaggtagggtaggttgttaggtttattaagaattgatatgtaggtagattggggaggaaggttaagttatgtttttttgggttgagggaatttgttggttagaattgtcgttgttttttgatttttgttggttgttgggttgtttaagtttggatatattaaattgggtttataaagggatttattgttttggttttggtaaattatattttttaggatgtatatttgggtgggtaagagaaggaatatgaaggtatggtggttttttaggtttattttttttgtagagaattgttgtttttgtagtgatgtgttgttgttggggttggatagtagttatggtattatgatagtgtttttttttaatttcggttattttttagttttttagtttttggttagataattttttgtatataaattaaattatttagttatttaggagtaaatggagatgtaataaattgggttagattattttttgattgttattttttttaagtttttattgttaagattaaatgaaaaataatgttaaaggagttttttttttaaaggtttgaaaagaatttttatagaaagcgaaaaatggtagtaatgtatatgttaattaagattaagttataataatagtttttgtgtagtgttttgagaatatttttatatatataattgtgttggatgatttaataatgtatcgattaggaaaatgagaaagtattttttttttttattttttatattgaaggtagtttagatttggtagtttttagggaattagtaaggttagagtttattatataatttttttgttaaagtggtatttgttaaattatgtttagaggtgttgtttttataatttttttggtaatttcgaaatgggttgtatttggggtatttttttttgttatttttttggttttttttgttcgttaaaagtttttgtttgtgggttttggaaatagtttagtttttaaggtgttttattttttagagttaatggttttttgattaattagattatgaaaatgttttttttaggttttttaatagttatattaagtgttatttttattttaggaatgaagaaattaaggttgataggtaaaggttatgtagttagtatgtggtaatattagaataaattggtagatttaatattattagtagatttgtttggagggaatggtgggttttgaatttttaagtattttttaaatttttttagtaggaattttagaagttttaagaattttgagttttttgttggttatgggatattgtgttgatatggtgggaaaaatgtaggttgagaaagttttcgtattttgttttgttggaggttggtgtttgggatgggtatgaaggtttttggcggtggttatagtttatgtagatttgaagtaatatatttttgggatggaagattttgtttattttgggataatttttaaatttgttatatttatttttaattttgtttttattaaatggttaattgttaaaaaagaggaagtaatatttttagttttagtaagtttcggggatgttttatttattgtgaggattgtgaggattcggtatatatttttaagtgagtgaattttgttatatgttttaattttggttttttttgttaagaattttatttttttatgttttgggtattttttttttttatttagattaaatagtaaaatgtttagttaatttttgagaggatagaatttatgggaagtataggatgaaatgatgacgttgtgttaagttgtgttatcgtgggtaagtttttgtttttgttgtgattttttattttttaaattagaatggaagggggaaaaaaaaaaattataatttaattttatttttatgagtggttttttagaaaatagtgtaattcgttgagtttttattgtatttttttttagagatgtttaaaggggcgggggtgtttttatatggaatatgatgagagtgaggattaattatttttagttttttgggaggggggaagtgatttgaattttttaattgaaaaagtaggaagtgtgtgtttaatgtttagatgagtgggaagattattgtagttgattgaggaaatgtcgtatttattatttattttttttatgatttttgtttttttttaatgttttaaaaaataataaggaaatattgttttatttgattttattattgtttattttacgtagtgtgtattttttgattttgaattttgtagttttgagattgaggtaattgagattgatagggatttaaggatatttggtttttataagaataagttaatattaagttattattttatttgtggagaagaattaaattgtataagttgtttggtttttttagatatatattgtttagtgaaaaaattaaaattttgaagaaaaagtagttttatttgttaatatttgttatgtgttttatttataaatagttttatttaaaattttgttttatttagtatgaatggataaagaaaaaggagagttattagggaatttaaatttttaattaattttagtattgatagtggtgaagttatgggtaagatatttattttgtaagtgggggtaaaattttggaacgtgtttaaagtttagttgttttagtaattttttttttttttttggagtggaagatattggaagtttgagaataagtaaagtatgtagattatgaagttgaggggttataattattttatttattgaaatatattttaatgatatttaatttgtttagagagaattcgtgagttgtattttaaaaattaatataggttgggtacggtggtttacgtttgtaattttagtattttgggaggtcgaggtgggtggattatgaggtaaggagtttaagattagtttggttaagatggtgaaatttcgtttttattaaaaatataaaaattagttaggcgtggtggcgagcgtttataattttagttatttaggaggttgaagtagggaattgtttgaatttttgggcggaggttgtagtgagtttagattgcgttattgtattttagtttgggcgatagagtgagattttatttttaaaaaaaagaaaattaatataaagtggttatataaattttttagagatttttagttaatgtttttaaaatgttttttaagtgttgtgtttttttattaaaggtatgatatatttttaattaaagttaaagatatattattttagttgtggtttttttttggtagatgatttgtttttttttttttgttttatttgtttatttgtatgtgttattattttttatttaaattttggtattaagagttgtatcgaaagaggtattaataaatgtggttgttttataatggagagaatgttaagaatgttgattatttttagatttgttttattaatagataagatagaaattaaagaatttatttagttggaagaagttattagttaagtagtgttgtatacgtgattatagaagttaaaaaggtaaataatgtgtttttatatgtggtttattttagtgaatttggagaaggatttttttttggagttttaagaggatatttttaaatttaagtgaataatgtattttatttgtaattgtattagttatgattgaaatatatataatacgttttgattttttttttttattttagtatagtgaaattataatttggatacgagtttttaattattgttttagtagttggtaatgtatttaggaaagttagaaatgagtaaaggagaattataaaataatagtaatagtattatatgttatgtattttaagaaaattgttaatgtttattttttggttttaagttgtagttgtgggaggttgttttagggggaggtgtttggaataaggggtttttttgtttcgttaagttttggagtattaagtttaggttttgtgtagataagtttaaggattttttaataggggtgggggagtggaataatttaaatttaaattatagaattaatattttttttaaaaattgttttagtttttaagaggcgtaggtggattttgtgaattatgtgataatgtatacgttttttttatattttgtttatgttaaaatatttttagagatttttattttggaggttttatttttaggttatagaatgggttgggcgtttttttttttattttttatgtaaagaattttaaggagttttaggttgattttttaatatgggaagttggtaaaggttagtgtttttatgtgagtattaaagatatttaaatttgatatgtaataatgtttttgtaaagtaaagaatataaatagtataaaagtattagtatttagatgtattgtattatttaatttttaaaaatatgaaatgaggttggtattattttttatttttacgttgtggaagaggaaattgaaatgtagaagttagtaatttgtttaaggatatattgttggtaagtggtaaagtttaggattttaatttaaggttgtttgattgagaatgcggatttataagtataatattgtattttaagttaataatgtaaagttagttttatttttttagtagggaagatggaaggttgtagaatagggattttgatagtaaaaatttttttattaattttaaaaggaagtggtattggtagggttattttgaagtttatcggtagttttagtattgtttttaatgtttttggatggagagaatgtattttgagttaatgtattaatagtagattgttttgtttatgtagtaggtaatatatgggtatatatttttttgattattattttaatgattattttaaattatgattattttaaaaattattaaaattttttgttttagaatttttagttttagatgaggtttataatttatggttttattttttttatatttttttataggttggacgtgataagtatgagtttgtagttgttttagaataaggtgataaaaagggtaaaaagggtaaaaaagatagggatatggatgaattgaagaaagaagtttttatggtaagtattaggaggaatattgtattttatttttattaaaaatttatgatttttaattttttaggttttattgtattttttaaagaattgttatatattaaaagagattatagtagttgtatagattttatttagtcgtagaggttaatgttgaatatatattttttaaaagttgttagagggtaggaaaagttatttagttattttggtataattagagataatagaaggaatttaggttgatattatgagtttttgtttttttttgtattatattaaatattgggaaatttagtttttttaggcgatggaagtttttatagatttaatttgtttagaatcgatttggttattagagaaggtagataaggttttattagatttttgagagttgttgggtttttttgaagtgttatggtaaatagtaatgggttacggttatttagttttagttattttttagtgaagagttgttaatgataattgtgtggttgtaaagttataaagcgatggtgaaaattgtattaatttatgtattgaagaaaatatttgtattttgtttaataagtttaatgatagtaatgaataatgttattttttttgttatttttttatattatattgtttaattattttttttgtttttgtttttttttagg

SEQ ID NO: 1924 - DNA, 5771 bp, Artificial Sequence
  chemically treated genomic DNA (Homo sapiens)
tttaagggaaaatagaaataaagaaaatagttaaatagtgtagtataaaaaaatgatagaaaaaatagtattatttattattattattaagtttattaaataaagtgtagatgttttttttagtgtataagttggtataatttttattatcgttttgtggttttgtaattatatagttattattgatagttttttattggagaatggttaaagttgagtgatcgtggtttattattatttgttataatattttagagaaatttagtagtttttagggatttagtaaaattttatttgttttttttgatgattaggtcgattttagataggttaagtttatggaagtttttatcgtttggagaggttgaattttttaatgtttgatataatatagagaaaagtaaagatttatggtattaatttaagttttttttgttatttttggttatgttagagtgattgaataattttttttattttttaatagtttttaaaaagtatatgtttaatattaatttttacgattagatgagatttgtatagttgttatgattttttttaatatatagtagttttttgaagaatatagtgaggtttgggggattaaaaattatggatttttaataaggatggaatataatattttttttagtatttattatagaaatttttttttttagtttatttatgtttttgttttttttgttttttttgttttttttattattttgttttgaaatagttgtaggtttatatttattacgtttaatttgtaggagaatgtgggaaaagtgaggttatgaattatgaattttatttgaaattgaaaattttggagtaggggattttggtagtttttaaggtagttataatttggaatagttattaagataatagttaggaaaatgtatatttatatattgtttattatataagtaaagtaatttattattaatatattggtttaagatatattttttttatttaagagtattaagaataatattgaagttatcggtaggttttagaatggttttgttagtgttatttttttttggggttaatgaggagatttttgttattaaaatttttattttgtagttttttattttttttattgaaagaatgaaattaattttatattattaatttagagtgtaatattgtgtttatgagttcgtatttttaattagatagttttgagttaaaattttgggttttattatttattagtagtgtatttttaggtaagttattaatttttatattttaatttttttttttatagcgtggagataaagaatagtgttaattttattttatgtttttaaggattaaatgatataatatatttaaatgttagtatttttatattgtttatattttttgttttgtaaagatattattatatattaaatttaaatatttttagtgtttatataagaatattgatttttattagttttttatattaaaaagttagtttaagattttttaaaattttttgtataagagataaaaaagggagcgtttagtttattttgtagtttgaaaataaaatttttaaaatgaaagtttttggaaatgttttgatataagtaggatgtaggaaaagcgtgtgtattattatataatttataggatttatttacgttttttgaaaattggaataatttttaaagaaaatgttgattttatagtttaaatttagattgttttatttttttatttttgttgaaaaatttttgagtttatttatataaagtttgaatttggtgttttaaagtttagcggagtagaagagttttttgttttagatatttttttttgaagtagttttttataattataatttaaggttaaaaagtagatattagtaatttttttaaaatgtatgatatatggtgttattattattattttgtggtttttttttatttatttttaatttttttaagtgtattattagttattaaagtaataattaggaattcgtgtttagattataattttattgtgttgaaatgaaaaaagaaaattaaaacgtattatgtgtgttttagttataattaatatagttgtaaataaaatatattgtttatttaaatttaaaaatatttttttaagattttaaggagaaatttttttttaaatttattggagtgggttatatgtagagatatattatttatttttttaatttttgtggttacgtgtgtagtattatttgattaataattttttttaattgggtgggttttttagtttttattttatttattaatgaagtaggtttaaagatagttaatatttttgatattttttttattatggagtaattatatttgttggtgtttttttcggtatagtttttggtgttagagtttaaatgaaaaatagtaatatatataagtggataaataaaataaaaaggaaaaggtaggttatttattagaaaggaattatagttaaagtggtatatttttagttttaattaaaggtatattatatttttaatgagaaagtataatatttaaaaaatattttaaagatattgattaaggatttttaaaagatttatgtgattattttgtattaatttttttttttttggggatggagttttattttgtcgtttaggttggagtgtagtggcgtaatttaagtttattgtaattttcgtttaagggtttaagtaattttttgttttagttttttgagtagttgggattataggcgttcgttattacgtttggttaatttttgtatttttagtagagacggggttttattattttggttaggttggttttgaattttttattttatgatttatttatttcggttttttaaagtgttgggattataggcgtgagttatcgtgtttagtttgtattgatttttaaaatatagtttacggattttttttgagtaagttgaatattattgaaatatattttaataaatgaaatagttataattttttagttttataatttgtatgttttgtttatttttagatttttaatattttttattttagaagaggagagaggattattagagtagttaggttttgaatacgttttaaagttttatttttatttataaaataaatgttttgtttatagttttattattattagtgttaaagttagttgggaatttagattttttaataatttttttttttttttatttatttatgttaggtaaggtaaagttttaaatgaggttatttgtgggtgagatatatggtaagtattaataagtaaaattgttttttttttaaaattttaatttttttattaggtaatgtgtgtttagaagaattaggtagtttatataatttagtttttttttataagtaaaataataatttaatattagtttatttttgtgggaattaaatatttttaaatttttattagttttaattattttagttttaaagttgtaaaatttagagttagggagtgtatattgcgtgagatgaatagtggtagaattaggtaggataatgtttttttattattttttaaggtattagggaaaaataaaggttatgggaagggtgaatgataaatacggtatttttttaattaattatagtaatttttttatttatttgggtattgggtatatattttttatttttttaattagaaagtttaggttatttttttttttttagaggattgggagtgattaatttttatttttattatgttttatgtaagggtattttcgtttttttgagtatttttgaggaaaggtataatggaaatttaacggattatattattttttaaagggttatttataaaaatgaagttgggttatggttttttttttttttttttttattttaatttaggaagtggaaagttatagtaagggtaggggtttatttacggtgatatagtttagtatagcgttattattttattttgtgttttttatggattttatttttttaaagattaattaagtattttgttatttgatttgggtagagggaaaaggtgtttaagatatgagaagataaaatttttgataggaggaattaaggttaaaatatgtaataaggtttatttatttaaaaatatatatcgaatttttatagtttttataatgagtgagatattttcgagatttgttagagttgaagatgttgtttttttttttttggtaattagttatttaatggggatagggttggggatagatatgatagatttagaaattattttaaaataagtaggattttttattttagaggtatattgttttaggtttgtataagttatagttatcgttaaaggtttttatatttattttaaatattagtttttaatagggtaggatgcgaaggtttttttaatttgtattttttttattatattagtataatgttttatggttagtagggagtttagaatttttgagatttttgaaatttttgttgaaaaagtttagagggtatttgaaagtttaagatttattattttttttagataggtttgttaatggtgttgagtttgttaatttattttagtgttgttatatgttggttatatgatttttgtttgttagttttagtttttttatttttaaaatgggaataatatttggtataattattaaagaatttagagaaggtatttttatagtttgattagttaagaaattattaattttgaaaaataaaatattttaaaaattggattatttttaaagtttatagataaaagtttttgacgggtaagaagggttagaaggatggtaaaaggaagtgttttaaatgtagtttatttcggagttgttaagaagattgtagaaataatatttttggatatgatttggtaaatattattttagtaggaaagttgtgtgatggattttgattttgttggttttttagaggttgttaagtttgggttatttttaatgtaaaaggtaagggggaggggtgtttttttatttttttggtcgatatattattaaattatttaatataattgtgtatgtaaaagtatttttaaagtattatataaaggttattattataatttggttttaattaatatatatattattgttatttttcgttttttatgaaaattttttttaaatttttgaagaaaaaatttttttggtattattttttatttgattttaatagtgaaaatttaaagaaaataatagttaagaaatgatttagtttagtttattatatttttatttgtttttaaatgattaagtagtttagtttatgtgtaaggaattgtttagttagggattggagggttaagggatggtcggggttgagggaggatattgttatagtattatggttgttatttagttttagtagtagtatattattgtaggagtagtagttttttgtagaggaggtgagtttgaggggttattatgtttttatatttttttttttgtttatttaaatatgtattttggagaatataatttattaaggttaaagtagtagatttttttgtgagtttagtttagtatatttaaatttgggtagtttagtagttagtaagggttaaagaatagcgatagttttagttagtaggtttttttaatttaaaagaatatgatttaatttttttttttaatttgtttgtatgttaatttttaatgagtttgatagtttattttatttgtagtagtgtatatttatgattatttaaaaaataaaaattttaaaaggtgtaaagaattagtgtattttagatatattt

SEQ ID NO: 1925 - DNA, 7819 bp, Artificial Sequence
  chemically treated genomic DNA (Homo sapiens)
taattgaatggttttgggtttatttattgaattatgtaattattattataattagttttagaatattttattattttaaaataattttatatttattagtagttattttttatttttttttattttttttattttattttagttttacgtaatcgttatatttatttttgtttttatagatttgttttttttgaatattttacgtgaatggaattatataatatgtgatattttgtgattggttttttttatttaatgtttttaaagtttatttatatttaggcgtcgtggtttacgtttgtaattttagtattttgggaggttaaggcgggtggattatttgaggttaggagtttaggattagtttggttaatatggtaaaatttcgtttttattaataatatgaataattagttgggcgtggtggcggatgtttgtaattttagttatttagaaggttgaggtaggagaatcgtttgaatttgggaggtagaggttgtagtgagtcgagatggtattattgtattttagtttgggtaataagtgaaattcggtttcgaaaaaaagtttatttatgttgtagtatttattagtattttatttttttttattattaaataatattttattgtttaggttttttatattttttttatttatttatttttttatggatatgtgggttgtttttgttttttggtttttatgaataatgttgttgtaaatatttgtgtttaagtttttgggtgaatatgtttttattttttttggttatatatgtaagagtggagatgtaggagtgtatggtaattttatgtttaatttttggaggaattgttttgagatttttttttagagtggttggataattttatatttatattagtaatatataaatgatttagtttttatatatttttttagtatttgatattattttttattttagttgtttttatagatgttagtagtgatattttattatggttttaatttgtttaaaggttagtgatgttgaatatttttttagataattattttttatttatatatttttttgggtgaaatttttttttatattttttgttagttttttaattggatgatttgatttttttatgtagtgtttttatgttgaatttgagagttttttatatatttgttttagataggagttttttgttagatatgtggtttgtaaatatttttttttagtttgtaatttgtttttttatttttttaattaggttttttatagagtaaaaaaaaattaattttgatgaagttggattgatttttttagggattatgtttttggtgttatgtttaagaatattttattaagttttaagttttatagatttttttttatgttattttttagaggttttttgtttttattttattttattttttaattaagatagagtttcgttttgttgtttaggttggagtgtagtggtaggattttagtttattgtaattttcgttttttaggtttaagtgatttttttgttttggttttttgagtagttgggattataggtacgtattatttaattggttaattttttgtatttttatgtggttgttttcgagaattttttttgttttttgtttttagaagtttgattatgatgtgttttggtatgaatttttttgggtttattttgtttgtgatgcgtttagttttttgaatttgtagatatatgttgtgcgtgtgtgttgttaaatgaagataatttgtagttattattttttggaatatttttttaaggtttatttttttttttttttttttttgggattttaatgataaaatgttagatttttttttattatagttatttatgtttttgaggttttgttttatttttttttatttattttttttttattgtttagaatgggtaatttttattgttatacgttttgttttattgttttttttttttatattttttattttgttattgagtttatttattatggtttttattttagtttttgtattttttagttgtattttttagttttaaagtttttatttggtttttttttatattttttatttttttgttgatattttttattattttatttgttttaagtatatttataattttttagtgaaatatttttatgatggttgttttaaaatttttgttagataattttaatatttgtgtcgttttgatgtttgtgtttgttaattattttttgttatttagtttgagaatgtttgatttttagtatgataagtgatttgttattgaagttaggatattttgggtattgtgttataagattttggattttttttaaatattttgttttagtgggtttttttttatattgttttagcgaaataaagtagggtattgtttgattgtttttagatagggataaaagtttaggttttttatttagttttttttgaatttggggggttgggagagatgaggtttttatgttattgtttggtaagggtagaagtttaggttttttattaggaatttatgataattttttggttgggagtgggagggatgttttattattgttttttatgtggtttttattgatattgtgtgtggtagagagaggggggtgtttgttattattgagtggtggcgaaagttttaattttttattaggttttttttgatattattttaatggggtcgggtggaatgttttatttttgtattggggtggtagtggatgtttaggttgtttatatggtttttattaatattatatcgggggagggtgattttagtggggaggaatgttttagttttaattttagtattattttggttgagtatgggagtggtttagggttttttgttatagtttggtgaaggtgaatgtttaggttttttattcggtttttgttgataagggtgatgatggaatttggatggagcggagtaggtatggattaaaagagttttgtttttttaggatgttttttttttcgttttttggttagaaaagtatagttttgttagaatttgttttgttgggatttttttttgtttgtgttttttggtatttttagttgttggtttttttagtatttagtttgagatatatgaggtaaagagaaattttagggaatttattattattttttaagtttcgaggtttttaattagtttgtttttttttattttttagtttttttatgtttgttttgttacgtttaaggtttttagttatatttggtagaataaataaatatatttattttatttttttagaatattattgttttttgtttattttatttatttattatttattgagataaggttttattttgttgtttgggttggagtgtagtggtgttattatggttgattgaagttttgaatttttaggtttaagcgatttttttgttttagttttttaagtagtttggattataggtatgggttattatgtttagttattttttattttttgtttttgttgattagttttatagagttttgttgtgttgtttaggttggttttaaatttttggttttaagtaatttttttgttttgtttttttaaagcgtattataggtataagttattatatttagttttatcggtgtttttggaagaaggtgtttttttttttttttgtttttttttttatggttagttgtttatagagggtagtggtgttggagtgaagattttttagcgtatttttttttatttgtaggatgtgtatggtttttaatgttgtttgttttgtttttgagatattcgttggttataggattataaaggtgatgaggttttagtttaaagattttttatttaataatattttttataagatattttttttgtttttttgagataggatttggttttgttatttaggttggagtgttatagcgcgatttgtttattgtaattttagtttttcgggtttaagtgatttttttgttttagttttttgagtagttgggattataggcgttcgttattatatttagttaatttttggattttttttttttttttttttagtagagatggggttttattatgttgtttaagttggttttgaatttttgagtttaggtaatttattcgttttggttatttaaagcgttaggattataggtatgagttattatgtttagttttataagatattttttttttttttttttttttttttttttttttttttttttttttgagatagagttttattttgttatttaggttggattgtagtggtgtgatttttttttattgtagttttcgttttttgggtttaagtgatttttttgttttagttttttgagtagttgggattataggcgtttgttaaaatatttagttaattttttgtatttttagtagagacggaattttattatgttcgttaggttggtttcgaatttttgattttaagtgatttattcgttttagttttttaaagtgttgggattttaggtatgagttatcgtattcggtcgagatattttttttttttttaatatttatgtgttttttttttaatttttgggggttttagtgtaggtggttagattttttattatttatgtttatgatgaaaagagtggaaatggtaataattggatggtgttattaaattataaatatttttaggtaggtttgtgttttttttagcgggttgtagtttttttgtttggtttgagttattcgtattttttgagagttgggtagagggggagttgtggaggagtttattttgaaattgatttgatattgtaaatttatatacggaaaggaagaattgtttatacgtattcgagttttttaatttgatttcgagttcgtattttttttaatcgttttttttttttattttttagattacggtgttgtttggttttttttagagttatagagaagtagggggtgtggttatggaggggaaatttttgttattagagattttattgtatttttttttttgtttttagatgttgttagggtttttgaagagggaagatacgcggaaataggtaaaaattattttgtttttattttgtatttaataagtaagttattacggaatagtagttatgggttaggtatattttttagagttgggaatatagtggggatttttttggtttttttttatcggtgttataataggttgtagatagatttttgttttgagtattttttttgttaggtttgttgagttttttgagagtagggtaggttattggatgtttaggagggaagaaggagttagggaggttagttttaaggttttgtaaggtttttaataggtttggattgaggaggtttggatagtatggttttgttttgagtttttgtgtataataattgttgtttttaatttttattttatttttagttttttaattttcgggtttggggttttatttttgtgttttagagatttttggagttttttgaggtagtatatagttttgttttggaggcgtttattttttatttatgttgggatgttttagttcgttttagagtaggttgtggttggagggtgttggtagaggagggataatggttcggtttttggaggtaagtgttggttgtagggaacggagtttagtttttgttatagtttttgttattttttaggtaattttaaggggattttaaagaattttggttttgtaattttgttaagttttttatggaatatgtaaaatagattttatggttaaagaagtatggataatgtattatattatattttaatttttatgtttagagattaatggtgtagatagagtttattgaaaggtttttaaagttttgtagtaaagaattttatttaagttaggtgcggtggtttacgtttgttattttagtattttgggaggttaagttggggggattatttgaggttaggagtttgaaattagtttggttaatatggtgaaattttatttttattaaaataaataaataaataaataaattagacgggtgtggtggtatatgtttatagttttagttatttaggaggttgaggtaggagaattatttgaattttggaggtagaggatgtagtgaattgagattatattattgtattttagtttgggcgatagaagaatgagattttgttttaaaagaaaaaaaaagaattttatttaatttttttattttgttttttttaagtgtatgtgattttgaagatgttttttgtatgtgatatgatgagtatttgcggggttgatgttagttttgtttggggaatttgttttagttttagattttgtattttaaatttatgtttagtttaggttagattttttttttgttgtcggtaagtagtttagtttttcgtatatttatgaatagatatttagtagtttttggtatgagttatgtggttcgaggagataaatagatagagagaggaatattgatgcgtgtgaaatgttggtaggtgagtgggaggggtttgggttggtgttgagatcggagatatattttgttgttatattttttagggttttcgggggttagtacggagggttatgattatgtaaattgggatttaaatttaattttatgtaaatataattttatgtagaggttagggatggtagaggataagtttattgtagagaaagaaagaaagatgggtaatagttgtagaatttaatttatagataggttttgtttgattagttttgtatatttttagtttattttttatttttttgagatagggttttgttttgtcgtttaggttggagtgtagttgtatgatttcggtttattttaatttttatttttcgggtttaagtaatttttttgttttagttttatgagtatttgggattataggtgtacgttattacgtttggttaattttttgtattttgagtaaagatggggttttgttatgttggttaggttggttttgaatttttgattttaagtgatttgtttgttttggtattttaaagtattgggattataggtgtgagttattgcgtttggtttatttatattttgttattggttttagaatttttttttatttggttttttaaattaagttttgattatgtttgtttttgagtataatttttgatgagtagtattagagagagttttacgttattcggggtttggtatttaaagtatttagtggtttggtgttatttaaagtttgtgagttaggtaggaagtttataaaattagagatggatgaatggatggatgggaaaaagtaagtaagggaggaaggaaggaagaaaggaaggagttttgggaagagagagaggttgttttcgtagggtttttagtttgaaggagaggtgtagtatatttagaaaaaattttcggttaggagtggtggtttatatttgtagtgttagtattttgggaggttaaggttggtagattatttgagattaggagtttaagattagttaggttaatatggtgaaattttatttttattgaaaatataaaaattagttaggcgtggtggtatttgtttttatttagttatttggggggttgaggttagagaaacgtttgagtttgggaagtagaggttgtagtgagcggagattatattattgtattttagtttgggagatagagtaagattttgttttaaaaaaaaagaaagaatttcgtgagtattttaaatgttatatttttataatgtaattagattcggttttttcggatttaggggaagggtcggagtttagtgggtgagtaagaaaagttacgtggaagaagtaagcggttagatggtttaaagataaatttttttttgtttagg

SEQ ID NO: 1926 - DNA, 7819 bp, Artificial Sequence
  chemically treated genomic DNA (Homo sapiens)
tttgagtaggggagagtttgtttttgagttatttggtcgtttattttttttacgtggttttttttgtttatttattgagtttcgattttttttttggattcgggaggatcgggtttggttgtattatggggatgtggtatttgggatgtttacggagttttttttttttttttgagatagagttttgttttgttttttaggttagagtgtagtggtgtgattttcgtttattgtaatttttgttttttaggtttaagcgtttttttggttttagttttttaagtagttgggtaaaggtaggtgttattacgtttggttgatttttgtatttttagtagagatggggttttattatgttggtttggttggttttgaatttttgattttaggtgatttgttagttttggttttttaaagtgttggtattataggtgtgagttattatttttggtcgggagttttttttgagtgtgttgtattttttttttaaattgagagttttgcgggggtagtttttttttttttttagaattttttttttttttttttttttttttttttgtttgtttttttttatttatttatttatttatttttaattttataaattttttgtttggtttataggttttgagtggtattagattattgagtgttttgaatgttaggtttcgggtaacgtggagttttttttggtgttatttattaaggattatatttagggatagatatggttaaaatttggtttgaaagattaggtaaaaaggaattttaaaattagtaataaagtatgggtgagttaggcgtagtggtttatatttgtaattttaatattttgggatgttaaggtaggtagattatttgaggttaggagtttaagattagtttggttaatatggtaaaattttatttttatttaaaatgtaaaaaattagttaggcgtggtggcgtatatttgtaattttagatatttatgaggttgaggtaggagaattgtttgaattcgggaagtagaagttggaatgagtcgagattatgtaattgtattttagtttgggcgatagggtaagattttgttttaaaaagataaaaaataaattaaaaatgtatagagttggttaaataaaatttatttgtgggttaggttttgtaattgttgtttatttttttttttttttttgtagtgagtttgttttttattatttttgatttttgtatagagttatatttatatagagttaaatttaagttttaatttatatgattatggtttttcgtgttggttttcggggattttgaaggatgtgatagtagagtgtgttttcggttttagtattaatttaagttttttttatttatttgttaatattttatacgtattaatgtttttttttttgtttgtttattttttcgggttatatggtttatgttaaaggttgttgggtatttgtttatgggtgtgcggaaagttaagttgtttgtcgatagtaggaagggggtttggtttgggttaagtatgaatttggggtgtagggtttgaagttgaggtagattttttaggtagagttgatattagtttcgtaggtatttattatgttatatgtaaaaaatatttttaaggttatatatatttgagaaaggtagggtaaaagagttaagtaagatttttttttttttttttgagatagagttttatttttttgtcgtttaggttgaagtgtagtggtgtgattttagtttattgtattttttgtttttagggtttaagtgatttttttgttttagttttttgagtagttgggattataggtatgtgttattatattcgtttgatttgtttgtttgtttgtttgttttagtagagatggggttttattatgttggttaggttggttttaaatttttgattttaggtgatttttttaatttggttttttaaagtgttgagatgataggcgtgagttatcgtatttggtttaagtaagattttttattgtaggattttaaaaattttttagtaaattttatttatattattaatttttagatatggggattagagtatagtataatatattgtttatatttttttggttatgggatttattttatatgttttataaaaaatttagtagggttgtagagttagagttttttgaaatttttttaaggttatttaaggggtaataagggttgtggtaaggattagatttcgttttttgtagttaatatttgtttttaggagtcgggttattgttttttttttgttagtattttttagttataatttgttttgggacgggttggagtattttagtatgagtgggagatgggcgtttttagagtaggattgtgtgttgttttaaggagttttaggagtttttggagtataggagtagggttttaggttcgggaattggaaggttgagggtggggtggaggttagggatagtagttattatgtatagaggtttaggatagggttatgttgtttagatttttttagtttaggtttgttgagggttttgtagaattttggggttgatttttttggttttttttttttttttgggtatttaataatttattttatttttagaagatttagtaggtttggtaaggaggatgtttaagataggggtttgtttataatttgttgtaatatcggtaagagagagttagggaggtttttattgtgtttttagttttgggaggtatgtttggtttataattgttgtttcgtaataatttgtttgttgaatgtaaaataaaagtaaaatgatttttatttgttttcgcgtgttttttttttttagggattttggtagtatttgagagtaaaaggagaagtatagtaaagtttttggtgatagaggttttttttttatggttatattttttgtttttttatggttttgagggggattaagtagtatcgtgatttggggagtggggaaaagagacgattgagggggatgcgggttcggagttagattggaagattcgaatacgtatgggtagtttttttttttcgtgtatgggtttgtaatattagattagttttagaatgggtttttttataattttttttttatttagtttttaggaaatgcgaatgatttaagttaagtaggagaattgtagttcgttgaaaaaggtataggtttatttgaaagtatttgtagtttagtgatattatttagttattattatttttattttttttattataggtataaatggtggggaatttgattatttatattgaagtttttaagggttgagggaggagtatatagatattgaggaggaaaaagatatttcggtcgggtgcggtggtttatgtttggaattttaatattttgggaggttgaggcgggtggattatttgaggttaggaattcgagattagtttggcgaatatggtgaaatttcgtttttattaaaaatataaaaaattagttaagtgttttggtaggcgtttgtagttttagttatttagggggttgaggtaggagaattatttgagtttaggaggcggaggttgtagtgagaagagattatattattgtagtttagtttgggtgatagagtgagattttgttttaaaaaaaaaaaaagaaagaaagaaagaaagaaagaaaaagaaaagatattttgtaggattgggtatggtggtttatgtttgtaattttagcgttttgggtggttaaggcgggtggattgtttgagtttaggagtttaagattagtttgggtaatatggtaaaattttatttttattaaaaaaaaaaaaaaaaaaaatttaaaaattagttgggtgtggtggcgggcgtttgtggttttagttatttaggaggttaaggtaggagaattatttaagttcgagaggttgaggttgtagtgagtagatcgcgttgtggtattttagtttgggtgatagagttagattttgttttaaaaaaataaaaaagatattttgtaggaagtgttattgaatggagagtttttaggttgaaattttattatttttataattttgtagttagcgagtgttttaggagtagaatagatagtattggaagttatgtatattttatagatgaagagggatgcgttgagaggtttttattttagtattattgttttttatgggtagttggttatagggagggaaatagagagagggaagaatatttttttttaaaagtatcgatagggttgggtgtggtgatttatgtttgtaatacgttttgggagagtaaggtaagaggattgtttaaggttagaagtttgagattaatttgaataatatagtaaaattttgtggggttagttaataaaagtaaaaaatgaaaagtagttgggtatggtggtttatgtttgtggtttaaattatttgggaggttgaggtaggaggatcgtttgagtttgggagtttaaggttttagttagttatgatagtattattgtattttagtttaggtaataaagtaagattttgttttagtaaataataaataaataaaatgaataaaaagtagtgatgttttggaaagatggagtagatgtatttatttattttgttaagtataattgaaaattttgaacgtgataagataagtataagaagattgaaagatggagagaagtagattggttaggaatttcgggatttaaggaatggtggtgaattttttgggatttttttttgttttatatattttaggttgaatattggagaagttaataattgaaaatgttaaggggtataaataagaaaaagttttaatagaataagttttagtaaaattatgtttttttagttaaagaacgaggaaaggggtattttagaaagatagagtttttttagtttatatttgtttcgttttatttaagttttattattatttttgttagtaaaggtcggatggaaaatttagatatttatttttattaggttgtaataaagaattttaggttatttttatatttagttagagtgatgttagagttggagttgggatatttttttttattgggattattttttttcgatgtggtgttggtggaaattatgtgggtagtttggatatttattgttattttaatgtagaaatgaggtattttattcggttttattggagtagtgttaaagggggtttggtggagagttgggattttcgttattatttagtggtaataagtatttttttttttttgttatatatagtgttagtgaaagttatatagggagtagtaatgaagtattttttttatttttagttagggagttgttatggatttttagtggggaatttgaatttttatttttattaaataataatatggaggttttattttttttaattttttaggtttaggaaaggttggatggagaatttggatttttatttttgtttggaagtaattaggtagtgttttattttatttcgttggagtagtataaagggaagtttattaaaataaaatatttaaagaagatttagaattttataatatagtgtttagaatattttgattttaatggtaaattatttgttatattaggaattaggtatttttaaattgaataataaaagataattaatagatataaatattaagacgatatagatgttagaattatttgataaagattttggagtagttattataaaagtgttttattgagaaattataaatgtgtttgaaataaataaaataataaaaagtattagtaaagaaatagaaaatataaagaagaattaaatggaaattttagaattaaaaaatataattaaaaaatataagagttgaaataaaaattataatggatgggtttaatagtagaatggagagtatagaagaaagaagtagtgaaataaaacgtataataatagaaattatttattttgaataatggaaagaaaatagatgaaagaaaatggaataaagttttaaggatatgagtaattataataaaagaagatttaatattttgttattgaagttttagaaggggaggaaaaggagggtgggttttaaaaaaatattttaagaagtaatggttgtaaattatttttatttgataatatatacgtataatatatgtttatagatttaagaagttgagcgtattataaataggataaatttaaagaaatttatgttaagatatattatagttaaatttttaaaaataagaggtagagaaaattttcgaaagtaattatataaaaatgtaaaaaattagttagttgggtggtgcgtgtttgtagttttagttatttaggaggttaaggtaggaggattatttgaatttgggaggcggaggttgtagtgagttgagattttgttattgtattttagtttgggtaatagagcgaaattttgttttaattaaaaagtaaaataaaataaaaataaaaaatttttggaagataatataggagaaaatttgtgagatttagagtttgatgaagtgtttttagatatgatattaaaggtatgatttttaaaaaaattaatttaattttattaaaattaatttttttttgttttgtaaaagatttagttaagagaatgaaaagataaattatagattaagagaaaatatttgtaaattatatatttgataaaggatttttatttagaataaatatataaagaatttttaaatttaatatagaaatattatataaaaaaattaaattatttaattagaagattggtaaaagatataaagagaaattttatttaaggggatatatggatagaaaataattatttaaaaagatatttaatattattagtttttagataggttaagattatgatgagatattattattaatatttataagaatagttaaaataaaagatagtattaaatattggaaagatgtatggaaattaaattatttatatattgttagtgtgaatataaaattgtttagttattttggaaaaaagttttaaaatagtttttttaaagattaagtatagaattattatatatttttgtatttttatttttatatatataattaagagaaataagaatatgtttatttagaaatttgaatataaatgtttatagtagtattatttatgaaagttaaaaagtagaaataatttatatgtttatgaagagatgaatgaataaagaaaatatgggagatttaaataataaaatattatttgataataaaaaggaatgaagtattgatagatattataatatggatgaattttttttcgagatcgagttttatttgttgtttaggttggagtgtagtggtgttatttcggtttattgtaatttttgttttttaggtttaagcgatttttttgttttaattttttgagtgattgggattataggtattcgttattacgtttagttaattatttatattgttagtagagacggggttttattatgttggttagattggttttgaatttttgattttaggtgatttattcgttttggttttttaaagtgttgggattataggcgtgagttacggcgtttggatatggatgaattttgaaaatattaagtgaaagaagttaattataaaatgttatatattgtatgattttatttacgtgaaatatttagaaaaggtaaatttgtagagatagaagtagatgtagcggttgcgtagggttggggtggggtgggaaaggtaagaggaaatgaagagtgattgttaatggatgtgagattattttggggtgatgaaatgttttaaaattggttgtggtgatggttgtataatttagtgaatagatttaaaattatttaattg

SEQ ID NO: 1927 - DNA, 6507 bp, Artificial Sequence
  chemically treated genomic DNA (Homo sapiens)
tagattgaaagtaatttttagggtggttttgtttatttttttatcgagaatatggttgtcggtttttttgaagattgtggtttggtataaggagaggtgtaggcgtttggttttgagtattttggaatttttagtcgtatagaatttggtgtttttttttttatttttataaggagttgttattttgtttggattttttgtttgtggattagaaataaacgtttttttaaaggattagtaaataggttgattttttgtgtaacgttgttttggggttttttttttattttggtagaaggagtttggagtttatgaggtagttagtattgtgtttttgtttagtcgtgttgtttttttttttttttttagttttttttttatgtttaagttagtttttagtcgttggtttttatggtatttttagtatagttggatattaagaggtaaaatttaaggtttggtttggtcgtgttaacgattgtatagatatttttttaaataattttgtgtaatatttttttagaatagtaagtttttgttgaattgttatagatgagtttttaggaatatatcgggtgtggttatttttattgggtgtgtttatggtcgtggtttgtgtttttgtaaataaatagaatatttgaattatttttcgaattgggttatcggtttttttatattgatatttagagatttgtagttttttaatttttaaggaaattttttttattgaaaggtataaaaaggttaaaaaagaaaattcgagagttttaattttttgtataatagtattaaaataatttgtttgtttggaaagatgagaatattgttgtataatttaaaatgtgtttttaatttgtgaaaaattattatggtgagttagatagttattttaaatagttgaatagagattattattagtaaatagagtttagttttgtagttgtttttaaaatttttgttttaaattcggtgagttttgtttgttgtcgtcgcgtttttgggtgattatttagacgggttagtgggaataacgggttaataagatagttttttatatgtgtttaaaggatggtttttcgaaggtttggaagtattttattgttggaagaagtaaataagaatgatattttagatggaaatagaatttttttttttgtttttgattaatatggtattaaggggtttttttttttttaatgtatgtacgtgttttgttgggggttttattttatagaatgagagtatttgagtttttttaatgaatttggttagttttgtgtttggttgaggatataggagtgggatatttattttcggattttttagagtatagaaatttttagttttgttgtttttgaagtattttttttagtttttttgcgggtttttatgtttgagtttgatggttgttggatttttatttaacgaaaattcggttggaaattgtttcgtttggtagtttttttttgttgttttttattttattttttttttatttgaaagtggtatttagttgatttgtttatttagattgtttacggagtttgaatttgttaacgtggtgttggaggttttattttgaaaagggttatagttagggtaattttttttatataggaaaatttgaaaattatattaatagtttacgttatagttaaattatattttttttatattaaataaaattatggagaattaaaagtatattatataaaacgtttatagtgttttgtatgtgatttattttagtatttatataattagattagtgttttttagtaaacggttttgttaattagcgagttattgttgattttgttgtggtggtaagttgatatcgtgtaattaatttcgtggatgttttttggttatttttgtttaaacgaagtagtcgtggtagtagttgtttatgatttttgtttagtaaagtaaaataaatgttaaatatggattgttttgtttttttttttgtggatttttggtgtttatgttattttgtttatcggtggggttggttattgttagtaaagaggttttttatagaagtggttggatttaaagttttggttgggaaaggtttttgtggtagtttttattaagcgtaagtgcgaggttatttttttttcgtgggttttggggtcgattttgttagggtttgatatgagtggttgtatttgggtatttaatagattttataaaggaagggtaaattggagatttttggtcgggtacggtggtttatgattataattttagtattttgggaggttggtgggtagatattttaggttaggagtttaagattagtttggttaatatggtaaaattttgtcgttattaaaaatataaaagttagttaggtgtggtggcgtacgtttataattttagttattcgggaggttgaggtaggagaattatttgtatttaggagacggaggttgtagttatttaaaattgtgttattgtattttagtttgggtgatatagcgagatttttttttaaaatagaaaaaaaaaggtgttgtggtttacgtttgtaattttaattttttgggaggttaaggtaggtagattataaggttatgagattaagattattttggttaatatagtgaaatttcgttttaattaaaaatataaaaaaattagtcgggcgtagtggtgggcgtttgtagttttagttattcgggaggttgaggtaggagaattatttgaatttgggaggtggaagttgtagttatttaaaattgtgttattttattttagtttgggtgatatagtgagatttattttttaaaaaaaagggtagggtgttgtggtttacgtttgtaattttagtattttgggaggttaaggtaggtagattacgaggttacgagattaagattattttggttaatatagtgaaattcggttttaattaaaaatataaaaaattagtcgggtatggtggtttagttattttggagtttaagatgggagaatggagtggaggcgggagaatggcgtgaatttaggaggcggagtttgtaatgagcggagatttcgttattgttttttagtttgggttagagcgagtttttttattagaaaaaataaaaatagttaggcgtagtggtttacgtttgtaattttagtattttgggaggttaaggcgggcgaattataaggtaaggagatcgagattattttggcgaatatagtgaaatttcgtttttattaaaaaaaatataaaaaattagttaggcgcggtggcgggtgtttgtagttttagttattcggtaggttgaggttcgtaggataatggcgttgaattcgggaggtggggtttgtagtgagtcgagattgcgttattgtattttagtttgggcgatagagtaagatttcgttttaaaaaaaaataaaaataaaaaaatagggagatttttttagttattaagaatttaggaagtaatattaagagtttgggggaggttaggcgcggtggtttacgtttgtaattttagtattttgggaggtagaggtaggttgattacgaggttaggagattgagattattttggttaatacggtaaaatttcgtttttatcgaaaataaaaaaaaaattagtcgggtatggtggtaggcgtttgtagttataggtatttaggagtttaatgcgggcgaatggagtggaggcgggagaatggcgtgaattcgggtggcggagtttttagtgattcgagatcgcgttattgtattttagtttgggtaatagagcgagatttcgttttaaaaaaataaaaataaaaaaagagtttgggtatataaagtaagtagtattttatttcgggatgaaaagaatttcgatatttatcgttttttttgggtttttgttagttttttgttatattttttatttttttattttaggtttagtaaatgcggatgtttattttttattgtttgttttttgagatttagatgtttaaagtatttttttgtgattttttaaggtaagaggaaaatttgatatatggaaagggaattaattgttcgttttattttttttttttgtaatgttttgaatttatgggtttggagtggggttttgggagttgggggaagtattatatttagtgagtttgtattttgaggatttattgttagtgttagttttaaaattatattgtaaaaggttcggcgcggtggtttacgtttgtaattttagtattttaggaggacgaagtaggcggattatttgaggttaggagttcgagattagtttggttaatatggcgaaatttcgtttttattaaaaatataaaaattagtcgggcgtggtggcgcgggtttgtggttttagttattcgggaggttgaggtaggaaaattttttgaattcgggaggaggttgtagtgagttaagattacgttattgtattttaatttgggcggtagagtaaggtttcgatttaaaagtaaatatatgaataaataaaataaaattatatcgtaagagttttttttgttttgtttttgagtaaggtttagagttaaatttcgagatcggtttttataagatatatagatttgaggcgttttacgaggtaattagtaggtaaatggagcgcgttttatttattcgttattaggggttttagcggttaagggggtggaatgcgggcgtttatcgcgaaggtattttgttcgtaagttttggtataggcgcgggtttcgttatcggaaaagtttcggtaggatttcggaagtcggttacgcgtttcgcgtaggcgtaaattgttttaaaagtcggcgtcgttttgttcggcgtttcggttcgcgtcgaagtcggaagtgtagtttacggcgtagttttttttggagttttggatttgagtaagcgttgttttatgcgttattatttcgcgtagatataggaagtgtcgtatagagcgagtttttgtcgttttgagttttgggttagaggtcggttattatattattattaggcgttaatataggaagtgaggatatttttggcgagcgtcggttgttgtttttttttaggtttagggatcggtcgcggtttcgtaggggtgagtttcgattgggcggattaggtgtgggagcgcgacgagaattgcgtatcgaggtttttttttcgagtaggtttcggagcggggcggattcgggttcgggggcgagcgatattttcgttttcgcggatagttttatttcgtacggaattttgggtggtggaggcggcgggtttaaacgttgtttggagttaacgtttgttaggttgaattttaagtgtgcgggattgaattcgaggaaatagtttagtgttcgggttaggtggttttgttcgcgagtatatttcggagtattttttcggttttaaggtgtagttgtttagtgtgttagtggttttacgtagtttaagcggtttttttagtagattttgatagtaaaagtagtgtttgatgagtggtaggttttgagttaagagtttttaaacggatgatttttaattcgcgatcgatattattacgtaggtgttgttattttggttgtacggaagattgaattgaggtgaattacgttatttaagattatataagaatgatagaaacgagatttgattttaagcggttattttttagaatttattatttttttttgtcgtttatgttgtagcgtagtggttgtttataagcgtattttagtttggaatttttgggtttaatcggttttttattttagtttgtagagtatatgggattataggcgttcgttattttgtttggtttataatttattatttttgtttttttttttttttttttttttttttttttttttgagacggggttttgttggagtgtagtgacgcgatttcggtttatcggaattttcgtttttcggatttaagcgattttgttgtttcggtttttcgagtagttgggattataggtattcgttattacgtttagttaagttttgtatttttagtggagatagggttttcgtcgtgttggttaggttggttttgatttttcgattttgtgatttattcgttttagtttagagtttatttttttttttttttttttttaattaagttttattttgttatttaggttggagtgtagtggcgtagttttggtttattgtagttttgatttttttgatttaagtgatttttttgtttttagtagttttttttttgtagttaggaatataggtacgcgttattatattgggttaatttttgtattttttgtagagacgaggttttgttatgttgttcgggttggtgttgaatttcggaattttagcgatttgttcgtttcggttttttaaagtgttagggttatcgttttgagttattgcgtcgggtataattttttatttttaatgaggatttattttgaattttttaaaagtgattaggtttaagtgtttagtattatagtttgttgtgttttgatgtaggttgaattatttttttttttgtag

SEQ ID NO: 1928 - DNA, 6507 bp, Artificial Sequence
  chemically treated genomic DNA (Homo sapiens)
ttgtaaaaagaaaaataatttagtttatattaggatatagtaagttatggtgttgaatatttgaatttagttatttttgagggatttagaataaatttttattaagaataagaagttgtgttcggcgtagtggtttaagacggtaattttagtattttgggaggtcgaggcgagtagatcgttggagtttcggagtttaatattagttcgggtaatatggtaaaatttcgtttttataaaaaatataaaagttagtttagtgtggtggcgcgtgtttgtatttttagttataggaaggaggttgttagaggtaggaggattatttgaattagagaggttaaggttgtaatgagttaagattgcgttattgtattttagtttagataataaagtaagatttggttaaaaaaaaaaaaaaaaaaaggtaagttttaggttgaggcgggtggattataaggtcgggaggttaagattagtttggttaatacggcgaaaattttgtttttattaaaaatataaaatttagttgggcgtggtggcgggtgtttgtaattttagttattcgggaggtcgaggtagtagaatcgtttgaattcgaaaggcggaggtttcggtgagtcgaggtcgcgttattgtattttagtaagatttcgttttaaaaaaaaaaaaaaaaaaaaaaaaaaaaaaaaaaataagaatgataagttgtaagttaggtaaggtggcgagcgtttgtagttttatatattttgtaagttgagatgggagatcgattgagtttaggagttttaggttgaagtgcgtttgtgaatagttattgcgttgtagtatgggcgataaaaaagagtgatgggttttgaaaaatgatcgtttgaaattaagtttcgtttttgttatttttgtatggttttgggtaacgtaatttattttagtttagtttttcgtataattagaataataatatttacgtgatagtatcgatcgcggattaaagattattcgtttaaaggtttttaatttaggatttgttatttattaaatattgtttttattgttagaatttgttagaaagatcgtttggattacgtgaagttattagtatattggatagttgtattttgagatcggggagatgtttcgagatgtgttcgcgaataaggttatttgattcgggtattgggttattttttcgggtttagtttcgtatatttgaggtttagtttggtagacgttggttttagatagcgtttggattcgtcgtttttattatttaaagtttcgtgcgggatgagattgttcgcggaagcgagggtgtcgttcgttttcgggttcgggttcgtttcgtttcgaggtttgttcggaagaaagatttcggtgcgtagttttcgtcgcgtttttatatttggttcgtttagtcggaatttatttttacggggtcgcggtcggtttttgagtttgagaagaaatagtaatcggcgttcgttagaagtatttttattttttgtgttgacgtttaatgatgatataatagtcgatttttggtttagaatttaagacgataggggttcgttttgtgcggtattttttgtgtttgcgcgggatgatgacgtataaaatagcgtttgtttaggtttaggattttaaaagaaattgcgtcgtgagttgtattttcgatttcggcgcgggtcggggcgtcgagtagagcgacgtcgatttttggagtagtttgcgtttgcgcggaacgcgtggtcggttttcggaattttatcgggattttttcggtagcgaagttcgcgtttgtgttaaggtttgcgagtagaatgttttcgcgatggacgttcgtattttatttttttgatcgttgggatttttagtggcgggtgggtggagcgcgttttatttatttgttggttatttcgtgaggcgttttaggtttgtgtgttttgtaaaggtcgatttcggaatttaattttgaattttatttagaaataaagtagggagagtttttacgatgtgattttattttatttatttatgtatttatttttgagtcggagttttgttttgtcgtttaggttggagtgtagtggcgtggttttggtttattgtagttttttttcgggtttaaggaatttttttgttttagtttttcgagtagttggaattataggttcgcgttattacgttcggttaatttttatatttttggtagagacgaggtttcgttatattggttaggttggtttcgaatttttgattttaagtgattcgtttgtttcgtttttttaaagtgttgggattataggcgtgagttatcgcgtcgggttttttataatgtgattttgaagttgatattggtagtgggtttttaaagtgtagatttattgggtatggtgttttttttaatttttagggttttattttaaatttatggatttagagtattgtaggagaagaggataaaacgagtaattaattttttttttatatgttaggttttttttttgttttgaaaagttatagaaaaatgttttagatatttgaattttaggaaataaataatggaagataaatattcgtatttattgggtttgaaatgggaaaatgaaagatgtggtaagaaattgataagggtttaagaagggcgatgggtatcggaattttttttatttcggaatgaaatgttgtttgttttgtgtatttaagttttttttttatttttatttttttgagacggagtttcgttttgttgtttaggttggagtgtagtggcgcgatttcgggttattggaagtttcgttattcggatttacgttattttttcgtttttattttattcgttcgtattaggtttttgagtatttgtgattataggcgtttgttattatgttcggttaattttttttttattttcggtagagacggggttttatcgtgttagttaggatggttttaattttttgatttcgtgattagtttgtttttgttttttaaagtgttgggattataggcgtgagttatcgcgtttggttttttttaagtttttaatgttgttttttgagtttttggtaattggggaaatttttttatttttttatttttatttttttttgagacggagttttgttttgtcgtttaggttggagtgtagtggcgtaatttcggtttattgtaagttttatttttcgggtttaacgttattattttgcgagttttagtttgtcgagtagttgggattataggtattcgttatcgcgtttggttaattttttgtattttttttagtagagacggggttttattgtgttcgttaggatggtttcgatttttttattttgtgattcgttcgttttggttttttagagtgttgggattataggcgtgagttattgcgtttagttatttttattttttttgatagggagattcgttttggtttaggttggagggtagtggcgggattttcgtttattgtaagtttcgttttttgggtttacgttattttttcgtttttattttatttttttattttaggttttagagtagttgggttattatgttcggttaattttttgtatttttagttgagatcgggttttattgtgttagttaggatggttttgatttcgtgatttcgtgatttgtttgttttggttttttaaagtgttgggattataggcgtgagttatagtattttgtttttttttttgagaaataagttttattgtgttatttaggttggagtagagtgatataattttgggtaattgtagtttttattttttaggtttaagtgatttttttgttttagtttttcgagtagttgggattataggcgtttattattacgttcggttaatttttttgtgtttttagttgagacggggttttattgtgttagttaggatggttttgattttatgattttgtgatttgtttgttttggttttttaaagggttgggattataggcgtgagttatagtatttttttttttttgttttgagagaaagtttcgttgtgttatttagattggagtgtagtggtataattttgggtaattgtagttttcgttttttgggtataagtgatttttttgttttagtttttcgagtagttgggattataggcgtgcgttattatatttggttaatttttgtatttttagtagcgatagggttttgttatgttggttaggttggttttgaatttttgatttaaagtatttgtttattagttttttaaagtgttggaattatagttatgagttatcgtgttcggttaaaaatttttagtttattttttttttgtgaaatttgttgagtatttaaatgtagttatttatgttaaattttaataaaatcgattttagagtttacgaggagggggtggtttcgtatttgcgtttgataggagttgttataaaggttttttttaattagaattttgggtttagttatttttgtgaagagtttttttgttagtaatagttagttttatcggtgaataaagtagtatgaatattagaggtttataaggaagaaaataaagtagtttatatttaatatttattttattttgttgagtaagaattatagatagttattattacggttgtttcgtttggataaaaataattaggaggtatttacgggattagttatacggtattaatttattattatagtagaattaatagtgattcgttaattaatagaatcgtttgttagaaagtattaatttagttatataaatattgaaataggttatatgtaaaatattataaacgttttgtgtgatgtatttttagttttttatagttttgtttggtataaaggaaatataatttggttgtgacgtagattgttgatgtaatttttaagtttttttgtatggggaaagttgttttgattgtggttttttttaaggtggagtttttaatattacgttggtagatttagatttcgtgaatagtttaaatgagtaagttagttgaatgttatttttagatggaagggaaatgagatggaaaataataaaaaaggattgttaggcggaatagtttttaatcgagttttcgttgagtgaggatttagtagttattaaatttaaatataggggttcgtagggaaattggaggaaatattttagagatagtaaagttgaaggtttttgtgttttgagggattcgagagtggatgttttatttttgtatttttagttagatatagaattagttagatttattagggaagtttagatgtttttattttataaagtaaggtttttagtagggtacgtatatatattgggaaagaagaaattttttagtattatgttggttaaaggtaagagagagaattttatttttatttggaatgttatttttgtttattttttttaatagtgaaatatttttaggttttcgaaaggttattttttggatatatgtaaaaagttgttttgttggttcgttatttttattgattcgtttgagtgattatttaggagcgcggcggtagtaagtagagtttatcggatttgggataaggattttaaaggtagttataaagttgagttttatttgttgatgatagtttttgtttagttgtttaaaatgattgtttgatttattatggtaattttttataaattaaaaatatattttgggttgtgtaatagtgtttttatttttttaggtaggtagattattttaatgttgttatatagggaattgggattttcggatttttttttttaatttttttatgttttttagtaggggaagtttttttgaaagttagagagttgtaaatttttaagtattaatgtaaagaagtcgatgatttaattcggaaggtggtttaagtgttttgtttgtttataaaggtatagattacgattatggatatatttagtggaagtaattatattcggtgtgtttttagaagtttatttgtgatagtttaataagaatttattattttagaaaagtattatataaagttatttaaaaaaatgtttgtataatcgttaatacggttaagttaggttttgggttttgttttttggtgtttagttgtgttgggaatgttatgaagattagcggttggaaattgatttgggtatggagaagagattgagggagagggaggggatagtacgattgagtaagggtatagtgttggttgttttatgggttttaggttttttttgttaggatgaggaagaggttttagagtagcgttatataggaaattaatttatttgttaattttttggaaaaacgtttgtttttggtttataaatagaaaatttaaataggatggtagttttttgtgagggtggaggggagggtattagattttgtgcggttggaaattttaaggtgtttagaattaggcgtttgtatttttttttatgttagattataatttttaaagaggtcggtagttatattttcgatggggaggtggataaggttattttgggagttgtttttaatttg

SEQ ID NO: 1929 - DNA, 6521 bp, Artificial Sequence
  chemically treated genomic DNA (Homo sapiens)
gggggaggggtggttgcgataggagattttttttgtttttagtagaaggaattttagtagttggagattagtaaatttttttggatatagatttgattttttaattgggaaggtttagggtaaaataaaaatttaggtttattggtttaaaaattatgaagaattttaagatcgttatagtagtttattaaattaaacgtggatttgtaagggttttatagttatgaagtttattttgtttggttgggttttaaaaagatggggatagtgattgtttaagttttgtggattaaggatttcggagaggttttttggttttttatatatttgttttgattatttttaaatataattttgttttttttaggtttggcgggttagtttagggatttttattagtgtgatgtttttaggagtaggcgttttaatattttttgtgtttttttttttagtataaggtttttttttattttatttttattatgtttgattttttattatttaaatgggttaagagaagtggcgtttgtgtaatgtgaaggttaaggttagtagggttagggaattgtgagattgtgttttggattgggatagatagtcgggttaatcgcgtgagaggggtttttagatgggtacgcgagtttaggtttttttttattggaagcgtcgagcggtcgtattttagggttttttttggagttagtatagttattcgtggtgatgatgcgtttttcggcgtttttagttcggtgttgtatcggtttttatttttcggtttttagaaagttttttttgtttttcgcggtattttttgggcgtgagttatgtaggtttgtagttagttttaaagggggtgtgtgcgcgagtagagcgttataaatacggcgttttttagtgtttataacgcggcgtcgttaggaggagcgcgcgggtatagggtgtcgttgatcggtgagatgttttcgttttttttatttttgagtagagttatattaggacggatgggcgggtaggggatggtagttaggtagagagggatgatatagttcgtagttataatttttgcgttttcgacggagtttaggaagttagggaggggaggtggtcggagttttattattaggtagttgagttaggggtttcggcgtaatcgtcgtttgagagtacgagttttaattataattttgtggtgggggggtaaatagaatagatataatgattattttttcgtaaagatggggaaattgagatttggagatttgtcgcgttgcgggagatttaggttagtaggtgatagagttggtttgtatcgagtttttttttgtagtatattttttgcgaagatgcggattttttagttgtggttttcggtttgtatgtatgagttatttagtttttttttaaattttttagttttttggatattgttgtttgtaagtatgaggttgcggattttagtatatgttgtaattatcgaaattcgattttttttgttttttaatgtatttgaggtgtattagagaaaagttatataagatttattaggttttagatttttgattttatagttttattttatagatgataatttgaggtttggagaggtttaggattggtgttaatattaaatagtaaataagtattagaattgggattcgagttaaagttttttgattttttagaatttttggatttagttaaaaaaaatatgatttttattattattttttaaacggagaggttaggaatttaaaggaaagtatagatattatataaaaaaagatgtttatgaaaatgttaagttataataatagtggagtattgggtataattgaaatggttaattttgtgagaatggtaaaataaatttaggttcgtgagtaagtggagtattatatagttataaaagtatgtttttaaagaatatttgaagatggtgaatgtgaagaattttgtataaattgtatggaagatagaaggaaatatattatagtgttaatttttgtttttgggtgatatgaattatcggtgattattttttttattttttttttggtttagttttttttatttgaagaagtagataggagtcggggttttgggattgaaatttttattattcgggggttttgttttattgtttttttattttttttacggttttttgttgatagttaaggaaaattttttttttttttttttttttttttttttttttttgagattaagttttattttgttgtttaggttggagtagagtagcgttatttttggtttattgtaattttcgttattcgggtttaagtagtttttatgttttagtttttgagtagttgggattataggcgtatgttgttatattcggttaatttttgtatttttagtagagatatggttttattattttggttaggttggtttcgaatttttgattttaagtaattcgtttgttttggttttttaaagtgttggggagataggtgtgaattaatgcgttttgttaggttattgatttttttaagtttttagttttgttttgtttggaaacgttttgggaagttgtttagtttaaagtttttaggagggtgtgtttggaggggagttgtttttaaagtttgtttgtttttttcgttttttttgttttttatttttcgttatttttttttttttttttttttttgagtagtttttttgtttatagaatcggttttttttggtagaaggagtaaggttaagtggtttaagtttttttagggagaatgaggttgtgtggtagtgttggggattcgagggttttggttttggtatggtttttttatttagggtagttggtagttaggtttttaggaggtagaggagatgaggggggaggtgagttcgagtaaaggaaaggaggtcggttgtgtagttacggttttagaatattttttggattagtagtatttatattatttgtagattggttggaaaagtagttttagaattaatattataattagttttgtagtgatttataagtattttaaaaagtggttaattattttagtaaagtagagttatatagttcgggggattataggtggtttttgtgtgtttgtttcggtttttttgtttttttttagatatgttgattagatattgttaatgtttagttttagattttagtttaatttggaagtagttagaatttattatgattatataagattttcgtgtttatagaatatatttttttttttgaggtttggattagatttattttatagatgaagaaattgaggtttagatatttaagtgatttggaattaaggaaagaatattggattaggggtcgggagggttgggtttttattttagggttattatgagtatgttgtggattttagggagttttatgttttttttgggttttagttttatcgttagggtagagaggttgggtgagagaacgattttttttttaggtttgagttggatggtttattagggattttaggttttttggagtagattttgtgttcgttgttgagtttggaattttttttttgtattttgtttttggttgttttattttttatggtttagtattttgttttttggttagaatttagttttgaatgggtttttttagaagttgttgtttttaggggtttttggtagagaggtgtttttggttggttttgtttttttggtatgataaaggttttgtttttgttggaggtattttagggtttagtgggtagttggggtagagttcgtgagattatagtttttttggtgagttcggttttcgttttttattttatttttggggaaggcgttgattttatttttttttttacgttgttttttggttttttgcgtttgattattttttatgagaggtattttttgttaatgtgttattgagtgtttagatgggtttgttgggttgagcgggttttggatgtgaattattttaggaaggggaattttatcgttttgttggttttgtgatggtaaatgggtgagtttagataagtagtttttgggaggggtatggtgggggtggagtgtagggggaggggtttttgttttatgtaatagttttagtttttgggaaagggtttattgtgtaagatcggggttatggtttgtgtttcgtggtttagggtagttagtttagtggtggtaggaatattggtagggtagtttgttgtcggtttagaggggatgggtagtgtggagggtttggtagagtaagaggatttatttttttaaagggattttttttgggaagtttgtttttcgggttattgcgaattttttttatttttcgaagggaattgttttttttggtttttattatttttatttttgaatgtataggtagttcggtttaagttttttattagggatgtagatggattcggtgtgaagggttggttgttgttgttttcggtttttgaaagttaagtttaggtggtgttgagattttttgggggttgtagcgttgtggtgaatggggagcgtttgttggggtgaaggtttaggtgtatattgtagaggacgtggttggtttttgggatgtagtttttttgtggaggtggtatggggagggacggatgtatgatttaaggggggtatttttagtgtttgatatgatcgatattattttggataaggaggttaggatgtagaaagtttgtgtgtttcgttgattgtcggggaggatgtggtttggataagagtttggttttttcgatgttagggtttttgttttttttatttaatattgttgttttgtagtttttttttttttgtattttttgttttcgtttttattcgaggtgtttatggtaagtttggttatttttttttatttttttaggaataaaagtgtagtagtgtttgttgtggggatagttgagggtagtgaggttttggggagttgttgtaggtagtaggtgggcgggacgttagtaggttgtttagttgtttttatgatggttttttgttttttgtagaggcgtgtaaagattttagaattggaggtatgatgaagattttgttgttgtttgtggggttgttgttgatttgggagagtgggtaggttttgggggattagacggttttagataatgagttttagggtgagtagattaagtatgatgtttttttggttatagggtgatgaggttagagggtagggtagttaattttgtttagtgtttttttattaggttttagtgttatagatcgtttttattttgtgtattgggtttgggtgtttgtgtttgggtttattttgagttttagtttcgaggtttttggtttaggttttgcgtgtattagattgtcggtatttgtaggtattttttaagtattttcggttgttgtattttatttagtttttttttttttaggttttttagtttagtttttaggttttttttacgaagttgtgtttggattatcggagtttttattttttttttttttggagtgtttagagtttattttttttgtgagttgacggtttttgtaggattattgttaaaaatttagattagatatgggtgtgagtttgttttatttttttttagttgggtgattttgggttattattttgattttatgatattttttttattttttattttattgagatataattaataaataaaaattgtgtatatttaaggtatatgacgtgatgttttgaaatgtatatatattgaaatgatgattattttttatggtgggacggtgggaagatttaaaatttatttttttagtaaatttttagttatgatatggtgttattaattataagtattatttgtatgttagatttttagaatatattttttttatttgatgaatattttgattttttattatattatattttttatgtttttttttgcgaagtgggtacggcggggggttggagtattatgtaaattgtatatgaagtgtttggcgtagtgtttggtatgggataaatattagtgaagtagtatttaggtgatatagtgtttcgttgtatttgttattagtgttatattttatttatttatttatttttttatttttgtcgtttggtattgtattggaataaagaaatatatatatttgtttaaattgaattttagaaagatttgtgtttaaaataataatattttatattttgatgttgtaaagttgatatttttgggtttttttttttttttgttaagttttttttgtatttagtttattttttaggggtatatggtagtggttgggtataattttgggtgtgtcggtttttatggtttgtatttttaagtagtagggtgtagttagtaaggagtttgtgatgggagtttgtgttagggtaaggttggggttatgttgttgtttgttggtaggagtgggggttttagttttgatagtttttgaattgaacgggtttttttggttatttagtttattttagggttttgaggttatttttttttttcgttttattttgttttttgtattttttttgtaga

SEQ ID NO: 1930 - DNA, 6521 bp, Artificial Sequence
  chemically treated genomic DNA (Homo sapiens)
tttgtaagagaagtgtaagaggtagaatgaggcgagaggaagaggtggttttaggattttggaatgagttggatggttagaaaggttcgtttagtttaggggttgttaaggttgggatttttatttttgttagtaggtagtagtatggttttagttttgttttggtataggtttttattataggttttttgttgattgtattttattgtttagaaatgtagattatgggagtcggtatatttagagttatgtttagttattgttatgtgtttttggagaatgagttgggtgtagaagaaatttggtaaggaaaaaaaaaaatttagaagtgttagttttgtagtattaaaatataaaatattgttattttggatataaatttttttagagtttagtttaaatagatatgtgtatttttttgttttaatgtagtgttaggcgataggaataagaagatgagtaaatgagtaaggtatagtattggtgataaatgtagcgaaatattgtgttatttaagtgttattttattggtgtttattttatgttaagtattgcgttaaatattttatgtgtagtttatataatgttttagtttttcgtcgtgtttatttcgtagagggagatatgggaagtgtgatatgataaagggttaaagtgtttattaggtaggaggagtatgttttggaggtttaatatataggtggtgtttatagttaataatattatattataattggaaatttgttaagaaagtagattttaagtttttttatcgttttattataaaaagtggttattattttaatgtatgtgtattttaaaatattacgttatatattttaaatatatataatttttatttgttaattatattttaataaaatggggggtggggggagtgttatgagattaagatagtggtttaaagttatttagttgagaagaggtgaaatagatttatatttatgtttgatttgggtttttaataatgattttgtagaaatcgttagtttataggagggataagttttgggtattttaaaggggagagggataagagtttcggtggtttagatatagtttcgtggaggaggtttgggagttgggttaaggggtttgggaggggaagagttgaatgaaatgtaatagtcgaaagtgtttgggaaatgtttgtaaatgtcggtagtttgatgtacgtagagtttgaattaggggtttcggagttgaggtttagagtgggtttagatataggtatttagatttagtgtataagataaaaacggtttgtaatattggggtttgatagagaggtattgagtagaattagttattttgttttttgattttattattttgtggttagaggaatattatgtttggtttatttattttggagtttattgtttgagatcgtttggttttttaggatttgtttatttttttaggttagtagtagttttataaatagtagtagagtttttattatgtttttaattttggagtttttgtacgtttttgtagagaataggagattattatgggaatagttagatagtttgttggcgtttcgtttatttgttgtttgtagtagttttttagggttttattgtttttagttgtttttatagtaggtattgttgtatttttatttttgaggaaatggggggaaatgattagatttgttatggatatttcgaatgaaagcgaaggtaggaggtgtagggagggagggattgtaggatagtaatgttgagtggaagaaataagaattttggtatcggaggaattaggtttttgtttaagttatatttttttcgataattagcgaggtatataggttttttgtattttggtttttttgtttagagtggtatcgattatgttagatattgaaaatattttttttaggttatgtattcgtttttttttatgttatttttatagagggattgtattttagagattagttacgttttttgtaatgtgtatttaaatttttattttagtagacgttttttatttattatagcgttgtagtttttagggagttttagtattatttgaatttgatttttaagagtcggaggtaatagtagttagttttttatatcgaatttatttgtatttttagtgggagatttgggtcgggttgtttgtgtatttaggggtggaagtagtggaagttaggaaggataatttttttcggagagtagagagggttcgtagtggttcgaggagtaggttttttagagaaagtttttttggaaggatgagtttttttgttttgttaggttttttatattgtttattttttttaagtcgatagtaggttgttttgttagtgtttttgttattattgggttggttgttttgagttacggggtataggttatagtttcggttttatataatggatttttttttagaagttgaggttgttgtataaaatagaaatttttttttttgtattttatttttattatgttttttttaagaattgtttatttgagtttatttatttgttattatagaattaataggacgatggggtttttttttttgaaatggtttatatttaaagttcgtttagtttagtaggtttatttggatatttagtagtatattaataaggagtgttttttatgagaagtaattaggcgtaaagagttagggagtagcgtgggagaagagatggggttagcgttttttttagagatggggtagggggcggagatcgggtttattaggaaggttgtggttttacgggttttgttttagttgtttattgagttttgaaatgtttttagtaggaatagagtttttgttatgttagagagataaagttagttagaaatatttttttgttaggggtttttgaaagtaataatttttggaaaaatttatttagaattaggttttgattagaagatagggtgttgggttatgaagaatggggtagttaaaggtaagatataggaaaggaattttagatttagtagcgggtatagagtttgttttagggagtttggggtttttggtgaattatttagtttagatttgggaaggaggtcgtttttttatttaatttttttattttagcggtgaggttgaagtttagagagggtatgggattttttagagtttatagtatgtttatggtaattttgggatgagagtttagttttttcgatttttagtttagtattttttttttgattttaagttatttaaatatttgagttttagtttttttatttgtaaaatggatttaatttagattttagagaggggaatgtgttttgtaaatacgagggttttatgtaattatagtaaattttgattatttttaaattagattgaggtttgaggttgggtattggtagtgtttaattaatatgtttggagaggggtaggaaaatcgagataagtatatagaggttatttgtggtttttcggattgtgtggttttgttttgttgaaatgattgattattttttaaagtatttatgaattattgtagggttggttataatgttggttttgagattgtttttttagttagtttgtaggtgatatggatgttgttgatttaaggaatgttttagaatcgtgattgtatagtcgatttttttttttttgttcggatttatttttttttttattttttttgttttttgggagtttggttgttagttgttttgggtggaagagttatgttaaggttaaggttttcgagtttttagtattattatatagttttattttttttaagaaggtttaaattatttggttttgttttttttattagaaaaggtcggttttgtggataaaggggttgtttaggggaagaagaagaggagaagatggcggggggtggggggtagggggggcggggggagtaggtagattttgggagtaatttttttttaggtatatttttttgggaattttgaattgagtagttttttaaaacgtttttaagtagggtagggttggaggtttaagaaaattaatgatttggtagggcgtattgatttatatttgtttttttagtattttgggaggttaagataggcggattatttgagattaggagttcgagattagtttggttaaggtggtgaaattatgtttttattaaaaatataaaaattagtcggatgtagtagtatgcgtttgtagttttagttatttagaggttgaggtatgagaattgtttgaattcggatggcggaggttgtaatgagttaagaatggcgttattttattttagtttgggtaatagagtgagatttggttttaggaaaaaaaaaaaaaaggagagaaaagaaggaaggttttttttgattgttaatagggaatcgtggggaggatgggaaaatagtgaaatagggttttcggatggtgagggttttaattttaaagtttcggtttttatttgtttttttaaatggagaaaattaaattaaaaggaaaataagaaaaataattatcggtaatttatattatttagaagtaaaggttagtattgtggtatatttttttttgttttttatgtagtttatataagattttttatatttattatttttaaatattttttaagggtatatttttatggttatgtaatattttatttatttacggatttaagtttattttattatttttataagattggttattttagttgtgtttaatgttttattattattataatttaatatttttatgggtatttttttttatatagtatttgtatttttttttaaatttttaattttttcgtttaaaaaataataataaaaattatattttttttaattaggtttagaaattttggaaggttaagaggttttggttcgaattttaattttgatatttatttgttgtttagtgttggtattagttttaaatttttttaggttttagattattatttgtaaaatgagattgtggaattagaggtttgaggtttggtggattttgtgtgatttttttttgatgtattttagatgtattaggaggtagaaaaagtcggatttcggtggttgtagtatatattgaaattcgtagttttatatttataggtaatagtgtttagagagttagagaatttagaagaaaattagatgatttatgtatgtaagtcgaaagttataattgagagattcgtattttcgtagaggatatgttgtaggaaggagttcggtgtaggttagttttgttatttgttagtttgggtttttcgtaacgcggtaggtttttaggttttagtttttttatttttgcgaaaggatgattattatatttgttttatttatttttttattatagaattgtggttggagttcgtgtttttaggcggcggttgcgtcggggtttttggtttagttgtttggtgatggggtttcggttattttttttttttggttttttgggtttcgtcgaaagcgtaggggttgtgattgcgagttgtgttatttttttttgtttggttgttattttttgttcgtttattcgttttggtgtggttttgtttaagggtagggaagacggggatattttatcggttagcggtattttgtgttcgcgcgttttttttggcgacgtcgcgttgtgggtattgggaggcgtcgtatttatagcgttttgttcgcgtatatattttttttggggttggttgtaaatttgtatgatttacgtttaaagaatgtcgcggaaagtaaggggagttttttggaagtcgggaggtgggggtcggtgtagtatcgggttgggggcgtcggggggcgtattattattacgaatagttgtgttggttttaggagagattttgaggtgcggtcgttcggcgtttttagtagggaagagtttgaattcgcgtgtttatttgggagttttttttacgcggttagttcggttgtttgttttagtttaagatataattttatagttttttggttttattgattttaatttttatattatataagcgttattttttttgatttatttaaatagtaaagagttagatataatgagggtgggatggagaggggttttgtgttggagaagagagtataggaagtattgaaacgtttatttttggaaatattatattgatgggggtttttggattgattcgttaggtttggaggaaatagaattgtgtttaggagtgattagagtagatatgtggagagttagaaggttttttcggggtttttgatttatagagtttaagtaattattgtttttatttttttggaatttaattaagtagggtgggttttatggttgtgggatttttgtagatttacgtttggtttaatgggttattgtgacggttttgaaattttttatagtttttgaattagtggatttgaatttttattttgttttgagtttttttagttaggaaattagatttgtgtttagaggggtttgttggtttttaattgttggagttttttttgttgagagtagggagaattttttgtcgtagttatttttttttt

SEQ ID NO: 1931 - DNA, 14006 bp, Artificial Sequence
  chemically treated genomic DNA (Homo sapiens)
  unsure 8289, 8310, 8313: n is a or g or c or t
aagtaatttttttgttttagtttttttaaaaagttgggattattaggtatgtgttgttatcgttcgttattattttttttagtagagatagggttttacgatgttggttaggttggttttgaatttttggttttaagtaattgttttgttttggttttttaaaatgttgggattataggcgtgaggtattatgtttagtttgtttgagaattttttttggtaattaaggggtttttagaaagtattatattttatttaaaatggggagttttattgggcgcggtggtttacgtttgtgttttagtattttgggaggttaaggtggaaggattatttgaggttaggagttcgagattagtttggttatatatggcgaaattttatttttattaaaaatataaaatttattaggtgtgatggtgcgtgtttataattttagttatttgggaggttgaggtgagagaattatttgaatttaggaggttgagtttgtagtgagtttagattttgttattgtattttagtttgggtaatagattgagggagatttagttttaaaagaattttttaaaaaagtaaataaataaataaaatgaattttttagtaggttagttttttgagtatagggtatggttgttttgtttattagtttgtgtttgttatagagatggggtttagtaagtatttattgagtattgaatgaattagagaaggtatatgagttttttaaggttatatagtttatttttggttgaaatagaggagtttttatttttatgtggtttgtttatgttttaaagaaagtttaaagtaggtagagtttggatttagagaggattttttatgtggtaggatgtatttttgaagattttttttggttgggagtttttttgttgagtttagtttagttattgatgattagggaggttggggaaatcgtttagttttaagtagagtgttaggaatttgtgaatattaaagatttgtcggaaggagttatttagtggtttgggaatgagatataagttttattatattaggtatagttagtattaggagagggagtggtaggggtggaattagtttttgttgaattagtttattttgcgttaatgggatagagtttagttggaggatagtatgggatgagaaaggtaattttttttttattttaggtttagggtaggtattgtttacggattattgagttttttgtagttaggttaggatgtggttttagattttttttaatatagagttttaggaattaagaattagttaattcgagttggattttaaaaggaagtttgattttttattttgattttatgtggagttgttaggggtgtatatagaggtttttttgagggttttggaggagattgttttttttttaagttttagtatttttaggttagtttttagattttaaaattttttttaaaataaaagtataaaaatttttataagtaataataaatattttttgttttaagaaagaaaagttaaattgtttagttttgtttaaaagggatggttaaaggttcgtggttttagattgttttatagttattaggtggagagttataagttaggtagttttacgttttttttattggtttagtggggttgtgggtttttattttttttgttagttatttagggatttagttggttgggggattagtgtttttgttttgttagttgtggtttttagttgatgagattcgagtttaggtttggttgggaggttagaggtagagggaggtatgttatagttatagttatttttagggaggaagaggtatgtttaggagtttattttcgggttggatttatttagttttttttttatagtattcgtgtgtttgatttttttcgaaggttgttttttggtttttttttttttttttttattttttttttttttttttattttttttttttttttttttttttttatttttttttttttttttttttttttttttttttttttttttttgattttttttttttttttttttttttttttttttttttttttttttttttttttttttttttttattttttttttttttttttttttttttttttatttttttttttttttttttttttttttttttttttttttttttttgatttttttttttttttttttttttttttttttttttttttttttttttttttattttttttttttttttttttttttttttttattttttttttttcgttttttttttttttatttttttttttttttttttttttttttttttttttttttcgttttttttttttttttttttttttatatttttttttttttttttttttttttttttttttttttttttttttatttggttttttttttttttttttttttttttttttttttttttttttttttttttttttttttttttttttttttttttttttttttttttttttttttttttttttttttttttttattgtttatagtagatgaggaaattgagattttaaaggtgaaaggttttgtttaagttatatagtttatagtgatagcgataggaatttaaattaggttcgtttgttattaaagtttttgtttttagttattattttgtgtattggtaaggtgatttgttttagggtttattttaatggatttttaattgaaatgtttatgttagtggattttaaatttgagtaagtattagaattttttggagggttttttaaaatttagatggttttttggagtttttgattgttaaggtttgtagtgaggtttaagggtttgtgtttttaataaatttttgggtgaggttgttggggttggtatggaaattagattttaggaatttttggtttttattagatggtgatatataagatttttgttacgttatggaaatattttttttttttattaggagaatttggggaatgatatgatttggttttgtgtttcgatttaaattttattttgaattggaattttataatttttacgagttatgggagggattaggtgggaggtaattgaatatgggggtggttttttttttattttgtttttatgatagtgagtgagtttttatgaaatttgatggttttataagaggtttttttttttgtttggtatttattgttttttttgttattttgtgaagaggtattttttattatgattgtaagttttttgaggttttttttgttatgcgaaaatgtgagttaattaaattttttttttttataaattatttagttttgggtatttttttatagtagtgtgagaacggattaatataattattaatttttgggtgattttgggtgagttttttgttttttttgggtttagtgtttttatttgtatagtaagtgtttcgatatgatgttttgttttttagataagtttaaagaagaagagagtaaggaagatagttgggtagattgggtttgatttttgattatagagatttgtgtgattttaggtaagagatttaatttttttgggttttaagttatttgtgaaatggaagaatgaaattagatggtttttaagtgtaaagtttattgaattaaaggattgaggatggtggggagaggtcggtggggttttaaggttgattagacgatgaggatatagttttttatttgtttaagattttgaggtttaaaatataggtttttttttttttttttttttttttttatttttttttttttttattttttttttttttttattatttttttttttgttttttttttttttttttttttttttttttttttttttttttttttttttttttttgttttttttttttttttttttttttaaaaatattattttaggtagtcgtaggtagttttggttttggaattagatagatttagatttagttatggttcggttagtatgagtttggcgttttgggtaaaacgatttttgttttgtggttttagtatttttatgtgtagaatgggtaagtgatgttttttcgacgtgggtggtggtttatacggtttattttatggaagtatttggtataggggtttatatgggtatttttgttatttttttagtttggaggttaagggtgggttttcgagttagataatatagttggaattttagttttgttagttgttggcggtgtggttttgagtaagtgatttaatttttttgtattttagtttttttattggtaagattggagtagtaataatttttgttatttagggttgtcgtgaagagtaagtacgtatcgtttagtacgttgtttggttgtcggttgttttgattattttattaatgatggtgattatatagtcgatgaattaggtatttagcgtttggttagggtagggaatagaatatagttttttttttatagagtttttggtgtaaggagttttcggtgtaaggagagagatattttaataggtaaggatagtattgtattagtgaggtgatggggtgattttgaggggtatagtagttttcgagggttggggaaggtttttttgggaggtgatttttaatttgagatttgaagaggtagtaggagattatcgggttacgaattagggtaggaatagtatttaggtgggaggaatagcgttgtaaaggtttagggtgagaggtagttaatttttcggttagtgtggagtttgagttttttatcgggagtagaggcgtttgtattttttttagtagtcgggtgtttagatgtgttttttgtttgcgtttagtgggtacggtttttcggttgtaagaggttgttagaggggcgggtcgtttttagcgggttttcgtcgttatttataagtttagttttcggttggtaggggtatttttttttcgtagttttttttttacgtagttagtcgttttcgttttaggttagtttagttttttgttttttttttttgtttttttttttttagttgtttttttggttgagttttgttttagttttatttagggaagtagtttcggcggttagtagggagtttaggatagagtaggttttttgggaagttttcgggtgataggggtgttttagttgcggcgttttgggggtttagagggggattttgaatgaataaatgaatgaattgttttttgggtaaatagttatagttagaggagtttgtgattggtagaaagaagttagggtgtgtaagtttttttaatagtttcgagtggtttgtagttatagggaatttttaggaagatttttcgggtagagattagagggaaggtattattatatatttgttttgggtgttttttgaggggggttagggaaggggaatgaatattaatagagagaaaagtttgtttttttttataattttatatttgttaaaaggaagagttttgttattatttttagatgttaaaagtaatgtatgtttattgtttaaagaaatagtaaggatatataattaaatatatgaatgtggatttttatatttagtttggtaatttgtttaattattagattgtgaatttttttttatattatttatatttttttaatatatattttttatggttgtatagaaaggttattttaagattatttgatttttttataatagatttgtttttttttttttattagaatagtgttgtaatgaatatttagtatgatatttttgtgtgtgtgttttatgaatattttttagaaattgttagatttaaggtttgtttatttttaagatttttgagtttttggttatattgtattttggaaggtcgtggtagtttgatttttttacgatgttatattagggtatagtatttttatatattaaatttattttgttgttatttattttttaaattttttttgatgtgaagtcgagaataatatttagatgttttaataggtattttatttttttgttagtgttgatttttttttataaatttattttttatatttttagtttgatttttttgtttaagtttgtttttattttttttttttttgggggtatgtttatttttttttaattgatatttaagggttttttgtatataaaggatataaaatttttgtcggtattttttgttgaaaatattttatttttttttttgtttttagaatagtttattttaaatgggtaagttagttttggtaaaattataagtattataatattagggaattattatttgatataagtttaattatttagatttgtgcggtttagagatgttagattattggtttgaggttatacgtttgaacgtttaggttttgagtttttttttttttattagggaaagtttttaattttttttttgtattttttattttttttttaagattaattttttttgtggtttttgttgtattttttgttttttttaaattggtttgaaggtaagatttttttaaatgttttggttgttgaggtgagtgtgattgggttatttaggtttttggtgtaggaggaggtagtttggttttttttttaatttaaattagtggtatttaaatgatgatgtgttatatatttgggaggtttataggagagttattttttgatgtataggggttttttttggatttttttaaaattttagggaatagataattttaattttgggtaagttatgtttttttttggtttgatttgttttgagaagttttttattcgtattgggttagggtttgtttgttaggtttttttagggtttattttttttttattacggtttttattatatcgtgttttaatgattagttattttgtttgtttttttttttagtcgggaggtttttagaggttagatttgggatattattttttttttgtatttttagttttttgtataagaattagtatatattagggttattgtttatggaataaataaagtaattaggtgttagttttattatttgtaaaatggggtgggggaagttggattgaagttttattttttagatgtttatttaataattttttttagtttgtaaattattttttcgagatgattttattaaatttttattatggttatatgatgaaggtattattaatatgtttattttatagattaggaaatagaagtttggagagttttgatgttagatttttttataaaagggagtagaatattgtgtaagaaggggtattttggttttaggtaaggtatttttattttttggttataataatattatttgtaaataaggatgatattatttgatattattattattttgggggtgggtttgaattggtttgttatttgttaattgagtgatatggaattagttattttttatttttggtttgagtttttttatttataaaatgggaatatgattagtaattgttttataagattattttaaagagtaaatgagattatataagtaaagttgtaagtagaggatttgttgtaaaataaggtttttataaatattagttattgttttgatgattatttttattttattgtgtttgtttatatttgtgatatttatttgagttaaatggaaattattattgatttttttagtggattattaatgtttttatttttacgtgatgtataagaaaattaaaagtttattttattttttttgagttatattatatcgggtgtagatattatcgttagttgcgaggttatgaagtagatttagagttttttaaagtgtaatttttagattatttgtattagaataattgtgagtgtttttttttttttttttttttggagatggagtttcgttttgtcgtttaggttggagtatagtggcgtaattttggtttattgtaagttttgtttttcgggtttacgttatttttttgttttagttttttaagtagttgcgattataggtatttattatttcgttcggttaattttttgtatttttagtagagacggggttttatcgtattagttaggatggttttaattttttgattttgtgatttatttatttcggtttttaaaagtgttgggattataggcgtgagtattgcgttcggttaattgtgagtgttttttaaagttttagtttggaaattagaatttttgtggatgaggttttagtgtttgtatgttgaattagtattttaggttatttagatgtattttaaaatttgagaattattaatttagagtgtttaaacgttttttttttttgttttttagttatattggggttttggggttttagttgtatataaggttttttatttattttttaagtaatatttatgattatgagggnaaaaaattttttttgtgcganaanaacgatttttgttttatagtattatataaagttagatcgtgttagtaattttttagtatggaggttttgaaattatttttagttgtagaattttttttataaatgaaagttttatggggaagtgtaatttgaaaatagataaaggtggtgttatttttgttgaaatagaggtggaagatttttttttgttattaaattttatttttgttgttgaagggtttttaagaatttttgtagttttatggggtaggtaggaaattgtaatttttttattttaaggagttaagagattaaagttttagatatttgttgagtttattgtgtgattttggtaaggtatttttattttttggttataataattttatttgtaaataaggaggtcgaatggtatattagttagggtagtagttgtagtaataaataggtttttaaaggtataagggttgaagtaaagtagagttttattataaggtaagtatttttgaatggagggtggtttttttttttatggtattttagtgatttatttggtggttttattttttttttagatatttttattgtttgtagttaggtgtataagataaaagaaagtatggaggtggtatatttgtttatttgttttggtttggaagtagtagatatgatttttatttatatgagaattattatgtggttaatttagttgtaaaggaggttaggatatggagttataaggatatgaggtttttggtaaagagtagtttttttttagttatagtcgtgtattgtggatagggagaatgaatttttgtggatagttatttgtttttgttataaatgtggtgattttttgggttgtttttattttttgattttaagtttatatttttattagttaattttagttaatatggtgatgttggatttataatattatttatttttaaggtaatttttattaaatatattaagtaaatttttagattttaggtttttaaatatggatttttttgaaatataggtaattgttatttttttttttttttggaaaaaggaaataagaataatggtttgatagaatatgttgcgggttattaagttaaaggtatttatatttattatttatttgaatttttttataagtttatatggaaaggttttaggattattatttttattttataggtgaataaaatgaggtttagagagttaaagggatttgtttaaggttatatagtttatagtaaaagaatgggatttgaacgaaaaatattttatttttgttttagggttttattgtatatttgaatgttggtgtttatgtacgtgtatatggtgtggttagagtcgggattttttttgggttgggtttttttagggttgggtatgagggaagtgaaagtttaggaattatgtttaaattttttagaatgggttaaggttgttgattgtaaggtagttgggtggttgttttaggttttggggtgaagaagtatagtgtgattaagtattatagttattggttgtgtaaaagagaagggatagtgtatgagggtgttgtgtggttttggaagatattgaggttttaattgggttggttatatagtgggtgtttgggagtatttttttgtgtgaataaatgtatgtgggagtaatagttgtagtattgtgagaaaatgagatgaattagatttgttttttgtttttgaggtttttaggggaggagagataaatttgtaatatatatttttattaatttatttaataaatatttattagtatttattatacgtttggttttttatagggtaagaacgatggaaagataggatttttatttttgtggaatttatttgagagatgaggaaagtgaggttttgattggttacgtgatatttttaagattatttggttagattaggatttgaaatatttggtttttagtttagtattttttttatagtttttgttgaggaggtggtcgtaggttaggattgagatgtagtgaggagtttttgttattggtagttattttgagttgtcgtcggatttaggatatgttggttttaggcgatagtacgaaattagttatttttttttagaatttttagatttttgtagtaatggatataggtatgaatgagaaaaagtagaaatttttgtattgttagatggaattaagaggtagtaattttacgtggtgttattagagaaagaaatgttgacgtttgggtgacgttggttggtagtatattgtggtgatgatagattttagatttaagtgttttagagttgagattttagttttgaattttaattttttgagttttttagtttttttatttataaggtgggtatgttatgagtatttgtttgttagggttatggtgagattaaatgagtttatatttattaagtattgagtatagtacgtggttagtttagtgaaggtatttttatttttatttttgggatagtgagttttgaaattggtttttgtatatttgggtgtttggtgttttgtgattttgggtttttagattggaaaatgttatttgggttagttttttgtttttatgtttggttttaaggagaggttttgggttttgttggtggagagtgttttgggttttattgtttttattatagatagtttttggtaatgttggaagtattagcggttgatttagtagggaggttagttgttatttaggtagaatgttagaatcggttttgtttttttggggtataggatatgggtttttagattttagttttgggtttttgttgagggtagtttttgtgtaaggaggtgggtgggtggggagatgggtataaaaaataatagtgagtatatttggtttttttttttggaaattaggggttagagaaataggaagttaatggagagagggtgtggtgtagtgagaagagggtaggttttgtggtttggtagatgtgagttttaattttgggtttgatatttattgatttattttttattttttgagataaaattttattttgttatttaggttggagtgtagtgatatgattatagtttatttgtagtttcgatttttggggtttaagtaatttttttattttttgagtaggtgggattataggtatgtattattatgtttggttagtttttgtattttttgtagagataggatgtattagttagggtttttttagagggtttttttacggtttattttttatatataaaaagggggagtttattaagtattaatttatatgattataaggttatataataggttatttgtaaggagaattagtttgagttttaaaattggagaatttggaattcgatgttcgagggtaagaagtatttagtatggtagaaagatgtaggttgggaggttaggtcggttttttttttttaggtttttttgtttgttttatagtttttggaagttaattagattgtgtttatcggagtaaggtgatttgtttgatgaattaattgttattattaattaagttgatatttagtattaattattatatagggttttattatattgtttaagttggttttgaatttttggatttaagtgatttatttgttttggttttttaaagtgttaggattgtaggtatgagttatcgtatgtttttgcggtgagttcggttatttattgtttttgtgagtatgtgtaagttatatatatataatttttttaggttttagtttttttttgtttagggttgttgagagagtgtttgttatgttttttggtttggagtaggtgtttagtaaatgatttggggtggggaataagggtaggggatatttaaatgtttattttttgttatttgaattggtttgaatagttattagaatttatgaatttttgagtgttatatgaagtaagaatttaggtagtaagtgtatatgttttttgttattgttataataataattataaatcgaatggtttaaaataatataaatttattattttattagttttggaggttagaagttttaaatgggttttattgggttaaaattaaagattgtatttttttcggaggttttaggggagaatttgtttgttttttttttttagtttttagaggttgttatattttttgatttatggtttttttttttagtttttaaagttagtaatcgtaggttgagttttcgttatattaaattattttgatttttttgtttttttgttttatttttaaagacgttgagtttatttgggtaatttagtataattttattattttaagatttttaatgacgtttgtaaagtgttttttgttatgtaggatgatatatttataggttttggggattaggatgtggatatttttggggatttgttattttgtttaatagtgatattggtttgtatttgattgttttttgaatttcgaatttagatattgggagtttaggtggttatttattgatagttggtttagtagagtattgattaattagaatggatgtaagtgtagtaattagtgaggttttattagggagtatttagtgattattaggatcgaattaggaattagattttggtattatttagattgcgtttacgtttttgtatttatgaatttgttgattttgaacgagggggtttttttatttgtgaaatggggatggcggtatgttgtatatagggtagtagttaggatggaaggagatagtaagagttaagtgtttggtatttggtaggaggtttaataggaatgaatgattttttaggagtttaattttttagtttgagtttttttattttaggtattggtgatttttagttatgagaatttttttgtttttgttttatgttagggagatatgtttgtttggtttatgggttgtaaggagtataagggttttttttttttttttttgtaagagaggaggtttatttttgaggatgtggatgttaattaggaggggagaaggtgttagttgtttagttagttttgtgtttgatttggaaggtttttgggatatgtgttggtttgagggttggattatttttgttttttaggttgtaggagtttgtagtttttatttagttgttttattattaatggggtttagtgttttttatgtttatttttttttgtttttagttttgttattaattgttttattttatttttaagttattgtttatatgttttaagaggggttattttattggtttatgtaatttttttagggtttttattggatttttgttggggttttttttgatggtggatggattttttttgaatttggaatttgtatttttagaaggttttagaagaattacgaattggtattgaattgaattggtattgattttgatatgatttagtttagggatggaagtttatattttttattatgtgttgtggtagatattatatattagttatgattttttttttagttgaatttagatgtttttgttatttatttttgtggattaaatatttttaaatttagtggtttgaattgatttatttatttataattatgtaatttagtagagttttgtagggatagtgtatttttgttttatatagtgttggttgcgttatttatgggttgtatttagttgggagtttgattggggttgggatatataagatgattttatattttggaatttgtgtgttttgtttttttttttttttttttttgtagt

SEQ ID NO: 1932 - DNA, 14006 bp, Artificial Sequence
  chemically treated genomic DNA (Homo sapiens)
  unsure 5694, 5697, 5718: n is a or g or c or t
gttatagagagagagaaagagagaaatagagtatataagttttaggatgtgagattattttatatattttagttttagttaagtttttagttgaatgtagtttatgagtaacgtagttaatattatgtggagtagagatgtattgtttttgtagaattttgttaagttgtataattataaatgaataagttagtttaagttattaaatttgggggtgtttgatttataaagataaatgataaagatatttgggtttaattagaggaaaagttatgattgatgtgtgatgtttgttatagtatatggtgaggggtgtggatttttatttttggattagattatgttaaggttagtgttaatttaatttaatgttaattcgtgatttttttgggattttttagaaatgtaagttttagatttagagggaatttatttattattagagagaattttagtagggatttagtggggattttggaaggattatatgaattaatgaggtagttttttttggggtatataaatagtgatttggaaataaagtagagtagttggtagtaggattgggagtagaaggaggtagatataggagatattgagttttattgatagtagaatagttgaatgggggttgtaggtttttgtagtttaggggataaagataatttagtttttaagttaatatatattttaagagttttttaggttaaatataaggttggttgggtagttggtattttttttttttttagttagtatttatatttttaaaaatgaatttttttttttataggggggaagagaaggagtttttgtgttttttgtagtttatgagttagataagtatgtttttttagtatggggtagagatagaaaggtttttataattagaaattattagtatttgggatggagagatttaagttgggaagttaaatttttgggggattatttatttttgttgagttttttattaggtgttagatatttaatttttattatttttttttattttaattattattttatgtataatatgtcgttatttttattttatagatgggagaattttttcgtttagagttagtaggtttataagtgtagggacgtgaacgtagtttaaatgatgttaaagtttggtttttggttcggttttgataattattgaatattttttggtaaagttttattggttgttatatttgtatttattttaattggttaatattttgttgaattaattgttaatagatggttatttgaatttttaatatttaaattcgaaatttaagaaataattagatgtagattaatgttattgttagatagaataatagatttttaaagatgtttatattttaatttttagaatttgtaaatatgttattttatatggtaaaagatattttgtagacgttattaggaattttgagatggtgggattatgttggattatttaggtgagtttagcgtttttaaaaatgagatagagaggtaggagagttaaagtgatttgatgtgacgaggatttaatttgcggttgttggttttgaaggttggggaaggggattatgagttaaggaatgtggtagtttttagaagttggaaaaggagggtaaatagatttttttttagggttttcggaagagatgtaatttttgattttagtttagtgaaatttatttgggatttttgatttttagaattaataagataataagtttgtgttgttttaagttattcggtttatggttattgttatagtagtaataggaaatatatatatttgttatttgaatttttattttatataatatttaggaatttatagattttgataattgtttaaattaatttaggtaataaaggatgggtatttgagtgttttttgtttttattttttattttaagttatttattgagtatttattttaggttaaagaatatggtagatatttttttaataattttgggtaggaggaaattgaggtttaaagaggttatatgtatgtgatttgtatatgtttataaaaataataggtggtcgggtttatcgtaaaaatatgcggtggtttatgtttgtaattttagtattttgggaggttaaggtaggtgaattatttgagtttaggagtttaagattagtttgggtaatgtggtgagattttgtgtgatggttaatattgagtgttaatttgattggtgatagtaattagtttattaggtagattattttatttcggtgggtataatttaattagtttttagagattataaagtaggtagaaaaatttgaaaaggagagatcggtttagttttttagtttatatttttttattatgttggatgttttttgttttcgaatatcggattttaagttttttagttttgggatttagattgattttttttgtagatggtttattgtgtgattttgtgattatgtaaattaatatttaataagttttttttttttatatgtagagagtgaatcgtaagagaattttttaagagaattttgattaatatattttgtttttataaaaaatataaaaattagttagatatggtaatgtatgtttatagttttatttatttaggaggtgggaggattatttaagttttagaggtcgaggttgtaaatgagttgtgattatgttattatattttagtttgggtgatagaatgagattttgttttaaaaaataaaaaataaattaataggtgttaaatttaggattagaatttatatttgttagattatagggtttgttttttttttattatattatattttttttttattgattttttgtttttttgatttttgatttttaggaggaaaaattaagtgtgtttattgttgttttttgtatttatttttttatttatttatttttttgtataagagttgtttttagtaggaatttagggttggaatttgaggatttatgttttatattttaagaaagtagaatcgattttgatattttgtttggatagtagttgatttttttgttgagttagtcgttggtatttttaatattgttagagattgtttatggtgaagatagtgaggtttagggtattttttattagtagagtttaagatttttttttggggttagatatggaggtaagagattagtttaaatgatattttttagtttgggaatttaagattataaggtattagatatttagatgtgtaaaggttaattttaaagtttattgttttaaaaataaaaatagaaatgtttttattgaattgattacgtgttgtatttagtgtttgatggatatggatttatttaattttattataattttgataggtaggtatttatagtatgtttattttatgaatgaggaagttgaggggtttaggaggttaaagtttagagttgggattttaattttggagtatttggatttgggatttattattattatagtgtgttattagttaacgttatttagacgttaatatttttttttttgatagtattacgtagaattattgttttttgattttatttgatagtgtaaggatttttatttttttttatttatatttgtgtttattgttgtaaaaatttagaggttttaaaaagaaataattggtttcgtgttatcgtttgaaattagtatgttttgagttcggcggtagtttaaagtggttgttaataataggggttttttattgtattttagttttggtttacggttatttttttagtaggggttatggaaaaagtgttgggttggaagttaggtgttttaagttttaatttggttaaatgattttgggaatgttacgtaattaattagggttttattttttttattttttaaatgggttttataaggataggaattttgtttttttatcgtttttgttttgtggagagttagacgtgtagtagatgttaataaatgtttgttgagtgaattaataaaagtatatgttataagtttgtttttttttttttgagggttttaaagataggaagtaggtttgatttattttatttttttatagtgttgtagttgttatttttatatgtatttatttatataggaaagtgtttttaggtatttattatgtggttagtttagttgaagttttagtgttttttaggattatataatatttttatgtattgtttttttttttttatatagttagtggttgtaatatttggttatattgtatttttttattttaggatttaggataattatttagttgttttatagttagtagttttggtttattttggggagtttgagtatgatttttgagtttttattttttttatgtttagttttgggggagtttagtttaaggaaaatttcgattttaattatattatgtatacgtatatgaatattaatatttaaatgtgtagtggggttttaggataggaataagatgtttttcgtttaaattttatttttttgttatgagttgtgtgattttaggtaagtttttttagttttttgagttttattttatttatttataaaatggggatgatagttttgaggtttttttatgtaggtttgtagggagatttaagtagataatggatataaatatttttggtttaataattcgtagtatgttttattaaattattatttttattttttttttttagggggaaaagagaatggtagttgtttatgttttagaaaaatttatgtttaggggtttggagtttggaaatttatttagtatatttgatgggaattattttgaggataggtgatgttgtgagtttaatattattatgttaattaagattgattaatggaaatgtagatttagaattaaagaatggaagtaatttaagaggttattatatttgtgatagagataggtagttgtttataaaaatttattttttttgtttataatatacgattgtggttgggaaagagttgttttttgttaagaattttatatttttgtaattttatgttttggttttttttgtaattagattggttatatgatagtttttatgtgagtggaagttatgtttgttgtttttaggttaaagtagataagtaaatatgttatttttatatttttttttgttttgtgtatttggttgtagataatgaggatatttgaggagagagtgggattattagatgagttattgaagtattatgaggaagaggattattttttatttagaaatatttgttttataataaagttttgttttgttttagtttttatgtttttggggatttatttgttattgtagttattattttagttgatatattattcgatttttttatttatagatgaaattattgtggttaaagagtaagagtgttttgttaaggttatatagtaagtttaataaatgtttagaattttggttttttaattttttggagtagaggagttgtagttttttgtttgttttatggagttataaagatttttagaggttttttagtaataagagtgagatttagtggtagaaaaaagttttttatttttgttttaataagaataatattatttttatttgtttttaaattatatttttttataagatttttatttgtggaaaggattttgtaattgaaaataattttaaagtttttatgttgggggattgttaatacgatttgattttgtgtggtattataagataaaggtcgttnttntcgtatagagggggttttttntttttatgattatgaatattgtttagaaggtaaataagaaattttatgtgtagttaagattttaagattttagtgtgattaaagggtaaaaaggaaagacgtttaagtattttaggttggtagtttttaagttttggggtgtatttgaatgatttggggtgttggtttaatatgtagatattgaagttttatttatagagattttgatttttaaattgaagttttaagaaatatttataattggtcgggcgtagtgtttacgtttgtaattttagtatttttggaggtcgaggtgggtggattataaggttaggagattgagattattttggttaatacggtgaaatttcgtttttattaaaaatataaaaaattagtcgggcggggtggtgggtgtttgtagtcgtagttatttgggaggttgaggtaggagaatggcgtgaattcgggaggtagagtttgtagtgagttaagattgcgttattgtattttagtttgggcgatagagcgagattttatttttaggaaaaaaaaaaaaaagaaatatttataattattttaatgtaggtggtttagagattgtattttgagaagttttgagtttattttatagtttcgtaattggcggtaatgtttgtattcgatgtggtgtagtttaaagagaatgaaataagtttttggtttttttgtatattacgtgggaataagagtattaataatttattaaagaaattaataataatttttatttggtttagatgagtgttataggtatagataggtatagtggaatagaaatgattattagaataatagttaatgtttatagagattttattttataataaattttttgtttatagttttatttgtatgattttatttattttttagaataattttatgaggtagttattgattatatttttattttatagatgaggaaatttaggttaaagatgaggaataattgattttatgttatttagttggtaggtggtaggttaatttaagtttatttttagagtgataataatattaaataatattatttttatttatagatgatattattgtggttagagagtgggagtattttgtttaagattaaggtgtttttttttgtataatgttttatttttttttgtggggaggtttagtattagaattttttaggtttttgttttttaatttgtaaaatgggtatgttaatagtatttttattatgtggttatggtgaggatttgataaaattatttcgagaaagtggtttgtaaattgagaggagttattaggtaaatatttaagagatgggattttagtttaattttttttattttattttatagatggtgaaattgatatttggttattttatttattttatgaataatgattttaatatatgttagtttttgtgtaggggattgaggatgtagaaaaaaagtaatattttagatttggtttttaggggtttttcggttagaaggagagatagataagatgattggttattagaatacggtgtggtaggagtcgtgataagggagggataggttttgggagagtttagtagataagttttgatttagtgcgggtaggggattttttagaataagttaagttagagaaaggtatgatttgtttaaagttaaggttatttgttttttgaagttttgggggagtttaaagaaggtttttgtgtattaagagataatttttttgtggattttttaagtgtatgatatattattatttgagtgttattggtttaggttaaagaaaaggttaagttgtttttttttgtattagaggtttgaatgatttagttatatttattttagtagttaaggtatttagaggaattttatttttaaattagtttggaaggggtaggagatatagtaagaattatagagaagattggttttgagaaggaggtaggggatgtaaaagggaagttgagggttttttttaatagaaaaagaaagatttagaatttggacgtttaggcgtgtgattttagattagtgatttggtatttttgaatcgtataggtttgagtgattgggtttatattaagtagtagttttttgatgttgtaatgtttataattttgttaaagttggtttgtttatttaaaatgggttattttgaagatagaggagggagtggaatatttttaatagagagtgtcggtaaaggttttgtgttttttatatataaagaatttttagatattaattggaaaaagataaatatgtttttagaggagaaaaaaatgggaatagatttgaataggagagttagattagaaatgtgaaaaataagtttataaaagagaattaatattaataaagaaatgaaatgtttattgaagtatttagatattattttcgattttatattagggaaagtttaagggatgggtagtaataaggtgggtttagtatgtgagaatattgtgttttggtataatatcgtagagaggttaagttgttacggttttttagggtgtagtgtgattaaaagtttagaagttttaaaaataggtaaattttaaatttagtaatttttaaaaggtatttataagatatatatataaagatgttatattaaatatttattgtagtattgttttaataaaaaaaaagaagtaaatttattatggaaaagttaaataattttaagatagtttttttatgtagttatgaaaaatgtatattggaagaatataggtgatatggaaaaaagtttataatttagtggttaagtaggttattaaattagatgtggaaatttatatttatatatttagttgtgtatttttgttatttttttaaataatgaatatgtattatttttgatatttgaaaataataataaaatttttttttttaataaatatgaaattataaaaagaaataaatttttttttttgttagtatttattttttttttttggttttttttagaagatatttaaggtaagtgtgtgatgatattttttttttggtttttgttcggaaggtttttttgagggttttttgtgattgtaggttattcgaggttgttggggagatttgtatattttggtttttttttgttaattataggtttttttggttgtggttgtttgtttagaaagtagtttatttatttgtttatttaagatttttttttgaatttttagagcgtcgtagttggaatatttttattattcggaggttttttagggagtttgttttgttttgagttttttgttggtcgtcggggttgtttttttgaatgggattgggatagaatttagttagagaaatagttggagggaggagagtaggagggaggggtaggaaattgggttgatttagggcgggggcggttagttgcgtggagagggggttgcgaggggagggtgtttttattagtcggggattgggtttgtgggtggcggcgggggttcgttggggacgattcgtttttttggtagttttttgtagtcggggagtcgtgtttattgagcgtaaatagggagtatatttgagtattcggttgttgggggaagtgtaagcgtttttgttttcggtgaggggtttaagttttatattgatcgagagattggttgttttttattttgggtttttgtaacgttgttttttttatttggatgttatttttgttttaattcgtggttcgatggttttttattgtttttttaggttttaggttgaaggttattttttagggaagttttttttaattttcgggggttgttgtgttttttagggttattttattattttattgatgtagtgttgtttttgtttgttaagatgtttttttttttgtatcgagaattttttgtattaggaattttgtagggaaagaattgtattttgttttttgttttaattaggcgttaagtgtttggtttatcggttgtgtggttattattattagtggaataattaaaataatcgatagttaggtagcgtgttaggcgatgcgtatttattttttacggtaattttagataataggaattattattattttagttttattaataaggaaattggggtatagagagattaagttatttgtttaagattatatcgttagtagttgatagagttgggattttaattatgttgtttggttcggaggtttatttttggtttttagattgaagaaataatagaagtgtttatgtgggtttttgtgttaagtgtttttatggagtaagtcgtgtgaattattatttacgtcgggggggtattatttgtttattttatatatgaggatgttagggttatagagtagaagtcgttttgtttagggcgttaagtttatgttgatcgagttatggttggatttgagtttgtttgattttaaagttaagattgtttacgattgtttaaaataatatttttagaaagaaaaagaaaagggaagggtaggggaggggaagagaggggaagggaggagaagaaagaaaggaagaaaagggagggtagggaggaaggtaatggggaggaggggaaggtgaagggagagggagatggggagggagggagagaaggagagaaatttgtgttttgggttttaaagttttgggtaggtggaggattatgtttttatcgtttgattagttttagaattttatcgatttttttttattatttttaattttttaatttagtgagttttatatttagaaattatttaattttatttttttattttatagataatttgaagtttagagagattgagttttttgtttgaggttatataggtttttatagttagaagttaggtttagtttatttaattgttttttttgttttttttttttttgggtttatttagggaataaaatattatatcgaaatatttattgtatagatgagaatattgaatttagaggaggtaagggatttatttaaggttatttagaagttagtaattgtattggttcgtttttatattgttgtgaagaaatatttaagattgggtaatttataaagaaaaaaggtttaattgatttatattttcgtatagtaggggaggttttaggaaatttataattatgatggaaggtatttttttatagggtggtaggagagataatgagtgttaggtaaagggggaagttttttataaaattattagattttatgagaatttatttattattatgagaataggatggggggaaaattatttttatgtttaattattttttatttggttttttttatgattcgtgaggattatggaattttaatttaagatgagatttgggtcgggatataaagttaaattatgttattttttaggtttttttggtgaaaggagaggatatttttataacgtggtagggattttgtatattattatttaatagagattagaggtttttaaagtttagtttttatattaattttagtagttttatttagaagtttgttagaaatataaatttttgggttttattgtagattttggtaattagagattttaggaagttatttgggttttaagaagttttttaggggattttgatgtttgtttaagtttgagatttattgatataggtattttaattaggaatttattgaaatgggttttggaataagttattttgttaatgtatagaatagtggttaagaatagaggttttgatagtagacggatttggtttgaatttttgtcgttgttattgtaagttgtgtgatttgggtaaggttttttatttttggagttttagtttttttatttgttgtggatagtggaagaggaagaggaggaagagggaaagggaggagggagaggaaaagaggaggagggaaaaaggagaggaggaggagggaaagaggagaggaggaggaggaaaaaggaggggttaagtagaggagaggggagggggaggaggaggagggaaagggaggagggatatgaaaagaggaggagggaagaggagcggaggaggagggaagagaaagaaaggggaggaggagagggtgggggaggaggagacgaggaggagggagtaaggaggaggagggaaagggaggaaggagatgaaaagaggaggaggaaggaggaagagaggaggaggagggaagaggaggggttaaggggaggagaggggagagggaggaggagaagagggggagggggtaaggaggaggagggaaagggaggagggagatgaaaagaggaaaaagagggaagaggagaggaggagggaagaggaagaaaggggaggagggggttagaaggaggaagggggaaagagaagaaggggaggaaagggagataaaggagaggggaggagaagaaggagtgggggagaggagggagagtgggagagaagagaaggaggttagaaggtagttttcgaggaagattaagtatacgggtattatggaagaggagttgggtaaatttagttcggggatggatttttggatatgtttttttttttttggaggtggttgtggttgtggtatgtttttttttgtttttggttttttagttaaatttaagttcgggttttattagttaggagttataattggtagagtaaggatattggttttttagttagttgggtttttgggtggttggtagaggaggtgggaatttatagttttattgggttagtgaggaaggcgtggggttgtttggtttatgattttttatttggtggttgtgggataatttgaagttacgggtttttggttattttttttgaatagggttgaatagtttggttttttttttttggagtaaaaagtgtttgttgttgtttgtgggggtttttatgtttttgttttaaagaggattttgaaatttaagggttgatttggggatattgggatttgagagagaagtagttttttttaggatttttagaggaatttttgtgtatatttttggtagttttatatagaattaggatggagggttaagtttttttttgaggtttagttcgggttgattggtttttgatttttggagttttgtgttaaagggaatttgaggttatattttggtttggttgtaaggaatttagtgattcgtgagtaatgtttgttttggatttggagtgggaggagggttgttttttttattttatgttgttttttaattaaattttgttttattggcgtagggtggattggtttagtagggattggttttatttttattatttttttttttggtattggttgtgtttagtgtaatggagtttatattttatttttaagttattgggtagtttttttcggtagatttttagtgtttatagatttttaatattttatttaaagttgaacggtttttttagtttttttgattattagtggttaaattaggtttagtagagaggtttttaattaaaggaggtttttaaagatgtattttgttatatgaaggattttttttaagtttaaattttgtttattttggattttttttaaggtatagataggttatatgggaatgagagtttttttattttagttaaagatgggttgtgtgattttgggggatttatatattttttttggtttatttagtgtttaatagatgtttattggattttatttttgtggtaggtataggttggtgaataagatagttatgttttatgtttaggaagttggtttgttggagaatttattttatttatttatttatttttttaaaaaatttttttgagattgagttttttttaatttgttgtttaggttggagtgtagtagtaagatttgggtttattgtaagtttagttttttgggtttaagtgatttttttattttagttttttaagtagttgggattataggtacgtattattatatttggtaagttttgtatttttagtagagatggggtttcgttatgtatggttaggttggtttcgaatttttgattttaagtgatttttttattttggttttttaaagtattgggatataggcgtgagttatcgcgtttagtgaaattttttattttaaatgagatatgatgttttttaagaattttttaattattaggaaagatttttaggtaggttaggtatggtgttttacgtttataattttagtattttgggaggttaaggtaggataattgtttgaggttaggagtttaagattagtttggttaatatcgtgaaattttatttttgttaaaaaagataatagcgaacgatggtagtatatgtttagtaattttagttttttagggaggttgaggtaggagaattgttt

SEQ ID NO: 1933 - DNA, 6389 bp, Artificial Sequence
  chemically treated genomic DNA (Homo sapiens)
ttttaggttttgttttaggatttttttttttatatgtttggatttttgtttgtttttgttttttttttttttttttttatttttttttttattttttaggttatgggtttttaggggaatttgtttgttgaggtggagtaggttataaggcgttaggtgtagggtatgtagagtttttagtagagaaatcgagagcgtgttttggtttagttttttggtatggtttgcgacgttaggttttaggtttattttaattatcggatttttgtttagggttatcgtagggtttgattttttttgttagtttttttttttaaagaaattttttaattaaaattattttttattataatttttgttttttttttattttttagaaattttgggaggtaggatttaataatttttttgtgatatttataaatattttgtttatatttgaatttttttgttgttttttaatttttattgggattttgtaaatttttaagttatttttatttaaattttttgtgaaatttgtaatatggggaagtaggaatgtggaaaatattttgattttagtgtttggtcgatgtgggttttttttttgattttgttatttgttggttgtgaaattaggataagttatttaatttggtagtttcgatgtttttttttgtgaaattgggatgataataatgtttattttgtgagggttgttttaatgattaggaattattttgtaaagtttagtatagttttttgtatgttgtagtagtgatttagtaagtagtaattttgtgatattattattattatttgtttattggttaaaatttatatagttgtttttttacgtttattattggttttttaattttatttgtttattttgtgattttagttattttttgaaaaattggtttttttttttttttagagattttttgatttttaaaaagaggagatgattatatttagttttttttttataattttaggtagataattgtattttgtagtttttttttgttttttttttgttgatttttgtttttattagatttttttttttttttatttttttaaagatttattagatgtttattgttttttaagatttaaaatgatattgtgtttttttatatgtatgttttttttttttatatttttgatattttatttttttattgtaataataaaaaaagtattaataaaataattattggtaaataaattggtgagttgaagtagtttttttttgttttattattttttatttttagttattttgttttttttttttttgagatggagttttgtttttgttgtttaggttggaatataatggcgtgattttagtttattgtaatttttgttttttaggtttaagcgatttttttgttttagttttttaagttgttggaattatgggtgtgtgttattacgtttggttattttttgtatttttagtagagatggggtttcgttatgttggttaggttggttttaaatttttgattttaagtgatttatttgttttggttttttaaagtgttgagattagaggtgtgagttattgtgtttggtttttagttatttttttgttttttgtttatatattttttaaatagtttaaatggttattttttgaaattttttggagaaataagaataagtagtattttattatttttttaaagtgagaaatatggttttttatttgggaatttgaggattatagatcgtaattgtagagaaaagttggagtgtaggagtaagtgttttttgtttttttattttgtattttttttatagtatttattgttattggttttttgagataaggttttgttgtgttgtttaggttggagttttagtttacggtagttttgattttttggatttaaatgatttttttattttagttttttgagtagttgggattacgggcgagtgttattatgttttgttaattttaaaattttttgtagagatggggttttatttgtttaggttggtttgaaatttttgggtttaagtaatttttcgggttcggtttttttaagggttgggttataggtttgagttattgtattttgattatttatcgatatttgatattatatttgtgtttatgtgtttttttttttgtaatgtaaatattgtgagaatagggttgtttatcgttgtgtttttagattttaggataatatgtggtataagggaggtagttgataaatatttttgaataaattaaatgatatttgggaaaatattttttatgatattatttttgaattagttattttatttgttattgaagataagtttattttattaagaatttgaattaataaggtaatttgtagtgtatttattaattagattttttgagtagggaggtagaatataatagagaatgagagatgtttgtattttggttgtaattttattagtcgtattgtttgagatatgttgttttgtttcgtttttgttaataagatgagaataacggtatttattttttagtattaaatgattaagtatgttaatagggagagggttaaacgtttgttgttttattatatagtaggatattaggttttatttttgtggttttttattttaaagacggggatagtaaatgttttatttaggaaaaaaatttaggttgaataatggggttgttggggcggggttaagaatattttgttcgaattaatagtattaatgggtcgggcgcggtggtttacgtttgtaattttagtattttgggaggtcgaagtgggtggattatttgaggttatatatgggtgaagtttcgtttttattaaaaaaataaaaatttgttgggcgtggtggcgggcgtttgtaattttagttattcgggaggttgaggtaggagaatcgtttgaattcgggaagtagcggttgtagtgagtcgagattaggatattgtattttcgtttgggcgatagggcgagattttgttttaaaataaaaataaaaatagtattaatggaatgtagtataatttttaagttttattattaatatttggggtcgaatttagatttcgttttttcgttcggatttagaatatttttttgatttattggttttagggtattagttatttcggatagtatttttttgggaaaatatcgtttattagttttacgattgggaaagagtcgggaaatattttcgagtaatttagttttttgagattttttttttttttttttttagttagggtttgtcggtttttagtgcgtgtttagtagtttttaggttatttttattatcgggttaaggatttcgtgggaattcgtagttttcgttatattcgtttttcgcgtatttacggaggggtgtttatagagaagatttgcgtggtaaaaatttaaacgaagagatgaggggtatggagaggagtaggataagagaataaagataatagtggggggtagacgttagttttttttatattttttgttattggcggtagtagtgaagttagaaacggttttaaaataaattttagataggtattttttaaaggtaagtttggagcgtacggatttgtataatcgcggaaggttttgttttcggttttttgcgtttgcgtttttgtagttaagaaggcgggaggttggagtagagggaagtttgtaatcggaagtgaaggtagatttttttttttcgtcgttgttgttgtcgttatacgcgttttttttgtttaggtaagttttggttttcgttataattcgtttttatttgcgttttttcgtatttatttcgttatatgggtttttgatattttttttataggcgatggtttggtcgttggggtttagttggttcgttatttttttagtttgtatttttttcgagagtaaagagtttttgggggaaggaagggaagttaaggggggatttaatttaagatggtgttttcggcgttattgtgttcgttttgttttttttttttaatgggttttttttatattggaggttttagtattaatgagaggcggtgttcggcgttttttggttttggtatttgcggagggcggggttttttttattttttttgtttttttttgagttttttttcggttttcggtgggattgggaggaggagttggtttttgggtttagttggattttttttattttgatttgtttaatttaatttggagtgttttttaagtgtttacgatacgattggtgttattgtatgtttttttaaaaggagttttattttcgtagcgtaatagtgatgtgagattatttggtaaagattttgttaaagtttgggcggggattgtttttttttgttatttattagtttttttattgtagggtggagatatgaattttgtttttttgtggtcgagttatttgttttgtatcgttttttttttttatgttaattatataaggtttgtttaaatagcggaagggaggatattgagaagtgggaggttgagagttatgggaggtggacggcggttatatgatgtttttttttcgaaaggtgagcgttttgcgtagtgatgatttttatttattatttttgattgatggttgttgagttaggtatttataacggtgggattataatagggaaagcggagtttttttttgaggattttttaggattttatttgttatttttattttttattttattaagttattagttatattttattttttattatttattttatttttttattgttatttttagattaagaatttataagttggttttttttttttaatttttttggttttcgttattgtgattgttaattttgttgggaatttttgttttaattattttttttggtattgttttttttgttttgttatatttgtttttcgtttttatgttttgtatttgtttttttttttaggtaaaagttttttggtttagggaaagtgggaattggggatggaaaagaggtcgtgattaagttttgtttttttttttttttttttagtttttttgttagaaatagtatttttgtttttttttgttgttttttaattttttattttttattttttgtttttatttattttgcgagaatttatttagatttttttttttttttttttttgtcggtttagttatggtagagaacgatgtggataatgagtttttggattatgaagatgatgaggtggagatagtagttgggggagatggggttgaggtttttgttaagaaggatgttaagggtttttatgtttttatttatagttttggttttcgtgattttttgtttaagttagagttgtttcgggttattgtcgattgtggttttgagtattcgttagaaggtaaatttttttttgggtatgtagtgtttattgggttttttaagggtataatataaagatgtgtttgtcgttgtttaggtggtggtaagggtttatatttaaggttagattagggttaggtgtagtggtttacgtttgtaattttagtattttgggaggttgaggtaggagggtggttatttgagtttaaaagtgtaagagaagtttgggtaatatagcgagatttttgtttttataaaacgtttagaaattaagtaggtgaaggttgaggttttagtgagtcgtgattgtattattgtgtattagtcggggcgatagtgaggaagaaaaaattgggataagtattaaaaataattttggatagaggaggtttatataggtttattttttttttcgtgatagtattaaagtgttaatgatttaaaagtgatttttaggtttgttatttatttttgtgattggttttttttgtttgtttatttttaattttgttatttgatttttaattttaaatttttagaaaggttttgtttggatttgtagtttttttttgttgggttaggttaattgtggtttttggaaatttttatgattggtttagagatgattggtttttgggttaggtattaagttttttattttgtttagggttgtagtagttacgtgattcgaagtatagtaatttaagtaggagaagtggtttgtggtaggtatttaaatgttatgaattgttatagattaagaaaaataaggatagagttaggattattgaaggtgagcggttggtagatgtaaggggtttgttattaggattgggaaggtttagatttggaggaggttaaagttaggaggaattaggagagtttgattttgaggtgaatgtaattgagtagagagaggtaaaatgggtttggaagttggtaagaattaggtaaatattagattttgagaattgagtggtaagaaatgggtttggtatggtgaaaaaggtagagttatttggagattgaagtttaatttatttttttttttttttaatttttagt

SEQ ID NO: 1934 - DNA, 6389 bp, Artificial Sequence
  chemically treated genomic DNA (Homo sapiens)
attaaaagttggggggggaggaagataaattagattttagtttttagataattttattttttttattatgttaagtttattttttattatttaatttttaaagtttagtatttatttggtttttgttaatttttagatttattttatttttttttgtttaattatatttattttaaaattagatttttttaattttttttagttttagttttttttagatttaggtttttttagttttagtaataaattttttgtatttattaatcgtttatttttaatgattttagttttgtttttattttttttaatttgtaataatttatgatatttgaatatttgttatagattattttttttgtttaggttgttatatttcgggttacgtaattattataattttggataaaatgaaggatttggtatttgatttagaagttagttatttttaaattagttatagaggtttttagagattatagttggtttggtttaatagagggagattataggtttaagtaggatttttttggaaatttaaaattagaagttaagtgataaaattaaaaataagtagataagaaaagttagttataagaatgaatggtagatttggaagttatttttggattattagtattttggtgttattacgaaagaaagaataagtttgtataagttttttttatttaaaattgtttttgatatttattttaatttttttttttttattgtcgtttcggttggtgtatagtggtgtaattacggtttattgaagttttaatttttatttgtttaatttttgaacgttttgtagagataggagtttcgttatgttgtttaggttttttttgtatttttgagtttaagtggttatttttttgttttagttttttaaagtgttgggattataggcgtgagttattgtatttggttttgatttagttttaagtataaatttttattattatttgagtaacgataaatatatttttgtattgtatttttaaagagtttaatgagtattatatgtttaagagaaaatttattttttgacggatgtttaaagttatagtcgataatggttcggagtaattttggtttgagtaggaagttacgaaagttagagttgtggatggagatataggagtttttgatattttttttggtaggggttttagttttattttttttagttgttgtttttattttattatttttatagtttaagagtttattgtttatatcgttttttgttataattgggtcggtaggggaagaagggaagggggatttggatgggttttcgtaaaataggtgaaaataaggggtgaagagtaggggattgaggaatagtaaaggaaaataaagatattatttttaatagaagagttggaggggggaaaaaaaaagtaagatttaattacgattttttttttatttttagtttttattttttttaaattaggaaatttttatttggaaagaaaaatagatataaaatataaaaacgaaaagtaaatataatagaatagaaaaagtagtattagggaaagtggttaggatagaggtttttaataagattagtaattatagtagcggaaattagaaaagttggaaggggaagattaatttataaatttttgatttgaaagtaatagtgaggaaatagaatagataataaaaggtaaaatatgattaataatttagtaaagtggaaaatggagatgataagtagagttttgaaaagtttttaaaggaagatttcgttttttttattataattttatcgttatggatgtttaatttagtagttattagttaagggtgatagatgagggttattattgcgtaaagcgtttatttttcgaaaagaaaatattatatggtcgtcgtttattttttatagtttttagttttttattttttagtattttttttttcgttgtttaagtaagttttgtgtaattagtatgggggggaggggcggtgtaagataaatggttcggttataaaaaaataaaatttatgtttttattttataataagaaagttaataggtgatagagaaaggtaattttcgtttaggttttaataggatttttattaagtggttttatattattgttacgttacgaaggtgagattttttttggagaaatatataatgatattaatcgtatcgtaaatatttggaaggtattttaaattaagttgggtaagttaaggtgagaaaaatttaattgggtttagaaattagtttttttttttagttttatcgagggtcgaaaaagagtttaagaaagaataaggaaggtgagaagagtttcgtttttcgtaaatattaagattaagggacgtcgagtatcgttttttattgatgttgaggtttttaatatgagaagaatttattggaagaagggagtaaaacgaatataatggcgtcgaggatattattttggattgggtttttttttagtttttttttttttttttaggagttttttgttttcgaaagggatgtaagttaaggaaatagcgaattaattaggttttagcgattagattatcgtttgtgaaaagggtattaggaatttatgtgacgggatgggtgcggagaagcgtagatggaaacggattgtagcgaaggttaaagtttatttaaatagggagagcgcgtatggcggtagtaatagcgacgaaggagggaaatttgtttttattttcggttgtaggtttttttttattttagtttttcgtttttttggttgtaagagcgtaggcgtaagggatcggaaatagggtttttcgcggttatatagattcgtgcgttttaggtttgtttttggaaaatgtttgtttgaaatttgttttaaaatcgtttttaattttattgttatcgttagtaataaaagatataaaggaaattaacgtttgttttttattgttatttttatttttttattttatttttttttatgttttttattttttcgtttaggtttttgttacgtaggttttttttgtaggtattttttcgtggatgcgcgaggaacgagtgtggcgaaggttgcgagtttttacggggtttttggttcggtagtgaaggtgatttgaggattgttgggtacgtattaggaatcggtaggttttagttgaggggagggaggagggaagttttagggaattggattgttcgggggtgtttttcgatttttttttagtcgtggggttggtgggcggtatttttttaaaaggatgttgttcgaggtagttgatgttttagggttagtgagttaggaaggtgttttgaattcgagcgggaagacggggtttggattcggttttaagtgttaatagtagggtttgagggttatattatattttattaatattgtttttgtttttgttttgagatagagtttcgttttgtcgtttaggcgggagtgtaatgttttgatttcggtttattgtaatcgttgtttttcgggtttaagcgatttttttgttttagtttttcgagtagttaggattataggcgttcgttattacgtttagtaaatttttgtttttttagtagagacggggttttatttatgtatgattttaggtgatttatttatttcggttttttagagtgttgggattataggcgtgagttatcgcgttcggtttattaatattgttaattcgagtagaatgtttttggtttcgttttaatagttttattgtttaatttggattttttttttgaatgaaatatttgttattttcgtttttgagatggggagttataaaagtaagatttgatgttttgttgtgtaataaaataataaacgtttggttttttttttgttagtatatttaattatttaatattaaggagtaggtatcgttatttttattttattgatagaagcgaagtaaagtaatatattttaagtagtacggttggtgaggttatagttaggatgtaaatattttttattttttattgtattttgtttttttgtttaaagaatttggttagtaaatatattgtaggttattttattggtttaaatttttggtgaagtaagtttgtttttagtgataaatgaagtaattaatttaagaatggtgttatagaaggtatttttttaagtattatttaatttatttaaaagtatttattaattgttttttttgtgttatatgttgttttaggatttggggatataacggtgaatagttttgtttttatagtgtttatattataggaaagaaaatatataaatataaatataatgttaagtatcgataagtggttagggtgtagtggtttaggtttgtaatttaatttttgaggaagtcgagttcgaaggattgtttgagtttaggagttttagattagtttgggtaagtgagattttatttttataaaaaattttaaaattagtaaggtatagtggtattcgttcgtaattttagttatttaggaggttgaagtgggaggattatttgagtttagggggttaaggttgtcgtgagttggaattttagtttgggtaatatagtaggattttgttttaaaaaattagtagtagtaagtgttatgaagaaaatgtaaggtaaaggggtaaagagtatttgtttttatattttagtttttttttatagttgcgatttatagtttttagatttttaaatgaggaattatgttttttattttagagaaataataaagtattatttgtttttgtttttttaagaagttttaaaggatagttatttgggttgtttagggaatatgtaaataaaaaataagaaagtgattgaaggttaggtatagtggtttatatttttaattttagtattttgggaggttaaggtaggtggattatttgaggttaggagtttgagattagtttgattaatatggcgaaattttatttttattaaaaatataaaaaatagttaggcgtggtggtatatatttataattttagtaatttgggaggttgaggtaggagaatcgtttgaatttgggaggtagaggttgtaatgagttgagattacgttattgtattttagtttgggtaataagagtaaaattttattttaaaaaaaaaaaaaataaagtgattgaaaatgagaaatgatgaggtaaaaggaggttgttttaatttattaatttatttgttaataattattttattgatattttttttattgttataatgggaaagtaaggtgttaaggatatagaaaggaagggtatgtatatgagggaatatagtattattttagattttagaaagtaatgagtatttgataagtttttggggaaataggaaaggaggaaaatttaataaagataaagattagtaaaagaaaaataaagagaggttataaaatgtagttatttatttggaattataagagaggggttaaatgtagttattttttttttttggagattagaaggtttttgggaaaagagaagaattaattttttagaaaataattagggttatagaatgaataagtggaattagagagttagtgatggacgtgaggaaatagttgtgtaggttttgattagtgagtaggtggtggtaatagtattatagggttgttatttattgaattattgttataatatgtaaggaattgtgttagattttatagaatgatttttaattattgaagtaatttttataaggtaggtattattattattttagttttatagaggaggatatcgaggttattaagttaagtagtttgttttggttttatagttagtaagtgatagggttaagagagggatttatatcggttagatattgaagttaggatgttttttatatttttatttttttatattataaattttatagagggtttaggtgagaatgatttggaagtttataaagttttagtgagggttaaagaataataaggagatttagatgtgagtaggatatttataagtgttataggaaaattattggattttgttttttaggatttttaggggatggaaagaagatagggattatggtgggaggtgattttgattggaggatttttttgagggagggaattggtagaaggagttaggttttacggtggttttaggtagaaattcggtagttggggtggatttggggtttgacgtcgtagattatgttaagaagttgggttaggatacgttttcggtttttttgttgggagttttgtatgttttgtatttggcgttttgtagtttgttttattttagtagataggtttttttgggagtttatggtttggggggtagggagaggggtggaagagagaaagggaaaagtaaaaatagataagggtttaggtatatgaggggaaagattttgaaataaagtttagaa

SEQ ID NO: 1935 - DNA, 6311 bp, Artificial Sequence
  chemically treated genomic DNA (Homo sapiens)
  unsure 4424..4425, 4434: n is a or g or c or t
ttagtagaggcggggtgttatcgtgttagttaggatggtttttatttttcgattttatgagtcgttcgtttcggttttttaaagtgttgggattataggcgtgagttatcgtattcggttcgggttttttttgagtatttgtttttaatttattgggagtatatatacgttggagtggaattgttgggttatatgaataatatatattttgttttgagaaaagtaggtgttggatttttgaataatgtatttataaagttgtttgcgtttttttgtttttgtttttgttttttttttttataaaggaaagggtatgaattttagaaaattgaggggaagtagttgggggttagtataataggttatataaatgtagtaatttaatttagtgtttgtagtttatatgtatcgtgttataagatttttttttttttttttttaagaaataggttttttgttgtttaggtttaagtgtagtggtggggattatagtttaatgaagtttcgaatttttagatttaagttatttttttattttagttttttaagaaagagtagttaggtttataggtattagttattgagttgagttttttttgtttttgtttttttaattttttatttgtagagatgggtcgttgttatgttgtttagtttggtttgtaattgttagttttacgggagttttttattttgattttttaaaaagttaagattataggtatgagttattatgtttaatttatgttgtagaatttttgtaacgttttgaaaaattgggaagtttaggtattattattatttttattttatgggaagaaaattaaggtagagttatttgaagtaattttttaaagatataaaagaaggatgagattttaagatttttggtcgtttgtttttgtttttttttttttttttttttttttgagatggcgtattgttttgtcgtgtaggttggagtgtattggcgagatttcggtttattgtaatttttatattttgggtttaagcgatttttttgttttagtttttcgagtagttgggattataggtacgtattattacggtacggttaatttttgtatttttagtggggacggggttttattatgttggttaggttggtttggaatttttgatttaagtgatttgttcgttttggttttttaaagtgttgggattataggtgtgagttattgcgtttggtcgtttgttttagttttgttatttaataaggtagttatgaaggtagtgtaagaaatttaggaattggaagaagattacgaagttttaggaaaagcgaaatggggggcggagagagggagggtaaagaaaataaagttgggaagatagttcgtttttagttttatggttttttatgattaagataatgttaatgtaatttaatatattatttttttttttttttttttttttttgagatagagtttttcgttgtgttttttaggttggagtgtagtggtgcgatgtcggttaattgtaattttcgttttttgggtttaagcgatttttttgtttttgtttttcgagtagttggtataggcgtttatttttacgttcgggtaatttttttgtatttttagtagagacgggggttttattacgttggttaggttggttttgaatttttgattttgtgattcgttcgtttcggttttttaaagtgttgggattataggcgtgagttatcgttttcggtttattattattttattttatttatgtattatttatttatgtttttgagatttgagtttcgtttttgttatttaggttggagtgtaatggcgtaatttcggtttacggtaatttttataggagaagcgatttttttgttttagtttttcgagtagttgggattataggtatgcgtcgttacgttcggttaattttgtatttttagtagagacggggtttttttatgttggttaggttggtttcgaattttcgattttaggtgattcgttcgtttcggttttttagagtgttgagattataggtgttagttatcgcgttcggtttattatttatttttatagataattttttttaagggatttcgtagataatattttggggaatcgtagagtatagttggggaaaatatagtaatattatttaagtttttttattgaggattttagagtcgaatggtttttatggatgttatagagattaatacggattgagggtttaaagaagatggtgttcgtcgtaggatcgttttattttttcgggtgaattttatggtagagtataggtattcgatttagagaagtgaagtcgagatgggtgggaattcgattatattagcgcgttagaagagtggggcggaaagatatttttcgcgtatgtgtggaattggggggattgattttaagataaggcgtttattttatagagtaagttttttgaaacgtgtgagtcgtttaagtttagttaaagtcgaggtggggcgtattttgagacgtatgcgttttagacgagataagtgatttagcggcgtggtttttttaacgtttggcgtattgacggcgtttgaggtggaaggggttgtttaggatttcgaatacgtatgcgttttgagatttaggcgttttttttagagggtgtggagtgtagggttttttattgcgtaggcgtaaggattgttcggtaggacgagcggtttattaaggggagggaagatgaggttgaagagattaaaaaatcgggtgcgtttgcgcgttgtagattagttgaaaacgtttagggtttgtgaggggcggggttacgtatgcgcgttattggacgggtcggtgggagggagggtggagatgggtagggtgtgtgcgtttgcgtagtgcgggggtggagggcggaggagatagatagtacgtttgcgcggttgttatagggttgtttggttggttagtggggagtcggcgtttgcgtattaagattcgtgtgtagtagcggcggcggcggtagaggcggcggcggcggcggtagcgggttcggaggtagcggttgggttcgcggcgagcggacggggtcgagttagtgcgttcgcgcgaggtgagagcgggtagggcgcgtgtgcgcggtattttggtttgggttcgggagaagatggaattgcgcgggggtcggggagggggtagaggggagcggcggtcgtcgtcgtacgggttcggttagagagcggcgcgaggtgaggagaggcgcgggcgcgcgtttcggttggcgcgcggggtgacggttggggttggttcggtgacgttggagcgacgtagggcgggggacggcgagtcgcgaggtagttacgcggtgagaggtcgttaggcggttacgtcggggcgagggttaggggttagatcggtttatcggggtaagggtatttgggtcgttgaggattcggtttagcgcggttacgtgaggtggggggagggggttattttcggaggaggcgggcgtggtttcggtttggcgtagtttttgaggagggggcggtcgcggtatcggaagtgttttttacgggaggttgttttcggggtcgtaggtcgtatggttaagcgtggatcggggtcgtatggtagcgcggggatttttttttttaggtttcggttatcggaagttcggaacggttatatggtcggtaggagtcggtagtttttagcgcggggagttagttttcgcgggggtttcgagggggtttgagattttgaggagtggaagtcggaggttcgggttttaattatttcggagggtttgttgtaggtatatgttagcgttttttaattttaagggttttaggagtttttttgaaaaatttttttgtgaagtgtggcggttagttaggtgtaagtggtattttttcgagttgggaggtcggagaaatggggaaatagggcgtttggataggagtttaatttttttgtcggtttgggtggatagcgtttaaaagttttaggtagatgagttttttatcgtgataggcgttttttattttgttattgtttttttgttgtaattggtttgggagttttacggtttcgaagtttttaattttattagtttagtatgattttttattatttattattattaattttttgtttttattttattgttatttattattttttattttttttattttttattgattgtattggttcggtttgaaaagtcgataggatagatgtattttgggaaaagtgggagggttttttaggagaggttgggtttttgggttttttttgggaattaagatcgaggtgtttggtagggggattatttcggaaataattttgtttttttttttttggtttgttgtaagtgtatgttggcgaggcgggaattttttaaagaggttttgtggttttttgtagtagtgattggtttgtgtgtggatgggnnggggggtantgtaatagatgggtggggttttgtttttcggtttttattttttttttttttaattagttttgtttttttgttggattatagttgtttatttaattatagttttggttatatgtggggaagaggggtggttggttttagtggtaagtaatatttgagttttttttatttttaggaagtaggtttttttttatttttgagatttgatattttagttttttagagttttttttttttaagttattattttagttttgatttatgggggagaaattagttattttatttttttatatatatattagtttttgagtatatttgagtttagttagtattttaagtttaggaattttgattttattttaggtgggtaatggaataaagagttgggaaaatgtttttggagagaaatgggatagattggaggttttgttgatttttatgtttatttattttagttttttttttggttttagttggaatcgaagttttttaaaatggtagatgatttggatttcgagataggagatgtaggggttttagttatttttttaatgtagtgtttagtattacgtaagaatggttttgtggtgtttaaaggtcggttatgtaagatcgtcgagatgtttatttcgaagattggtaagtacggttacgttaaggttagaattttattttcgtattttgttttttttatgtttttagtatttttggcgtttttagtagtaagttgttaatagtgttgatttttttttaattttgtttttattgtttgattgtttttgtttagcgtttagtttttatatttatttagataattatatttgttttttagtttttagttttttttgtggttatttttttgttttcgtattattttttggtagttttttcgtttttttagttttgtgttaatttttttaatttataggtttttatgttttagttatttagttgttttttttttatttttggtttttattttttttttttttttttgagtcgttgttaagtggttgtttttattacgttgtttagggtttttttaattttacgtttttttttggagggatttttgcgttaattttgagtttttaggttattttgttgtttcgttttttagttttagttttttttttggaattttgacgtaggattaaattgtttttatttgttttattttattttttttgggttttttgagtttttatgtttttatgggttttaatatttttgttagtattttttttattattttagattttttttgtttttttagaattttaatttgattcgtttttgttgaattttttgtggtgtttttttttaattagtttttttattttttgatttgatattgattttggattattttttagtgtttggatttttttttgtgtttttttggtttttttattttttagttatatagttatttttgatttttttgtaagtttttttttttagtttttttatattttttagttttttatttttttttttttattttttttattttttagttttttagtttttttttttggtgttcggaaaatttttcgaaatttttatttagattttttttatttttttagatttttagtattttattttttattaaggtaattgttttttttaagtttgttatgtagttttttattgtgttgttaattttaattttaacggtggttttttagtttttgttttttttttttaagaggttttattgttttttgagttgattggtttaattttaatattttagtttttgttttaataatgtaattttgattttttttattaggtaaggttaatttgagtttttatttttttcgttttagagtttggttgggtttttttttgtgatgtatatatatagg

SEQ ID NO: 1936 - DNA, 6311 bp, Artificial Sequence
  chemically treated genomic DNA (Homo sapiens)
  unsure 1878, 1887..1888: n is a or g or c or t
tttgtatgtatgtattataaagagaaatttaattaaattttaaaacggaggaaataaaggtttaaattgattttgtttgatgagggaagttagaattatattgttggggtaaagattggagtgttggaattgaattagttaatttaagaaatagtaaagttttttaaagaaaaaaaatagaggttaaaaaattatcgttgagattggggttgatagtataatagaaaattgtatggtaggtttggagaagatagttattttgataaaagataagatgttaagagtttaggggagtgggaggagtttgagtaaaagtttcgaagagtttttcggatattaggagaaggagttgagaaattggggaataaggaaggtagaagggaaaggataagaaattaagaaatgtgaaagagttgaagaaaaggatttgtagggagattagaaataattatgtagttagaaaataaggaagttagaagagtatagagagggatttagatattagagaataatttaagattaatgttaagttaaaagatggaaaaattgattaaggaaaaatattataagaaatttaataagaacgaattaggttgaaattttaaagagataggaaaagtttgaggtgatgagggaagtgttagtaagaatgttaaaatttatgaaagtatggaggtttaaggaatttaaggagagtgggatggggtaggtaggggtagtttgattttgcgttagagttttaaagggaaagttagaattggggaacgaagtagtaaggtgatttgaaagtttagaattgacgtaggagtttttttaggggaaggcgtagaattggagaaattttgggtaacgtgatggaagtaattatttaataacggtttaagggaagaaagaaaaagtgaaaattaagaataaggaaggagtaattgaatagttagagtataaaggtttatgaattgaagagattggtataaagttggagaaacggagggattgttagagaatgatgcggggatagaagggtaattatagaagaggttgaagattggggagtaggtgtagttgtttgaatgggtatgaaggttgagcgttaaataaaaataattagatagtaaaagtagagttaaaggaaagttagtattgttggtagtttgttgttgggagcgttaaagatattggaggtatggggaaggtaagatgcggaggtgaaattttaattttggcgtggtcgtgtttgttagttttcgaagtagatatttcgacgattttatatggtcggtttttgagtattataaagttatttttacgtaatgttgagtattgtattgggaaggtggttgaggtttttgtattttttgtttcgaagtttaagttatttgttattttaagaggtttcgattttaattagagttaagaagagaattgaagtgaataagtatggaggttaataggatttttaatttattttatttttttttagaaatatttttttaattttttattttattatttatttaaaataaagttaaagtttttgaatttaaaatattgattgggtttaaatatatttaagaattggtgtgtgtatgggagggtggaatagttggttttttttttataaattaaagttaaagtggtggtttgggaaaggaaggttttagggagttggaatgttaaattttagagatgagaaaaggtttattttttgggagtggggaggatttaggtgttatttgttattgaaattaattattttttttttttatatatagttagggttataattaggtgagtagttatgatttagtaaaagggtagggttaattggggggggggagggtggagatcggaggataaggttttatttatttgttatantgttttttnntttatttatatataaattagttattgttataggaaattataaggtttttttgggggattttcgtttcgttaatatgtatttgtaataagttaagggggagaaagtaaagttgttttcgaaatgatttttttgttaaatatttcgattttggtttttaaagagaatttaggaatttagttttttttggaaggtttttttattttttttaggatgtatttgttttgtcggttttttaggtcgggttagtatagttagtagaaagtgggagaggtggggggtggtgaatgataataaaatgaaagtaaaaggttggtagtagtgagtagtagaaaattatattaggttagtagagttaaggatttcgaaatcgtggaatttttaaattagttataataggaagatagtgataaggtgaagaacgtttattacggtgggaaatttatttgtttgaggtttttaggcgttgtttatttaggtcgatagaaaagttgggtttttgtttaaacgttttgtttttttattttttcggttttttagttcgaaggggtgttatttatatttggttgatcgttatattttataggagggttttttaggaaagtttttggggtttttgaggttgggaagcgttaatatatgtttgtagtaggtttttcggggtgattaggattcgagttttcggtttttattttttaaaattttaggttttttcggaattttcgcgaggattagtttttcgcgttaggggttgtcggtttttgtcgattatgtggtcgtttcgggttttcggtggtcgggatttggggggaggggttttcgcgttgttatgcggtttcggtttacgtttggttatgcggtttgcgatttcgagggtagtttttcgtggggggtattttcggtgtcgcggtcgttttttttttagagattgcgttaggtcggagttacgttcgtttttttcgggaatagttttttttttttattttacgtggtcgcgttgagtcgggtttttaacggtttaggtatttttgtttcggtgggtcgatttggtttttggttttcgtttcggcgtggtcgtttggcggttttttatcgcgtggttgtttcgcggttcgtcgtttttcgttttgcgtcgttttaacgttatcgggttaattttaatcgttatttcgcgcgttaatcggggcgcgcgttcgcgtttttttttatttcgcgtcgttttttggtcgaattcgtgcggcggcggtcgtcgtttttttttgtttttttttcgattttcgcgtagttttattttttttcgggtttaagttaaggtatcgcgtatacgcgttttgttcgtttttatttcgcgcgaacgtattgattcgatttcgttcgttcgtcgcgagtttaatcgttgttttcgagttcgttgtcgtcgtcgtcgtcgtttttatcgtcgtcgtcgttgttgtatacgggttttagtacgtaggcgtcgattttttattgattaattaagtagttttatgatagtcgcgtaagcgtgttatttatttttttcgttttttattttcgtattgcgtaagcgtatatattttatttatttttatttttttttttatcgattcgtttaatgacgcgtatacgtgatttcgttttttataaattttgagcgtttttaattaatttgtaacgcgtaggcgtattcggttttttaatttttttaattttattttttttttttttgatagatcgttcgttttatcgggtagtttttgcgtttgcgtaataaggagttttgtattttatattttttaaaggaaacgtttgggttttagaacgtatgcgtgttcggaattttaaataattttttttattttagacgtcgttagtacgttaggcgttgaaaagattacgtcgttagattatttgtttcgtttagaacgtatgcgttttaggatacgttttatttcggttttaattggatttaaacgatttatacgttttagaaaatttgttttgtggggtgggcgttttgttttggaattagtttttttagttttatatatgcgcgggagatgttttttcgttttatttttttagcgcgttagtgtggtcgggtttttatttatttcggttttatttttttaaatcgaatgtttatgttttgttatagagtttattcgagaagatagagcggttttgcggcggatattattttttttaaatttttagttcgtattggtttttatggtatttatagaggttattcggttttgaggtttttagtaaagaaatttagatggtattattgtgttttttttaattgtgttttgcggttttttaaagtattgtttacgaggttttttagaaaaaattgtttataaaaatgagtggtgggtcgggcgcggtggttgatatttgtaattttagtattttgggaggtcgaggcgggcggattatttgaggtcgggagttcgagattagtttgattaatatggagaaatttcgtttttattaaaaatataaaattagtcgggcgtggcggcgtatgtttgtaattttagttattcgggaggttgggataggagaatcgttttttttgtggaggttgtcgtgagtcgagattgcgttattgtattttagtttgggtaataagagcgaaatttaagttttaaaaatataaataaataatatataaataaaataaaatagtggtaggtcgggagcggtggtttacgtttgtaattttagtattttgggaggtcgaggcgggcggattataaggttaggagtttaagattagtttggttaacgtagtgaaattttcgtttttattgaaaatataaaaaaattattcgggcgtggaggtgggcgtttgtattagttattcgggaggtagaggtaggagaatcgtttgaatttaggaggcggaggttgtagttagtcgatatcgtattattgtattttagtttaggagatatagcgagagattttgttttaaaaaaaaaaaaaaaaaaaaaaaagtggtatgttagattatattgatattgttttaattataggagattatgaagttggagacgagttatttttttaattttattttttttgtttttttttttttcgttttttatttcgttttttttgaaatttcgtagtttttttttaatttttgggttttttgtattatttttatggttgttttgttggataataagattgaaataagcggttaggcgtagtggtttatatttgtaattttagtattttgggaggttaaggcgagtagattatttgggttaggagttttagattaatttggttaatatggtgaaatttcgtttttattaaaaatataaaaattagtcgtgtcgtggtggtgcgtgtttgtaattttagttattcgggaggttgaggtaggagaatcgtttgaatttagaatgtggagattgtagtgagtcgagatttcgttaatgtattttagtttgtacgatagagtaatacgttattttaaaaaaaaaaaaaaaaaaaaaaagatagaaataagcgattaaagattttgggattttattttttttttgtgtttttaaggaattattttagatagttttgttttaattttttttttataaaatgagaataataatgatgtttgaattttttaattttttaggacgttgtaaaaattttgtaatatgggttgggtatagtggtttatatttgtagttttagttttttgggaggttaaggtgggaggttttcgtgaggttagtagttatagattagattgggtaatataataacggtttatttttataaataaaaaattaaaaaaataaaaataagaaaagtttagtttagtggttggtgtttgtagatttagttatttttttttgggaggttgaggtggagggatagtttgagtttaggagttcgaggttttattgagttataatttttattattgtatttgagtttgggtaatagagaatttgttttttaaaaaagaaaaaaaaaaagttttgtgatacgatatatgtgaattgtaaatattagattgaattattatatttgtgtagtttgttatgttaatttttagttatttttttttaattttttgaaatttatgtttttttttttgtaaaaaaaaaaaataaaaataaaaataaaaaaacgtaaataattttgtgagtatattgtttaaaagtttaatatttgttttttttaaagtaaagtatgtattgtttatgtgatttagtaattttattttaacgtatatatatttttaatgaattaaaaataggtatttaaagaaaattcgggtcgggtgcggtggtttacgtttgtaattttagtattttgggaggtcgaggcgggcggtttatgaggtcgggagatggagattattttggttaatacggtgatatttcgtttttattaa

SEQ ID NO: 1937 - DNA, 9180 bp, Artificial Sequence
  chemically treated genomic DNA (Homo sapiens)
attttgttgttgttgttgttgttgattttttgttttggtgatatatttagtgtagtggtatattgaagttttttattagtattgtgttgttgtttgttttattttttaggtttagtagtaattgttttataaatttgggagttttagtgttaggtatatgtataattaagattgtgatatttttttgttggataaggttttttattattatataatgtttttttttgttttttttaattgttgttgttttgaagtttgttttgtttgatataagaatagttatttttgtttatttttggtgtttatttgtatggggtgtttttttttatttttttattttaagtttatgtgagtttatatgtgttaggtgagttttttaaaggtagtagatagttggttggtgaatttttatttattttgtaattttgtattttttaagtggaatatttaggttatttatatttaatattagtattgaaatgtgaggtattattttatttattatgttatttgttgtttgaatattttgattttatttatttaagtatttatttatttattgtatttttgttttatgggttttgtgaggtttatgttttaatgaagttttgttttgttgtgtttttaggatttgttttaagatttagagttttttttagtagtttttgtagtgttggtttggtagtggtaaatttttttagtatttgtttgtttaaaaaagattgtattttttttttatttatgaagtttagtttttttggatataaaatttttagttgataattattttttttaaggaggttgaagataggtttttaattttttttagtttataggatttttgtttagaaatttgttgtgaatttgataggtttttttttgtatgttatttggtgtttttgttttatagtttttaagattttttcgttttgattttagataaattgatgattatgtgtttaggtgaagatttatttatttatttattttgagatggtgtttcgttttgttgttaggttggagtgtagtggcgcgattttagtttattgtaatttttgttttttggttttaagtgatttttttgttttagttttttgagtagttaggattataggtatggtattacgtttagttaatttttgtatttttagtaaagatggggttttattatgttggttaagacggttttgattttttgatttcgtgatttgtttattttatttttttaaagtgttgagattataggtataagttattatatttagttgtaataattttttttttttttttttgagatggagttttgttttgtcgttaggttggagtgtagtggtacgattttaatttattgtaatttttattttttgggtttaagtaattgtcgtgtattagttttttacgtagttggggttataggtatatgttattatgtttagttaaattttttttttttttttgtattttagtagagatagggttttattattttggttaagatggttttgattttttgattttatgatttatttttttcggttttttaaagtgttgggattataggtatgagttattgtgttcggtcgtaatgatatttttatgatgattttttaagtgttttttgagttttttgtgtatggatggttagatttttagtaaggttagggaagttttttttttttaattatttttttaaatatgttttttaaatttttagatttttttttttttttaggaatattaattatttttaggtttagttatttaatataattttaaattttttggaggttttatttatttaaatttttttttttgttttttttggattggattatttcgaaaattttgtttttaagttttgaagtttttttttttgtttgttttattatattgttgagattttttagtatattttgtttttttttaagtgtgttttttattttttgaagttgtgattgttttttatttatgttatttattttattgaagattttttcgtttatattttgtgttatttttttgatatttttaagttggattttatttttttttggtgtttttttgattagtttaataattaaatttttgaattttttttttggtagtttaggaatttttttttggtttggatttattgttgatgagttagtgtgatttttgggtggtgttaaagaattttgttttgttataatattaaaattgtttttttagtttttttttttttgggtaggttatgttagaggggagatttggggtttaaggttgttgtttagatttttttgttttacggggtgtttttttgatgtagtattttttttttttttttagggatgtgattttttgagagttaaattgtagtgattattattatttttttggatttagttattagaagggttattaggttttgggttggtattgggggttgtttgtatagagttttgtgatgtaaattgtttttagtttttttagttatggatattagtatttgttttagtagaggtggtaggggagtgaaaggaattttgtgagggtttttagttgtagttgtttgatgtattagtttggtgttggttggttttttgttgagaggtgaagttagttggattttttgggtcgaatggggatttggagaatttttttgtttagttaaaggattgtaaatatattaattagcgttttgtgtttagttaaaggtttgtaaatgtattaattagtattttgtaaaaatagattaattagtattttgtaaaatgggttaattagcgggatgtgggcggagattaaataagggaataaaagttggttatttgagttagtcgtagtaatttggtttggtttttttttaggttgtggaaattttgttttttcgttttttgtaataaattttgttgttgttttttttttgggtttgtattatttttatgagttgtaatatttatcgcgaaggtttgtggttttatttttgaagttagtaagatttcgaatttattaggaggaagaaataatttcggacgtattattttttagagttgtaatatttattgtgaaggtttgcggttttatttttgaagttagtaagattaggaatttattagaaggaagaaattttggatatatttgaatattagaggaataaatttcggatatattatttttaaaaattgtaatgtttatcgtaagcgttcgtagttttatttttgaagttagtaagattaagaatttattggaaggaattaattttagatatattgttatgaggtagtgtttttatgagagtattagttgtggtatataggggaggattaggtggtgggtgggatattagaatttttaagagaatatgatttttgtttttagttattagggtgggtagggaaggattattaggtgggggtagggttaggtatgtttgagtttagagtttttttgggtggggtttgttgtggttttgtggggaatgggggtgtgatttttaggttaatggagttatttttttaggaggattatggttgttttttttgtgttatgtaggttgttagggaagtgggggaaagttggtagttatagattttatttagtttttatataatttaataagtaaattttatttttattgtgtttttttaaaaagtatcgaatttgtttttaggtagtaggggagtaggattgagaatttgttttaggttattagttttttagtcgagaatgtaagttagatttttgtgtttttttatttgttaagtttgtatattagatttacgtttttttttgagttttggataggaaagtttgtgttcggttggaattgttattaagtttagttggaggtttttttttttttgtggtttttttttagttttttcggtagtttttgtgagataagttagaaatggtttttttggggatttatagagacgacggggttttattttttgttttttttatttttgtatttcgtttagttttttaaattgtttgagttttaggtaaggttaaattttttttttgtgatttagatttttaggttttttaagggtgtgtgtttaggggtggataatattttttttatattttttatagtttgggtatttatagtatgtgggttattttttgggttatgtaggagtaatgtattttttttagagggtttgtggattattttggtttttttgttatatttttgtagtagtttttggagtaaaagtttataatgcgagtttttatattttgttttgtttatttaagtgggagttgtaagttagttttgttttttatttattatttttttttattttgtattttaaattaaaatttattagaatgtaaattttatgagggtaataattttaatttagtttttttattgttaaatattttaaaattgttatatgtgttgttattattatggacgttttaaatattttttatgaatgaatgttgatatagtatagtgttgattttattatttgttataaagtaaaaattttttaaatgttaaatattattattataagtaatattattttattattgagataattatggttttgtatttttttaaggagtgtagtttaggtaataatatattttaatattaggtatttgttattttatgtttttaagtttatttttttatttgattaatattagtaaagatttatggttttaagtgaattttattttatgaatttataattgggaatttaggttgaaaatttatttagtattatttattttgttgttataatttattatttattttgttgttattgttgttttaattagttattatgtttttattggattttgatatggtaagtaatgttaattaatatagttgtgttattttaatattattttaaaatattttaagtgaaatataagattcgttataaaaggatttagatagaggttataaattattaattttttttttaagagaagtattgtgtatttaatgataagtttttagtgtttagaattgttaaaatttttgtgaagtatattattgaagatgaggttgaaaaatttgatttttattattatattgataattttaggagaattttatgtagaaggtaaaattaatttttaatattttttattttttaaaatatataaatggagattttaatatttatataatttaagttttaatatatttttttatttttattattaattttataatatattttataaatataattttttataatatttagatttttttttttgagtaaaattagtaaagtgtttttatagtagtataagttagaaaagtaaaataaaataaaaatttttgtatttttagggggtataggagattaggatttaaatatttcgaaaaggtttttaggttaataatatgtttatttcgaagttatatgttaattttaattttaaatttatgttagaatttatttttaatattgataaaatttgtataattttaattttgtttataaggtgagagtttaatgtgggaaatttgaaaaggaaatagttataaatattttttatttttgagattttgatttttattataatgaattatttatttgttggagatattaagtagtgattagtaggtgaattatataattgtttgtataaatagggatatttagagagtaaaagaggggttttattaataattgtttggataatatatgtaaattaggattttttaaataaattaatatttatggattttttattagaaagttttatagttagattgtttaatgtgtaagattagtgtgcgagtggaagttaggtagtgtatatgggtatgttgtttaggaatattattaatattattaggtcgtagatgaagaatttagggaggatatttagtattagtaagagtgaatatataaagaaggaagttatagtaatatagtttttttaaaataaatatttttgggaatttgttgaaattaaatatataagttttaattgtgttttagttgaatagttaattataaattttttattaaaatatttataattaaaattataaaagtgaaagatatagaattaattttattttatatttttaattttataataggatgatttttgtatgaattttttttgattttatttttttgtttaaatagggaaatattagtagatataattgtttgttatttatattataaagatattgtaatattttagttaattttttaattattataaggttataatgttattttatataataaaaaaaaaaagtaagttgtttgaagattaagataatgattttatttttgtatgttttttttaatttttattgtgtattttagggataagaattgaattaattgtgttttttattttatggtatgtaagtattattggtttatgaaaggttttatttttgttttatttatatattttatttttttatttttaattttgaagtttattttttttgggatttattataatgttttaatatgttattttagtttttttaattataaatagttttggaatgaatatgtaatataattaatttatttttttgtaagaatgttattagtttgtatttatttatagatagtattattgagtttatttttgtatttgatttttgtaatgagagattatttttgtagaatggtagttttgaagtatattatttttgagagaggatgtaaattgttgttttttattatttttattaatattttatattgtttatttttgtattggttgttatatggttatttataaagtgatattttatttttatttatttattattttttgattagtagtaagtgtgtttatcgttttatgtattttttttaatatgtttagatatttgtgattttttggtttatatgtgattagtatattttttatattttttattaattttttgttaggaatttatattttttaaggtattttagttattttaataaataatgtgtttattttggtggtggagggagatgttttaggatagagagtttttaaagttataatttaggattgttgtgtagagaatattttgttgtttttttttgataagtaattgtgttttttaggaaatggaatggggattatttagtttatgtttttttgtttgttttttttttattgtaaatttttttggtgtttgggtgtgaaaaaatggtgagaataatttttaaggaatggggattatttagtttatgtttttttgtttgttttattagatagtggaagttttgttgtttattattttatatttattttttttaaatttaggttagtattattagtattttatgttttatagtagtattaaggtatatagtgattaattaaggtattgaagtcgtagtaattatattggatttaggtttttttttatttatgattgtttatgtttttttttattatagtttttaggattgttcgagtattttttttttttaagtgtttttatgattttaagatttttaatataaagatatatttttaaaatatatgttttatttggagtataatatatttagaaaaatgtaaaaattataggatatatttatatagtttttataaaattttatattatttagattaagatatagaatagtgatagtattttagaaatatgatttttttaaggtattaaattttaaaggtaattattttgatttttattattatggattagtttgtttttttttaaaaagttatgtaaatgtatatattaatttatatgtgattggttttttttatttaatattatgtttatgagatttattatttgtttatttttgttgttggataatattttattgtatgtatagtttaaaatgtgtttattttttttattatttatgggtatttagattgtttttagtttgggattatatgaatattgttattataagtatttttttttatgttttttggtatataaatatgtgttttttttattgggtaatatggtttgtatatgttttattttaatatatattgtaaaggtgtttttttatagagtttggattgatttatatttttagttgtagaaatatgcgagttttagtttttttatttttttataattattgagatagtttgttttttttattttagtagttttattggatatgtagtagtattttatggtggtttaaatttttatttttttgatgattagtaatgttaagtattaggtttttaattatttaaatattttattttgttaagtttttgttaagtattgttttgttttatttggttgtttgtttttttttttaatgttatttattttaaaattttttatgagttagtatatgttaaggagaaattttatttatttttgaattgtattgtttaatattagttattagttatatatagttattggagatagtatttaaaatgttattagtttaagattagatattttgtaagtataaatatgtagtggattttaaagagttagaaaaaaaaagaatgtaaaatatttttaatatattgggttaaataaaaatttattattaaaattaattttaattgttttttagtatttttatgaatgtgattattagaaatttttaaattatataagtgatttataatatatatttattaggaagtgtaggtagggtggagtggtttaagttttgtaattttagtgttttgggaggttaaagtagaaggattttttgagtttaggagtttgagattagcgtgagtaatagagtgagattttttatttttataaaaaataaaataaaaattagttagatgtggtggtatgtgtttgtagttttagttataggagaggaggtttgtttaagtttaggagtttttggtggtagtgagttatattttagtattgtattgaagtttggataattgaggaagattttgtgtttaggaagaaaaaaaaaagtattgttttacgaagttatgtaaagtttttttgaaaaagtggtttgttaaattttattatgattgttggatgtttaaagttatttgtagattaattatgataaaaggattttttgagttgttataaaagtattttaaaaatttaagtaagaaaaataagtattagttgaagtgtttttaaaaatttttagtttgtattgttatttgattataaatttatgtttttagatttgtttttttatttttagtttgatatttatttattttaga

SEQ ID NO: 1938 - DNA, 9180 bp, Artificial Sequence
  chemically treated genomic DNA (Homo sapiens)
tttgaaatgagtaaatgttaagttgaaaatggaaaaataaatttaaaaatataaatttgtaattaggtgataatataaattaaaagtttttagagatattttaattagtatttattttttttatttaaatttttaaggtatttttgtgataatttaaggagtttttttattataattgatttgtaaatgattttaaatatttaatagttatgataaaatttagtagattatttttttagggaagttttgtataatttcgtagaatagtatttttttttttttttttagatatagagttttttttagttatttaagttttagtgtagtgttgaaatatagtttattgttattaggagtttttgggtttaagtaagtttttttttttgtagttaggattgtaggtatatgttattatatttggttaatttttgttttattttttgtagagatgaggggttttattttgttgtttacgttggttttaaatttttggatttaaaggatttttttgttttggttttttaaagtattaggattataagatttgaattattttattttgtttgtattttttaatagatatgtattgtaagttatttatgtaatttaaaaatttttaatagttatatttataaaaatattaaggaataattgaagttagttttaataataggtttttatttaatttaatatattgaaaatattttatattttttttttttttaattttttaaaatttattatatatttatatttatagaatatttgattttgaattagtgatattttaagtattgtttttaatagttatatgtggttgatggttagtattggatagtatagtttaggaatagataaagtttttttttaatatatgttaatttataaaaaattttgaaataaatagtattaaaagaaaaaatagataattaagtaaaataaagtaatatttggtaagaatttggtaaaataggatatttaaatggttagagatttggtatttagtattattagttattagggaaatgaaaatttaaattattatgagatattattgtatatttaatagaattgttgaaatgaaaaagataagttattttaatgattgtgaagaagtgaagaaattggaattcgtatatttttataattgaaagtataaattagtttaaattttatgagagaatatttttgtaatatatattggggtaaaatatgtataaattatattatttaataaaaaaagtatatatttgtatattaaaagatatggaaaaaaatgtttatagtggtagtatttatatagttttaaattgggaataatttaaatgtttataaataatagaaaagataaatatattttagattatgtatataatggaatattatttaataatagaaatgaataaatggtgaattttataaatataatattgagtgaaagaagttaattatatatgaattaatgtatatatttgtataattttttaaaagaaaataaattaatttatgataatagaagttagaatggttatttttggggtttagtgttttagaaggattatatttttggggtattattattgttttatattttgatttggatggtgtaaaattttgtaaaaattatataagtgtattttgtgatttttgtatttttttggatatgttatattttaaataaaatatatattttaaaaatatatttttatgttgaagattttaaagttataaaaatatttaaaagaaagaaatgttcgaataattttaggagttgtggtgggaagaaatatgggtagttatggatggaagaaggtttggatttagtgtgattattacggttttaatgttttggttgattattgtatattttaatgttattatgagatataaaatattagtagtgttagtttaggtttgaaggaaatggatgtggaatgatgagtaataaaatttttattatttgatggagtagatagaaaaatatgggttggatagtttttattttttgagaattatttttattatttttttatatttaagtattaaaggaatttataataaaaagggagtagatagaaaaatatgggttggatagtttttattttattttttgaggggtatagttgtttgttagggaggggtagtaaagtattttttgtataataattttaggttgtggttttaaagattttttgttttgggatatttttttttattattaggataggtatattatttgttaaggtagttggaatgttttggagaatatgaatttttgataaaaaattaatgagaaatgtgaggaatatattaattatatataaattaggaaattatagatgtttgaatatattaaaaaaagtatatgaagcgatggatatatttattattgattagagaatggtaaataaataaaaatgggatattattttatgaataattatatagtaattagtataaaaatggataatatgaggtgttggtgagaatgatgaggagtaataatttatatttttttttagagatgatatattttaaaattgttattttgtaaaagtaattttttattatagaaattaagtataagaatagatttaataatgttatttgtgagtgaatatagattgatgatatttttatagaaagataagttggttatattatatatttattttagagttatttgtggttgagagagttagagtaatatgttaaaatattgtagtaggttttaggggaaatggattttaagattaggaataaggggataaaatgtgtaagtaaagtaagagtgagattttttataggttaataatatttgtatattatgaaatgagaaatataattaatttaatttttgtttttgaagtgtataatgggagttgagagaagtatgtaaaaataaaattattgttttggtttttaagtagtttattttttttttttgttgtgtaaaatagtattataattttataataattagaaaattaattagaatattgtaatgtttttatggtatagataatagataattatatttgttggtatttttttatttagatagaaaaataaaattaaaagaaatttatgtaaaaattattttattatagaattaaaagtataaaataagattaattttgtgttttttatttttataattttaattatagatgttttggtagaaaatttatagttaattatttaattaaaatatagttaaaatttatgtatttaattttaataaatttttaaaaatgtttattttagaaaagttgtattgttgtagtttttttttttgtatgtttatttttgttaatgttaagtgttttttttggattttttatttacggtttgataatattgataatgtttttgaataatatatttatgtatattgtttagtttttattcgtatattaattttatatattgggtaatttgattataaagttttttaatagggagtttataggtattggtttgtttggaaagttttgatttatatgtgttgtttaaatagttattaatagagttttttttttattttttaagtgtttttgtttgtataagtaattatatggtttatttattaattattatttaatgtttttaataaatgaataatttattgtgataaaaattaaagttttaaaagtaaaaaatatttatggttattttttttttaaattttttatattaaatttttattttatgaatagaattaaaattgtataagttttgttagtattaggaatggattttagtataaatttagaattaaagttaatatgtgatttcgaaatggatatattgttaatttgaaaattttttcgaagtatttagattttggttttttatgttttttagagatataagggtttttgttttgttttgtttttttgatttatgttattgtaagaatattttattaattttgtttaaaggaaaaggtttaaatattataaaaagttatatttataaaatatgttataaaattgataatgaaaatagaagagtatattaaaatttgagttgtataaatattagaatttttatttgtatgttttagagaataaagaatattaagaattaattttattttttgtatagagtttttttgagattattaatatgatgataaaagttaggttttttaattttatttttagtggtgtgttttataaagattttaataattttaagtattaggaatttgttattaagtatataatattttttttgaggaaaaagttaataatttataatttttgtttaagtttttttgtaacgagttttatattttatttaaaatattttgaaataatgttaaaataatataattatattaattgatattatttattatgttagagtttagtaagagtatgataattgattagggtaataatagtagtagaataaataataaattatagtagtagaataaataatattaggtaaatttttaatttaagtttttaattgtaaatttatagagtaaagtttatttgaggttatagatttttattaatattgattaggtaaaaagatgaatttaggaatatgagataatagatatttgatgttgaaatatgttgttgtttagattgtattttttaaagagatatagaattatagttgttttaatgatagaatagtattatttataatagtagtatttgatatttagagagtttttattttgtggtaggtggtgagattagtattgtgttatattaatatttatttatgagaaatgtttagaacgtttatgataatggtagtatatgtaatagttttgaggtatttagtagtgaaaaaattggattaaaattattgtttttatggagtttatattttaatgagttttaatttaaaatataaaataggaaaaaatggtggataggaggtaggattaatttgtagtttttatttggatggatagagtaggatgtggagattcgtattgtgaatttttgttttaagaattgttgtaaggatataataggaaagttaagataatttatagattttttgaagaaagtatattgtttttgtatgatttagaaaatagtttatatattgtgaatgtttaaattgtgaaaagtgtgaaaggggtattgtttatttttgaatatatatttttggggaatttgaaggtttagattataggagaaggatttgattttatttggagtttagataatttagagagttgagcgaaatataggggtagaggaagtaaagggtaaagtttcgtcgtttttgtgggtttttagagaagttatttttgatttgttttataggggttgtcggaggaattgggaaaagattatagggagaaggaaatttttagttgaatttagtaataattttaatcgaatataaatttttttgtttagaatttaggaaagggcgtgaatttggtgtgtagatttaataggtagggaggtataaaagtttggtttgtattttcggttgggaggttagtagtttggggtaagtttttaattttgtttttttattgtttggaaataaattcggtgttttttgggggaatatagtagaagtgagatttgtttgttgggttgtgtgagagttgggtgaggtttgtaattgttagtttttttttatttttttgataatttgtatgatatagaagaggtagttataatttttttgggaaggtaattttattaatttgggaattatatttttattttttatagagttataataagttttatttaagaagattttgagtttagatatgtttaattttgtttttatttgatggtttttttttatttattttggtagttgaagataaaggttatatttttttggaagttttagtgttttatttattatttgatttttttttatatattatagttgatgtttttatgaaagtattattttatggtagtgtgtttggaattggttttttttaatgggtttttggttttgttgattttaagaatgaagttgcggacgtttgcggtgagtattatagtttttaaagatggtgtgttcggagtttgtttttttgatgtttagatgtgtttagagttttttttttttggtgggtttttggttttgttgattttaggagtgaagtcgtagatttttatagtgagtgttatagttttaaaagatggtgcgttcggagttgttttttttttttggtgggttcgaggttttgttgattttaggagtgaagttatagattttcgcggtgagtgttatagtttataaaggtagtgtagatttaaaaagagagtagtagtaagatttattgtaaagagcgaaagaataaagtttttatagtttggaaggggattagattaggttgttgcggttggtttaggtggttagtttttatttttttatttggttttcgtttatatttcgttgattggtttattttatagagtgttggttggtttgtttttataaagtgttgattggtgtatttataaatttttagttagatatagagcgttgattggtgtgtttataattttttagttagatagaaaagttttttaagtttttattcgatttaggaagtttagttggttttattttttagtaggaggttaattagtattaaattagtgtattaaataattataattaaggatttttatagagttttttttatttttttgttatttttattggaataggtgttggtatttatgattgagagaattgaagatagtttatattataggattttatgtagataatttttagtattagtttagagtttggtagtttttttggtggttagatttagaaaagtaataataattattatagtttggtttttaggaagttatatttttaggaaaagggggagaatattatattaagggagtatttcgtgggataaaagaatttgaatagtagttttgagttttagattttttttttgatatagtttatttaaaagagaaggaattagaaaaataattttggtattatgataaaataaggttttttaatattatttaaaaattatattagtttattagtaatggatttaaattaagaagaaatttttgaattgttagaaaaagaatttagaagtttgattattaagttaattaaggaggtattagagagaggtgaaatttaatttaaggatattaaaaaaatgatataagatatgagcggagaaatttttagtgaaatagatagtataaataaaaaatagttataattttaagaaataaagaatatatttagagaaaagtaaaatgtattggaaagttttagtaatataataaaataagtagaagaaagaattttagagtttgaagataaggttttcgaagtaatttaatttaaaaaagataaagaaaaaaatttaagtgaataaagtttttaagaagtttgggattatgttaaatgattaaatttaagaataattggtgtttttgaggaagaagaaaaatttgaaaatttggaaaatatatttagggaaataattgaaaaaaaaaaatttttttggttttgttagaaatttagttatttatatataagaagtttaaagaatatttgggaaattattataaaaatattattacggtcgggtatagtggtttatgtttgtaattttagtattttgggaggtcgagggaggtggattatgaggttaggaaattaagattattttggttaaaatggtgaaattttgtttttattaaaatataaaaaaaaaaaaaaaatttagttgggtatggtggtatatgtttgtaattttaattacgtgggaggttgatgtacggtaattgtttgaatttaagaggtggaggttgtagtgagttgagatcgtgttattgtattttagtttggcgatagagtaagattttattttaaaaaaaaaaaaaaaagattattgtagttaagtgtggtggtttatgtttgtaattttaatattttgggaggatgaggtgggtagattacgaggttaagagattaagatcgttttggttaatatggtgaaattttatttttattaaaaatataaaaattagttgggcgtggtgttatgtttgtagttttagttatttaggaggttgaggtaagagaattatttgaagttaggaggtagaggttgtagtgagttgagatcgcgttattgtattttagtttggtagtagagcgagatattattttaaaataaataaataaataaatttttatttaggtatatagttattagtttatttgaagttaagacgaaagaattttaagagttgtgaggtaaaagtattaggtaatatataaaagaaaatttattagatttatagtagatttttaagtagaaattttataagttagaagggattggggatttatttttagtttttttaaaaaaaataattattagttaagaattttgtatttagaaaagttaggttttataaatgaaggaaagatatagttttttttagataaataaatgttgagagaatttgttattattaagttagtattataagaattgttgaaaagagttttaaattttgaaataaattttggaaatataataaaatagagttttattaaagtatgaattttataggatttataaaataaaaatatagtaaataaataaatatttaaataaataaaattaaggtatttaggtaataaatagtatgatgaatggaatggtattttatattttaatattaatgttgaatgtaaatggtttaaatgttttatttaaaagatatagaattgtagaatgggtaagaatttattaattaattatttgttgtttttaagagatttatttaatatatatggatttatataaatttaaggtaaaggggtgaaaaaagatattttatgtaaatggatattaaaagtgagtaggagtagttatttttatattagataaaataaattttaaagtaatagtagttaagaaagataaagaaggatattatataatgataaaaggttttgtttaataggaaaatattataattttaattatatatgtatttaatattggaatttttaaatttataaaataattattattagatttaagaaatgagatagatagtaatataatattagtgggggattttaatatattattgtattagatatgttattaagatagaaagttaataataataataataataaaat

SEQ ID NO: 1939 - DNA, 6373 bp, Artificial Sequence
  chemically treated genomic DNA (Homo sapiens)
gttttaaatttttgatttgtgattcgttcgtttcggttttttaaaatattgtgattataggtatgagttatcgtattcggtttttaatttttttttgttgtgaaatatattatatttatagtagtgtgtaaaaataattatatagtttaaagaataataataaaatgaatatttagtatttattatagaggttaaaaaaaaatagggtgtggttggatatggtggtttatatttgtagttttagttatttagaggtttgagtttaggagtttaaggttgtagtgagttatggtcgtgtttgtgaatagttattatattttagtttgggtagtgtagtaagattttatcgtaaaataataatagggtatgttagtattttagaaatttttagtttgttttttttaattaaattttttttttttattttatattagacgtaattataattttgatttttgtggtaattatttttttattttttttatatttttatgaatgtatttttaaggagaatattgtttgttttcgtttttatgtttattattttatgatttgttttttttttttaatattatgtttttgagatttatttatggtgtgttaggtaattgtagtttatttatttatattgttatttaatatataggtattttattatgattgtattgtaatttatttttttgttggtgggtatttagattgtttttaattttttgatattataaataataatgttatgaatatttttatatttgttttttggtatatatgtgtttttttgaggtttatatttgggggtgaaattgttggttggaggatatgtttaattttagtaagatatgttaaattattttttaaagtgtttatatttattgggatgtttattaatagtgtgtgggtgttttttattgttttgaatttttgttaatattttgtattgttagattttgttaattggtgagtttaaagtttttattaataaaagatgtgtaaaattatattataaagttgatattttaattgaatttatatgaattttatttaaatattttttttgtttgtttttgatttttaggaaaatataaggttttgtaagttaaaaatgatatgaaagtattttatttgtgagttgttacgaaattatgttataatttttggagagagagaggaaagggagaggagatatttgtgtgatttaaggggtggaaatatggtattaagatgttggtaagatagatgattatttatttatggttaagtattatggtgttaagaatttagataaaatatattttttcgtagagttagtattagatattttatttaatttagaaataaatttatttttttttttttcgatttttcgttttagtttattttttttagttgtttttgattttttaagagtttttttattatagaatttttattatgaattttgatattaaaattttatatttgggtatgtatatttgggcgtgtaatttaggattttagataattttaggttattttttttaagtgttgttgtgaggaagaaattagtttttatattagatatgatttttggtatattatagaaaaatatgggtattattttattttttgttagtttatattttatattttaaaatattttagtttataagatttgttttttttagaattattttttttattaatttttacggaaaattaagtgtttttagaaattatttttggttggtcgcggtgatttatatttgtaattttagtattttgggagtttaaggagggtggattacgaggttaggagtttgagattagtttggttaagatggtgaaatttttttttattaaaaatataaaattagttgggcgtagtggcgggtgtttgtaattttagttatttaggtggttgaggttggagaatcgtttgaattcgggaggcggaggttgtagtgagtttagatcgtgttattgtattttagtttgggcgatagagtaagattttgttttaaaaaaaattttttaatttttttttttatgaagatttttgttttgtgtttaagatttttggataaagtagtagtatttttatgattttgtattttgaatattgttgtatttaagttgatgttttgtaaatttgtaataattagttttattttttttttagttttttattttatttatttatttttttgagacggaatttttttttgtcgtttaggttggagtgtagtggcgcgattttggtttattgtaattttcgttttttaagtttaagtaattttttgttttagttttttgagtagttgggattataggcgtatgttattacgtttggttaattttttgtatttttagtagagataggttttattatttttgttaggttggttttgaatttttgatttcgtgatttatttgttttagttttttaaagtgttgggattataggtatgagttattacgttcggcgaagattaagttttgttttgttgtttaggttggagtgtagtggtatgattttagtttattgtaatatttgttttttgggtttaagtaatttttttgttttagttttttaagtagttacgattatagtgttattatgtttagttaatttttgtatttttgttagagatggggttttattatgttggttaggttggtttttaatttttgattttaaatgatttattcgttttggttttttaaagcgttgggattgtaggtatgagttatagcgtttagttaattagttttttttaagatagtaattgagttttaaatagaaggtagtgtgttaggttttggttattggaagttcgtttttttttttataattagtttgttttattgttttatttttttatgttttatttattttaggttatttttttttatttttgtttttgatttaaggtagatataatattttttaaaaaaatttttaaatttttagtagttatataaaaatttaaaaaatttaaaattgaggtaaaatatatatatataaaatttattattttaattttttgtttttgtttttgtttttgagatagagttttattttgttatttaggttggagtgtagtggtgtgattttagtttattgtagtttttgtttttcgggttttagtgatttttttgttttaattttttaggtagttgggattataggtatgcgttattacgtttggttaattgttgtatttttgtagagatggggttttattatgttggttaggttggtttcgaattgttgattttaggtgatttgtttatttcggttttttaaagtgttaggattataggtatgagttatcgtatttagttttagttatttttaagtgtatagtttagtagcgttaagtatatttatattgttgtgtaattagtttttagaattttgtttattttgtaaaattgaaattttgtatttattaaatattggttttttatttttttttgtttttagtttatggtaattattatttaattttttgtttttatgaatttgtaatgggatatagtattgtattttttgggattagtttattttatttagtataatgttaagatttatttatattttagttgtattagaattttttttttttttaaagttgaaaaatatttagtcgtatgtatatattgtatttttgtttattatttatttgttgtggatatgggttatttttgttttttgattattgtgaataatgttgtttttaatacgggtgtatagatatttttttaagattttgtttttaatttttttggttatatggttagaaatggaattgttggatcgtattttttttaattttttgagaaatttttatagtgttttttatagtggttgtattatggtagatatttttaaagtttttgttatattttaggggaaagaattattgtattgtagataatatttaaggaaaagaattgtatggttaagagtaaatagttaatttttatgttttattagaaaataattaaaataattaagagcgtggaatttttagaattgggagagatattatgaattatttggtttattttttttttttacgatgagtaaatagaggtttgtggaggttaaacggttagttaagtaagggaagaattagaattggtatttagagttttttaatttttaatttattgtaaagaaaataataataatttttaattcgaaaaattatgcgatgaagaataagaattattgagcggatgattcgtaatattttttgggatgtattttttgtgtgttttgttttgaaggttgtttgttaatttttttaattgttttggttgatattgaaattttgtttgttttttttgatttcgtcgttgattgggttttgagtattttaggagatggaggtagagataaaggaaattagtttataattaagaatggaatggtttttaatggaatgttcgtttgtgcgttggcgggagttgttagcgtgtcgagcggatttagcgttttttttagggttttaaagattttagcgtattaggagggtggtttgtggttttttgtagtttttacgtttcggatttaaacgatagagttcggggatttataggggtagtaaggcggtagagtcgcggagttagtgtaattttttcggcgggatcgcgtttaatttttttcgtcgtagtcggggagtttcgggggtcgtcgagtataggttgcggatcgcggcgggtacgtgggttcggttgtagcgttgcgttaggtatcggttgttcggttttgtttaattttttcgttttcgtttcggtttttgtttttggggagagggtttttttttttttttattttgtattagttcgagggaatttgcggtcggtgacgcgtatttttaagagagttatttgtagcgcgaggcgcgtcgttttaggcggtatcgtagggttgggtcggcgcggtttggggatttcgggtttcggaggttatgtcggcgttggcgcgcgacggcggttagttgtcgttgttcggtaaggtttcgttcgttcgttcgtagtttttcgcggttttttagtttttatttcgtagtgtggattcgggcgcgcgtttttttcggtttagtcgtttcgttttttttcgcgttcgttttttttattgtttttcgcgttttttttttttttcgcgtttttcggattcgtttattatttgtttgcggtttcggcgttttttatttcgcgtttttttttttttttttcgaagttttttttttggttcgggtcgcggtttcgagtggcggttcggatttcgtagacggtttcgtcgaggcgttgcgtcgggtttggggtagttcggttcgcgcgttcgggtgttgggtcgttcgtgggagtttgcggtcgcgaattcggcgttaggtggttaaggattttttttggttcggtttttggatattgtagatatttgggtgtcgtttttaattttttttttgaggttttgatttatggagggaattttgatgggaaaatgcgttcgcgtttttttttagagcgagttatttttaataacgatattttttagtttcgtcgaattttggttggattaacgaatagtttatttaggaaatattatgtaaatagatttatatattaaaatattagttgttttttttttttagtttttttttattttggtataaattttaaaggggtttttaaggatttcgaggattgtttttaaagaatttgttgggtagtatagttgttattgaaaaaaaaaatttttttatcggttcgcgttagttttttatttggaaagatgagaggattgaatcgaatttgggttgaaggcgatagagttttgggtgttcggtagtttcggtttttgttttaggtttgtaattttgggattgatatttatttttttcggttttcgcgtttttatttgtgtagtgagggagttcgttcgagttttttttagttttgaaatgttaggatttgaagtttttgtggtaaatagagaaaatgtttgtaatatagaagtgtaggaattatatttaatagtttttgttataaataattttgaaatataaaaagtaaaaaatggaaatcgggggaaaagagttgaaaaataaagatattttagtttttaaatagttatttttattagttagtaaatttgtaattttaaatgtgtagtataatatgttttttagatttcgttaatataaaatgttagttttttattatgtatgatattaagtagtaagtgtattttttagaagtataatgggttttttaaaggtataagtattaatatttgtaacgatatttaagttgtatggaatttttttttatttaggaaagaatttagaaatttttatgtttttttttttagatatttttaaat

SEQ ID NO: 1940 - DNA, 6373 bp, Artificial Sequence
  chemically treated genomic DNA (Homo sapiens)
atttagaaatatttggagagagagatatagaaatttttgaatttttttttaaatagaaaagaattttatgtagtttaaatatcgttgtaagtattgatgtttatatttttagaaagtttattatgtttttgaaaaatgtatttattatttaatattatatataatagaaagttaatattttgtattaacggaatttggaaaatatattgtattatatatttgaaattatagatttattaattagtaaagataattatttaagaattaaaatgtttttgttttttaatttttttttttcgatttttattttttattttttatattttagaattatttgtaataaaagttattggatataatttttgtatttttatattgtaagtattttttttatttattatagagattttaagttttagtattttagagttgaaggggattcggacggatttttttattgtatagatgaggacgcggaggtcgggggaggtgagtgttagttttaaggttgtagatttaggatagggatcggagttgtcgggtatttagaattttgtcgtttttaatttaaattcgatttagtttttttatttttttaaatagaaagttgacgcgaatcgatgggaagatttttttttttaataataattatgttatttagtagattttttggggatagttttcggagtttttgaaaatttttttggggtttatgttaggataagaagagattagaagaaagggatagttagtattttaatatgtaaatttgtttgtataatattttttaggtaaattattcgttgatttaattaaaattcggcggggttggggggtatcgttattgaggatgattcgttttaggggagaacgcggacgtatttttttattagagttttttttataaattaaaattttaaaagaagagttaaagacgatatttaggtgtttatagtatttaagggtcgggttaggagaggtttttggttatttggcgtcgagttcgcggtcgtagatttttacggacggtttagtattcgagcgcgcgggtcgagttgttttagattcggcgtagcgtttcggcgaggtcgtttgcgaagttcgggtcgttattcgggatcgcggttcgagttagaggagagatttcggagaagagggaagaggacgcggggtgggaaacgtcggggtcgtaggtaagtagtgggcgagttcggagggcgcgaaagaggggaggggcgcgggaggtaatggaaggagcgagcgcggggaggagcgaggcggttgggtcggaggaggcgcgcgttcgggtttatattgcggggtgggggttgagggatcgcgaggggttgcgagcgagcgagcggggttttatcgagtagcggtagttggtcgtcgtcgcgcgttaacgtcggtatggttttcggagttcggggtttttaggtcgcgtcggtttagttttgcgatgtcgtttggagcggcgcgtttcgcgttgtaggtggtttttttaaggatgcgcgttatcgatcgtaaattttttcggattggtgtaaagtggaaggggggaggaattttttttttagaggtagggatcgaggcgggagcggagaggttgggtagagtcgagtagtcggtgtttggcgtagcgttgtagtcgagtttacgtgttcgtcgcggttcgtagtttgtgttcggcggttttcggggtttttcgattgcggcggggaagattgggcgcggtttcgtcggagaagttgtattggtttcgcggttttgtcgttttgttgtttttgtgagttttcgaattttgtcgtttggattcggggcgtggggattgtagggagttataaattatttttttagtgcgttgggatttttgaggttttgagaaaggcgttgaattcgttcggtacgttggtaattttcgttagcgtataggcgagtattttattaagaattattttatttttaattgtggattgattttttttgtttttgtttttattttttaggatgtttaggatttagttagcggcgggattaagaaaaataggtagggttttaatgttaattaaggtaattagggaggttaataaatagtttttaaaataaaatatatagaaaatatattttagaggatgttgcgaattattcgtttaatagtttttgttttttatcgtataatttttcgagttgaaaattattattattttttttgtaataagttgaggattggaaagttttggatgttagttttggttttttttttatttaattagtcgtttgatttttataaatttttgtttatttatcgtaaaggaaagggatggattaaatggtttataatgttttttttaattttaggaattttacgtttttaattattttaattattttttaataaagtatgaaaattgattgtttatttttggttatatagtttttttttttagatgttgtttatagtataataatttttttttttagggtatggtagaaattttagaagtgtttattatggtgtagttattatggaaaatattatagaggttttttaaaaaattaaaaaaaatacggtttaataattttatttttggttatgtagttaaaagaattgaaagtagggttttgaagagatgtttgtatattcgtgttgaaagtagtattatttatagtagttaaaaggtagaagtaatttatgtttataatagatgaatgataaataaaaatgtagtatatatatacgattgagtattttttagttttaaagaggagggaaattttgatatagttaaaatatggatgaattttgatattatgttaagtgaaataagttagttttaaaaaatataatattgtattttattataaatttataaagatagaaagttaaatggtggttattatgggttgggggtagggggaaatggggagttagtgtttaatggatatagagttttagttttgtaagatgagtagagttttggagattggttgtataataatgtgaatgtatttaacgttattaaattgtatatttaaaaatggttaaggttgggtgcggtggtttatgtttgtaattttagtattttgggaggtcgaggtgggtagattatttgaggttagtagttcgagattagtttagttaatatggtgaaattttatttttataaaaatgtaataattagttaggcgtagtggcgtatgtttgtaattttagttatttgggaggttgaggtaggagaattattggaattcgggaggtagaggttgtagtgagttgagattatattattgtattttagtttgggtgatagagtgagattttgttttaaaaataaaaataaaaataaaaagttaagatggtaaattttatgtatgtgtattttattttaattttaaattttttaagtttttgtgtagttgttgggggtttaaaaatttttttaaagagtgttgtgtttattttaggttagaaatagaagtgaaggaagatggtttgaaataagtgaaatatgaggagataaagtaatgaaataggttggttatggggagaaaagcgagtttttaatggttaagatttaatatattattttttatttaaagtttaattattgttttaaaggaaattgattggttgggcgttgtggtttatgtttgtaattttagcgttttgggaggttaaagcgggtggattatttgaggttaggagttggagattagtttgattaatatggtgaaattttatttttaataaaaatataaaaattagttgggtatggtggtattgtagtcgtagttatttgggaggttgaggtaggggaattgtttgaatttaggaagtagatgttgtagtgaattgagattatgttattgtattttagtttgggtaatagagtaagatttggttttcgtcgggcgtagtggtttatgtttgtaattttagtattttgggaagttaaggtaggtggattacgaggttaggagtttaagattagtttggtaaagatggtgaaatttgtttttattaaaaatataaaaaattagttaggcgtggtggtatacgtttgtaattttagttatttaggaggttgaggtagagaattgtttaaatttggggagcggaggttgtagtgagttaagatcgcgttattatattttagtttgggcgatagagggagatttcgttttaaaaaaataaataaataaaatgaaaaattaaaaaaaaaatgaaattgattattataaatttgtagaatattagtttgagtgtagtagtatttaggatataaaattataaagatattgttgttttgtttaagaattttggatataaggtagagatttttatgaaaaagggggttggggggttttttttgagatagagttttgttttgtcgtttaggttagagtgtagtggtacgatttaggtttattataattttcgtttttcgggtttaagcgattttttagttttagttatttgagtagttgggattataggtattcgttattgcgtttagttaattttgtatttttagtagagaagggttttattattttggttaggttggttttaaatttttgatttcgtgatttattttttttggatttttaaagtgttgggattataggtgtgagttatcgcggttagttaggaatggtttttaggaatatttgatttttcgtggaaattggtggaaaaaataattttagaaggagtaaattttatagattgaaatattttggagtatgaggtataggttaatagaaggtgaagtaatgtttatgtttttttgtgatgtgttaagagttatatttaatatgagaattaattttttttttatagtaatatttaaggaaagtagtttgaaattgtttagagttttggattatacgtttaggtatgtatgtttaagtatgaaattttggtgttagagtttatgataggaattttgtaataaagaaatttttaaagggttaaaagtaattagaagaaatgagttgaaacgggaaatcggaaaagagaagagtaagtttgtttttgggttgaatggagtgtttagtgttaattttacgaaaggatgtattttatttagatttttagtattatgatgtttagttatgagtaagtggttatttattttattagtattttgatattatgtttttattttttaagttatataaatatttttttttttttttttttttttttttaaaaattgtgatatagtttcgtagtagtttataggtgaaatatttttatgttatttttaatttataaagttttatgtttttttgaaaattagggataaataaaaggaatatttgaatagggtttatgtgagtttagttgagatattaattttatagtataattttatatattttttattaataggggttttgaatttattaattggtaaaatttgataatataaagtgttgataagaatttagagtaatggagaatatttatatattgttggtggatattttaatgggtgtgagtattttgaaaaataatttggtatattttattaaagttgaatatattttttagttagtagttttatttttagatataaattttaaagaaatatatatgtgttaagagataagtataagaatgtttatagtattattgtttataatattaaaaaattgggaataatttaaatgtttattaataaaaggataaattgtagtatagttataataaaatatttatatattaaataatagtgtaaatgaatgagttatagttatttgatatattatgaatgaattttaaaaatataatgttgagggggaaaagtaagttatggaataatagatataaaggcggaagtaaataatattttttttaggaatatatttataggggtataaggaaagtaaaggaataattattataaaagttaggattgtggttacgtttggtatggggtgggaagaggaggtttaattagagaagataaattggggatttttgaggtgttaatatattttattgttgttttgcgatagggttttgttatattgtttaagttggagtgtaatggttatttataggtacgattatagtttattgtagttttgaatttttgggtttaagtttttgggtagttgggattataggtgtggattattatgtttaattatattttatttttttttaatttttgtggtgggtgttggatgtttattttattgttattttttaaattatgtaattatttttatatattgttgtgaatatgatgtattttataataaaagaaaattaaaggtcgggtgcggtggtttatgtttgtaattatagtattttgggaggtcgaggcgggcggattataggttaggagtttgagat

SEQ ID NO: 1941 - DNA, 5442 bp, Artificial Sequence
  chemically treated genomic DNA (Homo sapiens)
atttgtatttttattagtagttgttttatagttttgataatatttggaattgttaggtttttaaattttgttatggtgagtgtgaaaagtggtggttatttttttgtttggttattattatttatttaatgagagattgggttttgttatattgtttaggttggttttgaatttttgggtttaagtgatttttttattttggttttttaaagtgttgggattataggtatgaattattatgttttgttttgtttggtttttattgtggtaaaaaatatataaaatttattattttaattatttttaagtgtatagtttagtagtgttatatatatttatattgatgtgaaatagatttttaagtttttgtttgttttttgagatggagtttcgttttgtcgtttaggttggagtgtagtggcgcgattttggtttattgtaatttttgttttttgggtttaagtgatttttttgttttagttttttaagtagttgggattataggcgtttattattacgtttggttaatttttgtatttttagtagagatggagttttattatatcggttaggttggttttgaatttttgattttatgattcgttcgatttggttttttaaagtgttgggattataggtacgagttattatgttcgatttttaaaagttttttattttgtaaaattgaaattttgtatttattaaataaaatttttttttttttagttttttttttttagtttttggtaattattattttattgtttttttgaagttgattttatttttattttttgttttgataattttgttttgttatttaggttggagtgtagtggcgtgatttcgatttattgtaatttttgttttttaggtttaagtaatttttatgttttagttattcgagtagttgggattataggtgtgtattattatgtttagttaatttttttatttttagtagagatagggttttgttatattggttaggttgttttcgaatttttgattttaagtgatttgtttgttttggttttttaaagtgttgggattataggcgtgaagtattatgtttagtttttgaatttgattttagatattttagataagtggaataatatattatgtttttatttaatataaagtttttaaagtttatttatgttgtagtatgtgatagtattttttttttttataaggttgaataatattttattgtatgtatacgttatatttatttttttattagtggatatgtgggttgtttttatttttttgttattgtgaatattgttgttatgaatatgagtttgtaaatattttaagattttgttttttatttttttttttttgatatatatttggaagtaggagttttggggtaattttatttttaatttttttgttatttggtagttttatttttaattaagaggaatttttttatattgttttttatagtagttttattattttataattttagtagtagtatataagagttttaattttaaagtggtatatttttattttgtatttatttgataattaatgatattgagtatttgtttatttagatttttagtttatttagatttttattttaataaggtgttttgtgtttttgttaattttttaaatggtttgtttggaagagttttttatatattatagatataggatttttatttgttatatttattgtaaatattttttattgtatggttttttgttaattttttaatggtattatttggtaagtttgtattttgtttttttttttttttgagatagttttattttgttttttaggttggagtgtagtggtgtaattttagtttattgtaattttcgttttttaggtttaagcgatttttttgttttagtttttttagtagttgggattataggtatatattattatgttcggttaatttttgtatttttagtagagataggggttttattatgttggttaggttggttttgaattgttgatttcgtgattcgttcgtttcggttttttaaagtgttgggattataggcgtgagttattgtatttagtcgtaaatttatattttttaacggagttttatttattaattttttttttatggttagtgtgtatacgtgtattttttgtttgtttaagaatttttagttatttttagaaaatatatttattttttagaataattatttttttattttttatatttagatttatagtttatttgaaatagatttttgtatatgattatgagtgtaaggtgaaattttattttttttatatgaatatttaattgatttaatattatttattgaaaagattaattttttagttttatttttattataaatgaagtgtttatatatgtatgggtttgttattggatttttcgggatataagttttattgatttatgtttattattgtttttaaattgtatcgttgtaattattgtagttttatagtaagtttttttttttttttgtatttagagataggattttattatgttgtttagagtggttttaaaaatttttgggtttaaaggattttcgtattttagttttttgagtaattgggattataggcgtgtgttattatgtttagtttataaattttgatatttatagtaagtttttttattttaagattgttttgatagtcgttttgatattttgtatttttttataataatgtgtatttttataaaaatattatgggtgttttgatttggaatgtatgaaatttgtttattaatttgggaagaagtgatatttttataatattgagtttttaaattagtaaatatataatttttttttatttatttagggatggaatttttgattttttatttttaagttttttttgggttttatttttttttttgttgttttttttacgatttaatataaggattagggtttttttttttttatttgatttagggtcgttaggttttttattggttatggggggagggtttagaaggttgggtggttttaagagtagatatgaaaatatggttattagaatggattaaaggattgatgattttgtttttaggtgttttttttgtattatttattttttaatttaattagtaaagttaggtatatttttagtagttttgggagtttttattttatttatttgtttttttttttgtaaagttgttttagggtttgtaaaaagtagatatttaattaaaggggataatgtaggaaaagatattgataattttttttttttatcgtatcgtcgttatttaaaataatttaagtgtttttagatatgaattaattttttattttaattgttggttagaggattagtttagagaaagttgtatttgtatttttttagttaaagtttggatataaattgttattttagttatcgtaatttgtaatatttttattattttttttttttattgttttgcggttgcgtaaaagagttttttattttttttattttcgttttttttagaaaggtttggggtcgtattgaggttgatggttttagtaagagaatttttggtttaaggttttatttgggagagttttatttttatttttttttagcgcgtgcgtttttttttttttcgttatagttttttttttcgtattttattagtttttagttttttgttcggacgggtttgataggtatgtgtatattttttttagattttttatcgatgggatttttattttttttatttttagttttttttcgttcgggtagcgggggttgttgttgtgtcggtggttggtgatgattttgtttttttcgtttcggtatcgtgtttgcggtaatggttgtagcgggatttggagggtagtgaggaaggggtacgcggggattttgttttcgttttcggggggtcggtgggtagtaatgttgaggttttcgttattttattttcggaaggttgcggagaatatttgcggcggtcgtatttcggagttaattgttttttttcgtttttgttaggtatggcggtaattttatattttttttttgttgcgtttttataaatgttttgaaaaaattattttttttttttttcgttggaaaatattataattagttttttagagtgtgttatagagttaataggttttcgggttagagggtttgagaagaggattgtcgtatcgtaagatcgttatattcggttttcggttattatggtaatagttgtaggtataatttcgtgttttttgatttttttttaaaagtttttgtttcgtttgggttttttttttcgttcgtttttgtatttatgatttgtaaatttgttttttattatcgtttttataaggaatttgggttttaataggtcggtatttaggatttttagatcgtcgtttttttttaaagatttttgatcgtgttttcggtgtagtttagtaatttggacgtagtttcggttttttattaaggttaagttcggggttttgtagtatagttttagcgtgtttacgtttttttttttttaggtagtaggtttcgtttttcgtttcgtcgttttttttaggtgagtggtaggttttttcgggagcgtaaggtagtgatgatacgcgttttttttttttcgaacgcgagttggtagcgttcgtgacggagttagtttggtttttttacgcgcgttttttttttcgtcgtcggggcgttttttcggtgttattggtttttacgtgttagtagtttatttcgtattattttttcgtttcgtttttggagggaagtgattatatttttttcgttcgttttttatcgtcgtcgcggcggtaattttgtcgggttcgttcgttgacgttatttgttagtttcgttttttttagggtttcgggtttttgcggcgggggttgtttcggggggtagttagttgaggcggcgggagttcggcggagggcgggttaggtgattggttcgggttatgtcgaggaagaagttatttagcgtgaagtagaagaagaagtagttgtaggataaacgggagcggaagagaggttagtgcgggagcgggaggagggggcggggttcgggttttcgtatatttggaaggaggggtgtgttcgttgtatttttggggatcgtgggagggggtcgtgggatcgcgttaattttcgcggtttatcgcggaggggattttttattttttttatatttggaaggggtggggaaggatggagagttgggggaggggaatttttttagttagtacggggcgtcgtttttattgttttttgaaggagtgattttttttacgtatattcgggagggttttaaatagggtgtttgggaggattgaatatcggaagaagttgagtgggatgaaagggagttaggtcgatgggggagagggttttatggtttttgagagttggttagtattggcgttatcggttttttttcgtagg

SEQ ID NO: 1942 - DNA, 5442 bp, Artificial Sequence
  chemically treated genomic DNA (Homo sapiens)
tttgcggggaggggtcggtgacgttagtgttggttagtttttaggggttataagatttttttttttatcggtttgatttttttttattttatttaatttttttcgatgtttagtttttttagatattttatttgggattttttcggatgtgcgtggggggagttatttttttagggagtagtggggacggcgtttcgtgttagttggagggattttttttttttaattttttatttttttttattttttttagatgtagggggggtgggggatttttttcgcgataggtcgcgagggttgacgcggttttacgatttttttttacgatttttagaggtgtagcgggtatatttttttttttagatgtgcggaagttcgagtttcgtttttttttttcgttttcgtattgatttttttttcgttttcgtttgttttgtaattgtttttttttttgttttacgttgaatggtttttttttcggtatggttcggattagttatttggttcgtttttcgtcgagttttcgtcgttttaattgattgtttttcggggtagttttcgtcgtaggggttcgggattttagaggaggcggggttagtaggtgacgttagcgggcgggttcgatagaattatcgtcgcggcggcgatggaaggcggacgggggagatatagttatttttttttaggagcgaggcgagaggatgatgcggggtgggttattggtacgtgagagttagtggtatcgagagggcgtttcggcggcgaggaaggaggcgcgcgtgggaggattaggttaatttcgttacggacgttattaattcgcgttcggaggagggggggcgcgtgttattattattttgcgttttcgggagaatttattatttatttggagggggcggcggagcggagggcggggtttattatttaggggagagggggcgtggatacgttgaggttatattataaagtttcgggtttgattttagtggaaagtcgagattgcgtttaggttgttggattatatcgggggtacggttagaggtttttaggggagggcggcggtttgagagttttgggtgtcgatttgttgggatttaaattttttgtgggaacgatgataaggagtaggtttatagattataagtgtaaaagcgggcgagaagggaaatttaagcgggataaggatttttggggggaggttaaagggtacgaagttgtgtttgtagttgttattatagtaatcgaggatcggatgtggcgattttacggtgcgatagttttttttttaggttttttggttcgagagtttgttgattttgtgatatattttgaggagttggttgtggtgttttttagcgagggaagaaaagagtaatttttttaaagtatttatagaaacgtagtaaagggaaggtgtgaggttgtcgttatgtttggtagagacggagggaggtagttggtttcggaatgcggtcgtcgtagatgtttttcgtaatttttcggaagtggaatggcgggagttttagtattgttgtttatcgatttttcggaagcggaaatagaattttcgcgtgttttttttttattattttttaaatttcgttgtagttattgtcgtagatacgatgtcgaaacgaaagaagtagaattattattagttatcgatatagtagtagttttcgttgttcgagcgggaagagattggagatgaggaggatgggagttttatcggtgaggggtttgggagggatgtgtatatgtttgttaagttcgttcgggtaaggggttaggggttaataaggtgcgaaggagggggttgtaacggaaggaggaagggcgtacgcgttggggagggatggaagtggggtttttttaaatggagttttgaattaggagtttttttattggaattattaattttaatacggttttagatttttttggagaaggcgggggtggagagaataaagagtttttttgcgtagtcgtagaatagtaggggaaaggggtagtagagatgttgtagattgcgatgattgggatgatagtttgtatttagattttgattgaaaaggtataggtgtagttttttttaaattagttttttggttagtagttaaggtgagggattggtttatgtttggagatatttaggttgttttggatagcgacggtacggtgaagaaaaaaagttgttagtatttttttttgtattattttttttgattgaatatttattttttgtaaattttgaaatagttttgtagaaaaaagggtagatagatggggtgagaatttttaagattgttgaaaatatatttgattttattggttgaattaagaaataagtaatataagaaaaatatttaagaatagaattattagttttttaatttattttgatgattatatttttatgtttgtttttaggattatttagttttttgggttttttttttatggttaatggaaaatttggcgattttaagttaggtgaggaggaaggggttttgatttttgtattaggtcgtagagaagatagtaagggaggggataaaatttaggaaggatttaaaaataaaagattagggattttatttttaaatgaatggagagaagttgtatatttgttgatttaaaaatttaatgttgtaaaaatgttatttttttttaaattgataaatagattttatgtattttaagttagaatatttataatgtttttgtggaaatatatattattatagggaaatgtaaaatattaaggcgattattaagataattttgaagtgggagggtttattatgaatattaagatttgtaagttgggtatggtggtatacgtttgtagttttagttatttaggaggttgaggtgcgaggattttttgagtttaggagtttttgaggttattttgggtaatatagtgagattttgtttttaaatataagaagaaaaaaagatttattataaagttataatagttataacgatgtagtttggaaataatgatagatataagttaataggatttatgtttcgaagagtttaataataggtttatatatgtgtggatattttatttatgatgaagatggaattgaaaagttggtttttttaataaatgatattggattaattggatatttatgtgaaaaaaatggaattttattttgtatttataattatatataaagatttattttaaatggattgtagatttaagtataaaaggtaagagaataattattttagaaagtaaatgtattttttaagagtagttaagagtttttaaatagataagaaatgtacgtatatatattaattataaaggaaagattgataaatggaatttcgttagaaaatataaatttgcggttgggtatagtggtttacgtttgtaattttagtattttgggaggtcgaggcgggcgaattacgaggttagtagtttaagattagtttgattaatatggtgaaatttttgtttttattaaaaatataaaaattagtcgggtatggtggtgtgtgtttgtaattttagttattgaggaggttgagataggagaatcgtttgaatttggaaggcggaggttgtagtgagttgagattgtattattgtattttagtttgggggatagagtgagattgttttaaaaaaaagaaaaaataaaatataaatttgttaaataatattattaagaaattaataggaagttatataatagaagatatttgtaataaatataataaataaagattttgtatttataatatataaagaatttttttagataagttatttgaaaaattgataaaaatataggatattttattaaaatggagatttaaatgaattaaaggtttaaatgaataagtatttaatattattaattgttaagtaaatgtaagataaaaatatattattttgaaattagaatttttgtgtattgttgttgggattataaaatggtgaaattattatagaaaataatatgaagaggttttttttaattaaaaatagaattattagatgataaaaaaattaaaaatagaattattttagaatttttgtttttaggtatatattaaaaaaaaaaaaatggaaagtagggttttgagatatttgtagatttatgtttatagtagtagtatttataataataaagaggtggaagtaatttatatgtttattgatggaaggataaatgtggcgtgtatatataatggaatattatttagttttatgaaggaagaaagtgttgttatatattataatatggatgaattttgaggattttatgttaagtaaagatatagtgtattattttatttatttgaggtgtttaaagttaaatttaggggttgggtatggtgttttacgtttgtaattttagtattttgggaggttaaggtaggtagattatttgaggttaggagttcgagaatagtttggttaatatggtaaaattttgtttttattaaaaatagaaaaattagttgggtatggtggtgtatatttgtaattttagttattcgggtagttgaggtatgagaattgtttgaatttgggaggtagaggttgtagtgagtcgagattacgttattgtattttagtttggatgatagagtaagattgttaaaataaaaaataaaaataaagttaattttaaagaaatagtagaatgatggttattagaggttgggggaaggaagttggaggaaggggagttttgtttaatgggtatagagttttagttttgtaagataaaaaatttttggaggtcgggtatggtggttcgtgtttgtaattttagtattttgggaggttaagtcgggcggattatgagattaggaatttaagattagtttggtcgatatggtaaaattttatttttattaaaaatataaaaattagttaggcgtggtggtgggcgtttgtaattttagttatttgggaggttgaggtaggagaattatttgaatttaggaggtagaggttgtagtgagttaagatcgcgttattgtattttagtttgggcgatagagcgagattttattttaaaaaataaataaaaatttggagatttgttttatattaatatgaatatatgtaatattattgaattgtatatttaaaaatagttaagatggtaaattttatgtgttttttattataataaaaattaaataaaataaggtatgatgatttatgtttgtaattttagtattttaggagattaaggtgggaggattatttgagtttaagagtttaagattagtttgggtagtgtggtaagatttaattttttattaaataaataataataattaaataaaaaaataattattattttttatatttattatggtaaaatttaaaaatttaataattttaagtgttgttaaggttataggataattgttggtgagagtgtaaat

SEQ ID NO: 1943 - DNA, 7921 bp, Artificial Sequence
  chemically treated genomic DNA (Homo sapiens)
gtaagggtgttttagttttggtttaggtcgtttagagagtagtataagtatttagtagtttttagtttttttatgattttaaggtgggtgatttgttgtttgtaaaaaaagaaaaaagacgaaaagggtatagtgaagtttttgtgtggttatttttattagagttttatgtttcgtagttttagttttgcggtttgatttttacgtaggtgatttatataattatagtttggatttttagttgtagatagttttttttttatttttgagacggagttttgtttttttgtttaggttcgagtgtagaggtatgattttagtttattgtaatttttgttttttgggtttaagtgatttttttgttttagttttttaagtagttgggattataggcgtttgttatcgtgtttagttaattttttttatttttttagtagagatggggttttattattttggttaggttggtttcgaatttttgatttcgtgatttatttgttttggttttttaaagtgttggaattataggcgtgagttattgcgttcgtttagatagtttttttataaatatatgttattgtttatttatagaggggatttaagtaggaatattttagggtggagggggaatcgttgtttatattttaatttcgaaaagggttaaagtataggtggtagaagagaaggttatatatagattaaatatgtaatttattgtagtttttaaaataaggtattaattatgtagtagattggtaaggggttgtatcgagtttataaaatttttttgatggttttttagtaataggggaaagaagtgtgtttttacgtttattttttggtaaggtgttgttttaagttgagggtttttatatgtaaaattaaagtattttaggaagttttattattttttttattattaagtaaattaaattatatttggtttaagtagagttttgtttattttatgatataataaagttagtttaggaaaaggtttttattatagggttgtgttttgtttttatttatttgtttagtgtattttaggatgtgatttgatattaagtagtatggaaataataattggaaattttgttaggaatatgagatatatgttgtagttaattttttttattttttaggttagtttttggtttgatttttttgttttgttttttgttttaagatagggttttgttttgttgtttaggttggagtgtagtggtataattatggtatattgtagttttaattttttggatttaagtggtttttttattttagttttttgagtaggtgggattatagatatgtattattaagtttggttaatttgttttattggttaggtatagtggtttatttttgtaattttagtattttgggaggtcgaggtgggtggattatttaaggttaagagttggagattagtttggttaatatggtgaaattttatttttattaaaaatataaaaaattagttgggtgtggtggtaggtatttgtaattttagttatttggaaggttgaggtaggagaatcgtttgaattcgggaggcggacgttgtaatgagttgagattattgtattttagtttgggtaataagtgcgaaatttcgttttaaaaaaaaaattttgttttattttattttattttttttgtagtgattgggtttttttatattgtttaggttggtttcgaatttttgggtttaagtgatttttttgttttagttttttaaagtgttgggattataggtatgagttaatgtgtttggtttggtttggtttttaatagataattatagatttttaaaaatagttataaaaaagtagaaggaataaatttattatttttgagttttagtgtttttttatttttttttgttttttgtagatataatatatttatagttaattaatattgatattgatatttttttgttgagttttgattttataggtaagttttaaaatttgtttagtaattatttttttagaaaaatgttataaatataaatttgtatataaatgtaaagtatttataggtattttttttaggttttaatgtatagtatttaaggttggaagtttagtttttgaaaattagtaggagatttgaaagagtagggatatatggattttagaatttatttttatttgtaatttttatttattttggtaaataggaggttgttattttttgttttatttagcgtttgttagttttaaattattttttaattaaagtgtttttgttttagaagttttaaatgtgttttggtatttatagagttttagttatgagatgtatatgaaaataatttgtgttttatttttataaagtttttattgaatgtttattttatttatgtttattatataaagtttttttataaattattattgtttagtttaaaagggaatttttgtttttatagatagattattgttttttttaaaaataaaatttggttgggcgttgtggttatatttgtaattttagtattttgggaagttgaggtgggtggattatttaaggttaggagttcgagattagtttgattaagatggtgaaatttcgtttttattaaaaatataaaattagttaagtatggtggtttatgtttgtgattttagttatttgggaggttgaggtaggagaattttttgaattcgggaggcggaggttgtagtgagttgagatgacgttattgtattttagtttgggtaataagtgtaaaattttgttttaaataaataagaatttgtttaatatgtttttttagttttagttgttataaagatagatatattgtttaatttttgtaatttgtttatttaaattatttatgagtagttttgtttttgattttttttaggtaattttttcgtatgttgttttttttgaattttaatgttttgaattagtttatatagtatttaagaagttagttttatttttttgaaggttttgtttcggaggaaatagtttatgggattgaggtttttattagttagattattggtttttgtttattgtattgtttgttttaggtgttatagaaagtggatatgtttaatgcgtgttgattatgtaaattattgggttgttttttttaatatttgggtgattttgattttatgattattttttaatttttggtgtttgtatttaattaattgtgttaagggtggtatttgttttttatatatagattgggagttatgtagatggatattggttgttttattttataaatagtgtttttaggtttggtttgataggattgatttttagtattagaatagaatatttattttttaatttttattattattttaaaatttttattttttaaagagatagagtgttgttatgttgtttaggttggttttaaatttttgggtttaagtgatttttttgttttggtttttttttaaagtgttgggattatagggatgagttattatatttagtttgaatatttattttttatttatgaagaaataattatttttgggtagttagtaatattgtttatgatgtatttagcgagagattttaaatatgtatttatgtaagtatatatttaaaattttaatatatattaatatgtgtatttatatttatatatatatgtatgtgtgtatatgtatatttgtatatatagatataaaaattttatttttgtgggatatttttatttataaaatttgaggtttgatattaaaagaaagtgtttttggttgggtgtagtggtttatatttgtaattttagtattttgggaggttaaggttggtagattatttgaggttgggagtttaagattagtttgattaatatggagaaatttcgtttttattaaaaatatagaattagtcgggtttggttgcgtatgtttataattttagttattcgggaggttgaggtaggagaatcgtttgaatttgggaggtaggggttatagtgaattgagatcgcgttattgtattttagtttggtaatagagcgaaatttcgttttaaaaaaataaaaagaaagtgtttttaatttaattattaattttaaattatttgtttatgtatatgtatataaaaattattttttgttttttttagggattttgatttagaatgtggttatgttttggttaaatgtttttatatgtgtttagttatggtgtttttattttttttttgtgtattagtttttagttgaggataaaattaggattattgtatagaagatttatggagtagatgatattgaattatttttcgaagtttaatataaagttgaagtttatacgaagtaggtagatgtttggttagtttgtttttttaattttttgtaaagtaggatttggagttataatttttgggtttttttagttttgttaagtattcgttgttttatttttttgggtggtagtttttttttttttgaaatattgagtttggattaggtggtatagtttttggttttttatttatttataggcgttatatgaatgtgtagaaatttatgaggaaatatagaatgttttattaaaatattgagaacgtttttagtttttgttattttgagatagggtttggttttattgtttaggttagagtgtagtggtataattttagtttattgtagtttttgatttttaggtttaagcgatttttttattttagttttttgagtagttgcgtttataggtacgtattattatatttggttaatttttgtgttttttgttgagatggggttttgttttgttgtttaggttggttttgaatttttgggtttaagtagtttatttattttagttttttaaagtgttggaatttataggtatgaattattgtatttgattttttttaattttatttttatatttattttaaattattattttaaattagttttatgttatttttatagatggaaataaaatatttatttgtggattatagttgtgagtatttaatttttttatttaatagttttttttttttttttttggtttaataaataagttggaggatagtaagatagagatgtatataaagggagttggatgtttcgaataaattgaagaatttatgtaattatagggtttagatggttattgttgggttgttatttttttatttgttttttttttttttttttttttttttagggttttgggaatttttttatttgtatggttaaaatatatttgtttttgttttataatttagagtaaaaaggtgtttttataggttttattttgtttattcgcgatattcgcgttagcgttggggttggttttttgtattttttagtaggaacggtaagtgtatgttgtaagggagtagtgggcgtatttgtatttttcgtttgaagtgtgttgtcgaaattattaagtaaatgttaagtgagtagagtttattgtttagaagaaaattggaatcgggtttattatgattgttgtggattataagttataaagtaggagttatatagtttttgttgtggattattttggtgttaaattaagaatgatgttaggattatttatattgaataaaaaattttgttttttagggatagtatgttttttattgaatttaggatgagtttagttgataggttggggtagtgttaatataattatagttaatgtttattgggagttttatatagattaatttagtttttttatagttttaggaggtagggatagaggttttattgataggtttagaatttacgtttgaaatttagggggtttattatttttaagtaaggaatttttttattaaaaaatgtaaatggatttttgagatatgaaaggtgaggttgtttatttacgttttaaggtgaataaggtgtttattgtttttttattttatagattttatgtatatttaaagaagaatattgttagttgggaagtagaggggagggatgtttaaggatataattatagtttgggttgatattgttttaaggttaatttggattttgaatttaggttattttttaaatttgttttgtattttgtatttatagattgtattgttatgtaatataggattgaaatattaaattaaattaatatatatggaaaagaaattaatatatatttttttggatttatgttatttttttagtatagtaagaaagtggtaggaggtggtattatagagttgaaaacgtaggatattagagttgaatttatttttatttttttagattttggttttgggtaaattatgaaaggtgagagttttgttgtttttagtttatattgtaggtaatattattatattatagtggtgtttagtataaatgtttgtattttattgtttttttagttttttatagagagtagaaggtttagatttgttatgatgtatattagtttttaggatttgtagaaattttttgtggtaggaattttttattatttttatttagtattttgaatagtgtagaaatatgtgttgttttttttggagaagttgttagtagttattagttgaaagacgggtagttgtatttttttttgttatttttgatttttatatgaagaaaagggtaatagtagaggtgaaagtaaatttggaagtagttaggttagtgagagttaggttgtaaggtggagagagatatagtttgtcgaatttaagatttttttatttagaataaagtatgtgttagaggtttttaattttaagttggattaaggcgtttttatatatgattaaatggtttaattattattttaatattttttagttgtcgttggggttttaacgagatttagattatttgaatattttttatattaatttaaagtgtgatggtttatttttagaattttatatttaggtttatatatgtgcgtatatataatattgtttttttttgtattttttttgattattagtgattagtgtttaggagggaaaatttttttggggaatgagtgaaaatattaaaaattttatttattattgtttagggaattatttttagggttttttgttgatatgtatatgttcgtttataataatgggtatgtgttttttatttttataatgttatttttcggtttttttgttgtgtttaaggatttattttttttttttttttatttgttttatatttagtatttttttattttttatataatataagaatataaattagttgttagatttttataatgtgttttggggaatattgattggtatttagaagttagttagaatgaggttttttaaagtattgatgatgttttgtgttatagaagatgattttttttaaataatttttttatagttaagttttagaagtaatttaagttgtttttttgtttagatttgatttggaatttgtgtgtatttattatataggatattgttatagataaaaatatacggagtttttatttgtaagtcgtatatatttgtatttaagtagaaatttgttaaagtcgagtttttagaaaagtagtgagtataaatataatttgtaagtattataagtttagttttagaaggttattttgggttagtaagaatggtgattataaaattatttagattatgtataaaagtgttttggtttaagttaaaggatattaatttttattatcgtgttgttgaagtaaaaattatatgggtagtttagttagtaagattgaacgaaataaaatttaaaagtaggtaagttttgtatttttttttggttttgtaaagcgtgagttgaggaggcgagtgagtaatttttttattttttagtatttatttttgtaaggtgaaggtggaaatattttttgttattgtttgtgattatatggaagatgatagtgaaggttggtatttggtttgtagaaggatatgaggaattagtttttttttttttttt

SEQ ID NO: 1944 - DNA, 7921 bp, Artificial Sequence
  chemically treated genomic DNA (Homo sapiens)
aggaaaagaaaagaaattgattttttatgtttttttgtaaattaaatgttagtttttattattattttttatgtggttataagtagtagtaggaggtgtttttatttttattttataagaatgagtgttggggagtagaggagttgtttattcgtttttttagtttacgttttgtaagattaaaaggaggtatagggtttgtttgtttttaaattttgtttcgtttagttttgttagttgagttgtttatgtgatttttgttttagtaatacgatggtaggagttagtattttttaatttgggttaagatatttttgtatataatttagatggttttataattattatttttattggtttaaaatggttttttaaaattaaatttgtaatgtttataaattatatttgtatttattatttttttaaagattcggttttgataaatttttatttagatgtaaatatgtacggtttgtaagtgaaaatttcgtatatttttatttgtaataatgttttatataatgaatatatataagttttaaattaaatttagataggaaaatagtttaggttatttttaaaatttaattataaaaaggttatttaaaaagagttattttttgtaatataaaatattattaatattttagaaaattttattttgattgatttttgagtattaattaatattttttaaaatatattatagggatttgataattggtttatatttttatattgtgtaagaggtaaggaggtgttaggtgtgagataagtaggagagaggaaaggatgggtttttagatatagtagaaaaatcggaagatgatattataaagataaaagatatatgtttattgttgtagacgggtatgtgtatgttagtagaaaattttaaagatggttttttaaatagtgatgagtaggatttttgatatttttatttattttttaagaggatttttttttttaaatattggttattgataattagaaaaaatataaaaaaagataatattatgtgtacgtatatgtatgaatttagatataaagttttgaaaataagttattatattttgaattaatatagaaaatatttaaataatttgagtttcgttaaggttttaacggtaattggaaggtgttagaatagtgattaaattatttgattatgtgtggaaacgttttggtttaatttaaagttaaaagtttttgatatatattttgttttaaatgagaaagttttgagttcggtaggttgtgtttttttttattttatagtttgatttttattggtttgattgtttttagatttgtttttatttttattgttatttttttttttatgtgaagattaaaagtgataagaaagagtatagttattcgttttttagttggtagttgttgataatttttttaaaaagaataatatatatttttgtattatttaaggtgttgggtaaaaatggtggaaaatttttattataagggatttttataaattttggagattgatgtatattatagtaagtttaagttttttgttttttatagagagttaaggaggtagtgagatgtaggtatttgtgttaagtattattgtgatgtgatgatgttgtttatagtgtgagttgagggtagtagggtttttattttttataatttgtttaaggttaagatttgaagaggtgaaaatgaatttagttttaatgttttacgtttttaattttataatgttattttttattatttttttattatattgaaagaatgatataaatttaaaaggatgtatgttggttttttttttatgtgtgttgatttagtttaatattttagttttgtattgtatggtagtataatttgtagatataggatatagggtagatttaggggataatttagatttaggatttaagttaattttggaataatgttagtttaaattatgattatgtttttaagtattttttttttttgttttttaattggtaatatttttttttgaatatgtataaaatttgtaagataagaaagtaatggatattttgtttattttgaagcgtaaataagtaattttattttttatattttaagggtttatttgtattttttaatggggaaattttttatttaaaaataatgaattttttgaattttagacgtaagttttaggtttgttagtaaaatttttgtttttattttttagggttgtggggggattgagttaatttatgtaaggtttttaataaatattaattgtgattatgttagtattattttagtttattaattgggtttattttagatttagtgaagagtatattgtttttgggaaatagaattttttatttagtatgagtagttttggtattatttttgatttgatattaagatggtttatagtaagagttatatagtttttgttttatagtttatgatttatagtaattataataggttcgattttaatttttttttgggtagtgaattttgtttatttggtatttgtttgatggtttcggtaatatattttagacgagaagtgtagatgcgtttattatttttttgtagtatgtatttatcgtttttattaaggggtatagaaaattagttttaacgttggcgcggatgtcgcgaatgggtagaatgaagtttgtagggatatttttttgttttgggttgtgagataaagataagtgtgttttagttatgtagatggggagatttttaaagttttggggaaagaagggaagagagggaggataaatgaaaagatgataatttagtaatgattatttgggttttgtgattatatggattttttaatttattcgaaatatttaattttttttatatatatttttattttgttgttttttagtttatttattaagttaaaaaaaaaaaaaaagaattgttgggtgagggagttaggtatttataattgtagtttataagtgaatattttatttttatttatggaaataatataaaattaatttaaaataatagtttggagtagatatgagaataaaattggagagggttaggtgtagtggtttatgtttataaattttagtattttgggagattgagatgggtggattgtttgagtttaggagtttaagattagtttgggtaatagggtaaaattttattttaataaaaaatataaaaattagttaggtgtggtggtgcgtgtttgtaggcgtagttatttaggaggttgaggtgggaggatcgtttgagtttaggagttagaggttgtagtgagttgaaattgtgttattgtattttagtttgggtaatggagttagattttattttaaaataataaaaattggagacgtttttaatattttggtaagatattttgtatttttttatggatttttatatatttatataacgtttatgggtaaataaagaattagggattgtgttatttaatttaaatttagtattttagaggagagaaggttgttatttagagaagtgaagtaacgggtatttggtagggttgggaggatttagagattgtgattttaagttttgttttgtaaagagttgaaaggataaattaattaaatatttatttgtttcgtgtagattttagttttgtgttgagtttcgggaagtaatttaatgttatttgttttatagattttttgtgtaatgattttgattttatttttaattgggagttaatgtataagaaagagatggggatattatgattggatatatgtgaggatatttaattaggatatagttatattttaggttagagtttttaaaaggggtagaagatggtttttatatatatatatataagtaaatagtttgaggttgatgattgggttaagaatattttttttttgtttttttgagacggagtttcgttttgttgttaggttggagtgtaatggcgcgattttagtttattgtaatttttgttttttaggtttaagcgatttttttgttttagtttttcgagtagttgggattataggtatgcgtaattaagttcggttaattttgtatttttagtagagacggagtttttttatgttggttaggttggttttgaatttttaattttaggtgatttgttagttttggttttttaaagtgttgggattataggtgtgagttattgtatttagttaggaatatttttttttaatattaagttttagattttataagtgaaaatgttttatagaggtaaagtttttatatttatatatgtagatatatatatatatatatatatatatatatagatatagatatatatattaatatatattaaggttttaaatatatatttatataagtatatatttaaaatttttcgttaagtatattataaatagtgttgttgattatttaagaataattatttttttataaataaaaagtagatgtttaggttgggtatggtggtttatttttgtaattttagtattttgggaggaggttaaggtaggaggattatttgagtttaggagtttgaaattagtttgggtaatatagtaatattttgtttttttaaaaaataaaaattttaaaataataataaaaattaaaaagtagatgttttattttaatattggagattagttttgttaaattagatttggggatattgtttatgaaataagataattaatgtttatttatataatttttagtttgtatatgagaggtagatgttatttttaatataattgattaagtgtaagtattaggaattaggaaatagttataaaattaaaattatttaggtattagaaaaaataatttagtgatttatatgattaatacgtattgggtatgtttattttttgtggtatttgaagtaaatagtgtagtggatagagattagtggtttaattggtgagggttttagttttatgggttgtttttttcggggtaaagtttttagagaagtggagttggttttttaaatgttgtgtagattagtttagggtattaagatttaaagagaatagtatacggagaggttgtttaaaggaaattagaagtaaagttatttatgggtaatttggatgagtaaattataaaaattaggtaatatatttgtttttatagtaattaaagttaaaagaatatattaggtaggtttttatttatttgagatagagttttgtatttgttgtttaggttggagtgtaatggcgttattttagtttattgtaattttcgtttttcgggtttaagagatttttttgttttagttttttaagtagttgggattataggtatgggttattatgtttggttaattttatatttttagtagagacggagttttattattttggttaggttggtttcgaatttttgattttaggtgatttatttattttagttttttaaagtgttgggattataggtgtgattatagcgtttagttaagttttgtttttaaaaggagtaataatttatttataaaaataaaaatttttttttgaattaaataatgataatttatgaaggggttttatataatgggtatgaataaagtgaatatttaataaggattttataaagatgaaatatagattatttttatatgtattttataattggagttttataaatgttaaggtatatttagaatttttgaagtaaaagtattttggttgaagggtgatttaagattagtagacgttgagtaagataaaaagtggtagttttttgtttgttagaatggataaaagttgtaagtagaaatgggttttaaagtttatatgtttttgtttttttaggttttttgttggtttttaaggattgggtttttagttttgggtgttatgtattggagtttggagagggtgtttataaatgttttgtatttgtgtgtaaatttgtgtttatggtatttttttaaaaggatgattgttgaatagattttaaaatttgtttataaaattaaagtttaataggagaatgttaatgttaatgttaattaattgtaagtgtattatatttgtaaggggtaaagagaaataagagaatattaaaatttaagagtaataagtttattttttttgtttttttatggttgtttttgaaagtttatgattatttattaaaaattaagttaggttaggtatattggtttatgtttataattttagtattttgggaggttgaggtaggaggattatttgaatttaggagttcgagattagtttgagtaatatagggagatttagttattataagaaaaataaaataaaataaaataaaattttttttttgagacgaagtttcgtatttgttgtttaggttagagtgtagtgattttagtttattgtaacgttcgtttttcgggtttaagcgatttttttgttttagttttttaagtagttgggattataggtgtttgttattatatttagttaattttttgtatttttagtagagatggggttttattatgttggttaggttggtttttaatttttgattttaggtgatttatttatttcggttttttaaagtgttggggttataggggtgagttattgtgtttggttaataaaataaattagttaggtttggtagtatatgtttgtggttttatttatttagggggttgaggtgggaggattatttgggtttaggaggttgaggttgtagtgtgttatgattgtattattgtattttagtttgagtaatagagtaagattttgttttaaaataaaaaataaaataaaaaaattaagttagaaattagtttagagaataggaaaaattaattatagtatatattttatatttttaataaagtttttagttgttgtttttatattatttaatgttaaattatattttgaaatatattggatagataaatgaaaataaaatataattttataataagaatttttttttgaattaattttattgtattatagagtaagtagggttttatttagattaggtgtaatttaatttgtttagtgatggaaaaaatgatgaagttttttggagtattttggttttgtatgtgagggtttttaatttgaggtagtattttattaggaagtgaacgtgggggtatattttttttttttattattgaaaagttattagaaaaattttgtaagttcgatgtagttttttattaatttgttatatggttggtgttttgttttaaaggttatagtgaattatatatttggtttatatgtaatttttttttttgttatttgtattttgatttttttcgaagttaggatatgagtaacggttttttttttattttggggtatttttgtttaaattttttttgtaagtaagtagtggtatatgtttataagaaggttgtttgggcggacgtagtggtttacgtttgtaattttagtattttgggaggttaaggtaggtggattacgaggttaggagttcgagattagtttggttaagatggtgaaattttatttttattaaaaaaataagaaaaattagttgggtacggtggtagacgtttgtaattttagttatttgggaagttgaggtaggagaattatttgaatttaggaggtagaggttgtagtgagttgagattatgtttttgtattcgagtttgggtaaaagagtaagatttcgttttaaaaataaaaagaaggttgtttatagttgggagtttaggttgtggttgtgtaagttatttacgtgggaattaaatcgtaaggttgaagttgcgaagtatggggttttaatagaagtagttatatagaaattttattgtgtttttttcgttttttttttttttttgtagatagtaaattatttattttgaggttataaaggagttggaagttgttgggtgtttgtgttgttttttggacggtttgagttagggttaaggtatttttgt

SEQ ID NO: 1945 - DNA, 7771 bp, Artificial Sequence
  chemically treated genomic DNA (Homo sapiens)
ttagtaaatttttatttttgtgtaagggtttagttttattgtttttttgttaattagtagtaaattttttttattttatagcgtttcggaattttgtagatatttaagttattgtattttatggttatatgtttatttgttttgtataattgttaaatttttagatagaaattatatttttttgtttttttttttatattttatattatggtatggtttagtgaaaagttttataatttaaggttattgtattttatggttatatgtttatttgttttgtataattgtgaaatttttagatagaaattatttttttttgtttttttttttatattttatattatagtatggtttagtgaaaagttttataatttaaggtttggtaaatttaattaaattgatggggttgaattaaattgaaagagtgtatttaatttttttttttatgagtttgtattttttaagtaatttttatgaaagaaaagatgatttatttaaagaatttaaattaatagaatatatattttttttagtattatattatatttattttaaaattgattatatatttggaagtaaagttttttttagtaaatgtaaaagaatagaaattataataaattattttttagattatagtgtaattaaattagaatttaggattaagaattttatttaaatcgtttaattatatggaaattgaataatttgtttttgaatgattattgggtatataatgaaatgaaggtagaaataaagatgttttttgaaattaatgagaataaagatataatatattagaatttttaggacgtatttaaagtagtgtgtagagggaaatttatagtattaaatgtttataaaagaaagtaggaaagatttaaaattgatattttaacgttataattaaaagaattagaaaagtaagagtaaatatatttaaaagttagtagaaggtaaaaaataattaaaattagagtagaattgaaggaaatagagatataaaaaattttttaaaaaattaatgaatttaggagttggttttttgaaaggattaataaaattgatagatcgttagtaagattaataaagaagaaaagagagaagaattaaatagacgtaataaaaaatgataaaggggatattattaacgattttatagaaatataaattattattagagaatattataaatatttttatgtaaataaattagaaaatttagaagaaatggataaattttttgatatatatatttttttaagattaaattaggaagaagttgaatttttgaatagattaataataggatttgaaattgtggtaataattaatagtttattaattaaaaagagtttaggattagatggatttatagtcgaattttattagaggtataaggaggaattggtattattttttttgaaattattttaattaatagaaaaagaaggaattttttttaattttttttatgaggttagtattattttgatattaaagtttggtagagatataattaaaaaagagaattttagattaatatttttgatgaatattgatgtaaaaatttttaataaaatattggtaaattaaatttagtagtatattaaaaagtttatttattatgattaagtcgattttatttttgggatgtaaggttggtttaatatacgtaaattaataaatgtaatttagtatataaatagagttaaagataaaaattatatgattattttaatagatgtagaaaaggtttttgataaaatttaataattttttatgttaaaaatttttaataaattaggtattgatgggatatattttaaaataataagagttatttatgataaatttatagttaatattatattgaatgggtaaaaattggaagtattttttttgaaaattggtataagatagggatgtttttttttattatttttatttaatatagtgttggaagttttggttagggtaattaggtaggagaaggaaataaagggtatttaattaggaaaagaggaagttaaattgtttttgtttgtagatgatatgattgtatatttagaaaattttattgttttagtttaaaatttttttaagttgataagtaattttagtaaagttttaggatataaaattaatgtgtaaaaattataagtatttttatatattaataatagataaatagagagttaaattatgagtgaatttttatttataattgttttaaagagaataaaatatttaggaatttaatttataagggatgtgaaggatttttttaaggagaattataaatcgttgtttaaggaaataaaagaggatataaataaatggaagaatattttatgtttatggtaggaagaattaatatcgtgaaaatagttatattgtttaaggtaatttatagatttaatgttatttttattaagttattaatgtttttttttatagaattggaaaaaattatttttaagtttatatggaattaaaaaagagttcgtattattaaggtaattttaagttaaaagaataaagttggaggtattatattatttgattttaaattatattataaggttatagtaattaaaatagtatggtattggtattaaaatagagatatagattaatggaatagaatagagtttttagaaataacgttatatatttataattatttgatttttgataaatttgagaaaaataagtaatggggaaaggattttttatttaataaatggtgttgggaaaattggttagttatatgtagaaagttgaaattggattttttttttatattttatataaaaattaatttaagatggattaaagatttaaacgttagatttaaaattataaaaattttagaagaaaatttaggtattattatttaggatataggtatgggtaaggattttatgtttaaaatattaaaagtaaggtaataaaagataaaattgataaatgggatttaattaaattaaagagtttttgtatagtaaaagaaattattattagagtgaataggtaatttataaaatgggagaaaattttcgtaatttatttatttgataaagggttaatatttagaatttataatgaatttaaataaatttataagaaaaaaataaataattttattaaaaagtgggtaaaggatttgaatagattttttttaaaagaagatatttatgtagttaaaaaatatatgaaaaaatgtttattattattggttattagagaaatgtaaattaaaattattatgagatattattttatattagttagaatggtaattattaaaaagttaggaaataataggtgttggagaggatgtggagaaataggaatatttttacgttgttggtgggattgtaaattagtttaattattgtggaagttagtgtggtaattttttagggatttagaattagaaatattatttgatttagtaattttattattgggtatatatttaaaggattataaattatgttgttataaagatatatgtatacgtatgtttattgcggtattatttataatagtaaagatttggaattaatttaaatgtttaataatgatagattggattaagaaaatgtggtatatatatattatggaatattatgtagttataaaaaatgatgagtttatgttttttgtggggatatgtatgaaattggaaattattatttttagtaaattattataagaataaaaaattaaatattatatatttttatttataggtgggaattgaataatgagattatatggatataggaaggggaatattatattttggggattgttgtggggtggggggagtggggagggatagtattgggagatatatttaatgttagatgatgagttagtgggtgtagtatattagtatggtatatgtatacgtatgtaattaatttgtataatgtgtatatgtattttaaaatttaaagtataataataaaaaaaattaagagaaaaaaagaaaaaaaatgatatttattaatttttgattttttaagtagatttcgtaattggaggaagaataaaatgattagattaggagaatatgtaaattattaagttagatttttttttgtaaattaaaaaattagtattttagtttattaatttattttttgtggtgttggttttatgaattattttaaaaataatggattatttttgttagttttagttattttgttatttttataggaaaaaaattaaatatgaaaatgaatagaaaagatatatatagaagtttaagaaaaaaatgagttgattttatatgtacgataggaagggttatataaatggataatatatagagatttaatttataaaataaaatataaaatttgttttttagtggtatgatttttaaaagttttaatttttatatttagtattatgttttagtaattatattttataaagtttgatcgatttaattatattaattttaatttatgagttaatgaagtatattttaggaggaaatattaaatgatattaaaatattgatggtttatttgttttttttttttattatttagtttttttttttttttttagttaaattaatgtaaaattatatttaatgatagtaagtttttttttttttcgatatagtgaaaatttgtataattatgaaatttttaaaaggttaaagtttttgttatttattttaatttaaatttagtatattattatatatattcggagtttaaattatttatttttatttaaatttttaattaaattttataatgtaaattttttggttttagaattacgttttttgtttatttaattgagtttgtgttttgaaaaagtgttgaagtttgggggttttttggtgagaatttacgttttgatattattttggtcgtgatagtgattggttgttggaaggtaaagaagagtttatagttagtaagagtaagtgaatgagtgagtgagagggtagaggaaatatttaatttgtgttatttattgttttgagtttgtttttttattttaggattgttagagggtaagatttaatagaataattttattattataaaattagatattttatagtttatatttttgaatttggttttgaattttttatttaaatgatgttattgtattgtatatggtttaataattatttattattaaattggtattttagattttaaattttttttaaaaggttaaatttattaatttaagtatgtaaataagtttttaatattatgtatataaattatattatgttttttatttttattttttgtaaattatagtttaattgtttgtttttttattttgatgtatttaagataatttgattgaaatattattttgtatttgtaaatttggttagatatatgtatatttttttataaattatatttagtttgtattttaagtatatatgttgtttttttaatatattaaatattaggttttgatgttttttatagttttaaagttagaatagaaaatatattgtattaattagagaaataaatatttttggtagtttattatattttttttaataaaatttgaaattaaatttttaaaatttttttttaagaatgtttgaattgttgtttgggttagtagtggttattatagaggttttggttttttgttgatttataaagtaaataaaattagatttatataggtagttaattttgattataagaattatttggttttttgtattgttattattattatttatgttatttttttatttggttatttttattgttatgagaaatttgtgtaattaaaattatttttataattttatgtatttaagtttttagttttttaaaatattataaatatttcgattttttttataaagtggtaaagtaataatttttttgttttgttgatgggtttggttacggttggtaaagtttaaagtattatttagattatttcgatagaaattagtgttgtttaaaaagatgggtttttttaggagtaaagtttgtttatttttaaggggttattaagattttttattaagataggattgtgagaaattgtttgggtattaaaatttaaagatttattttgatatataaaaagagtgtgatttaggatttaagatagtatttttaggatttagtgttagatatttagtaaggatgtaataaattttggttgatgatgatataatatataatttattagtaggttttaatatatgatattggtttgtatattttaagtattatttttaaaatgtatttatgggaaattgttattattattatattttgtttttaaaatattgttaaagttgtgattgtgtatgagaaggtgttaatagttaaatgtgtatgtaaatgtaaatggttgagtgttagtaggtttttagttaagtttgtttaatttttattatgatataattttaaatataattttattaaatagaataaaattaagataggatagtattttattatttttttttatttatgaggaatttatgtggaattgaggttttttttatggttgtaatttttaagattatttaggttttatttttattttgagagttgtattttcgattgttttatagaattgaaatttttatttatgtttgttattttaattttggagagtttttaatttattttagtatagttttatatattagtagatggaaagtttaaatggagttggagagtaaattaatttgaggaaatttgttttcgatattttaaggcgaaattttgaagaattttttatggaagtatttttagcggagttgttgttgcgtgttatatgatgttagtgtgatattttatatattatggattttttttgtttttttgtttttgttttttatttatttatttatatatatatatatatatatatatatatatatatacgtatatatatatatatatatattaattattttaagatgtttagaggaaaattgtttttattttttattttataaataaatttttagtttaaaatttatatagaagttggaaatcgtttatagggtattagtgatttttgtttttttgttttatttttgagataggattttattttgttgtttagggtggagtatagtggtatgaatacggtttattgtaattttggttttttaggtttagtttttcgagtaattaggtttattggtgtgtattattatgttaagttaatttttgtattgtttgtagaggataagttttattatgttgtttaggtttattttaaatttttggatttaagcgatttgtttattttggttttttaaagtattggttttagaggtatgagttattatatttggtcgagtttttaattgtaaataaataaatagggtatataattatattaataatttaatttatttagttgatattttatgttaatattaagagggttattacgttagtgtgaagtattttaagtagttaaaattttttgtagtaatgaaaaggttttttattgagaaattataaaaaataggttaaaattaagtatggaatttaagattatttaaacggatgggttaagttagttttatattatttaaatggaaggaataatttgaaaataaaaggaataatttagttttaattagttaaagtgataattatatagaaatgaaaataaattaaatattttatttttgaatatgagtaaaaaagttatgtttttagttttaatattttattaattttattattttattaattttaga

SEQ ID NO: 1946 - DNA, 7771 bp, Artificial Sequence
  chemically treated genomic DNA (Homo sapiens)
tttggaattaatgaagtggtaaggttaataaaatattaaaattaagagtataatttttttatttatatttaaagatgaagtatttaatttgtttttatttttgtgtaattattattttgattaattaaaattaaattattttttttatttttaaattattttttttatttaagtaatataagattgatttaatttattcgtttaaataattttgagttttatatttggttttaatttattttttgtgattttttaatggaagatttttttattattgtaagagattttgattatttagggtattttatattggcgtaatggtttttttaatattgatatggagtgttagttaagtgaattgaattgttagtgtagttgtgtgttttgtttgtttgtttataattaaaaattcgattaggtatggtggtttatgtttttaaaattagtattttgggaggttaaggtgggtagatcgtttgagtttaagagtttgagatgagtttgggtaatatggtgaaatttgttttttataaatagtgtagaaattagtttggtatggtggtgtatattagtaggtttagttattcgagaggttgagtttgggaggttaaggttgtagtgagtcgtgtttatattattgtattttattttgggtaatagagtgagattttgttttaaaaataaaataaaaaagtaaaaattattgatattttataggcggtttttagtttttatataggttttgggttaaaaatttatttgtaaaatggaaagtaggagtaatttttttttgaatattttggaataattggtgtgtgtgtgtgtgtatatgcgtgtgtgtgtgtgtgtgtgtgtgtgtgtgtgtgtatgggtgggtggatgagagatagagatagagagatagagaggatttataatatatgaaatattatattgatattatgtagtacgtaatagtaatttcgttaaggatgtttttatgaggagttttttagagtttcgttttgagatatcgggggtagatttttttaaattaatttgttttttagttttatttaagttttttatttgttagtgtatgagattgtattgggatggattaggggttttttagggttagggtgatagatatggatgaaaattttaattttatggaataatcgaagatgtagtttttaaagtgggaatagggtttgaataattttggggattgtagttataaaaagagttttagttttatataaattttttatgagtaaaaggagatagtgaaatgttattttattttaattttattttatttaataaaattgtatttaaaattatattataatagaagttgggtaagtttagttgaaagtttattaatatttagttatttatatttatatatatatttaattgttagtatttttttatatatagttatagttttggtaatattttggaagtaaaatgtagtggtgatggtaattttttatgaatatattttgaaaataatatttaaaatgtgtaaattaatgttatatattgaaatttgttggtaaattgtgtattgtgttattattagttaagatttattgtatttttattgagtatttgatattaagttttggagatattgttttgggttttaagttatattttttttgtgtgttagagtgagtttttgggttttggtgtttagatagttttttatagttttattttagtaaaaggttttgatggttttttgggaataaataggttttgtttttgaaggagtttatttttttaagtagtattgatttttatcggggtggtttaaataatgttttgaattttgttagtcgtgattaagtttattagtaaaatagaaagattattgttttgttattttgtgagaagggtcggaatatttataatattttaaagagttaaaagtttagatatatagaattatagaaatagttttgattatataaattttttataataataaaaataattagatgaaaagatggtataaataataataataataatataaagaattaagtagtttttgtagttaggattggttgtttatataaatttaattttatttattttgtgagttaataaaaagttaagatttttatagtgattattattaatttagataataatttaaatatttttaaaggagaattttgaggatttaattttaagttttattgggaagggtatgataaattattaagagtatttatttttttagttagtataatatattttttgttttgattttagagttataggaaatattaaaatttaatgtttaatatgttgaaaagataatatatgtatttgaagtatagattaggtataatttgtagagaaatatgtatatatttagttagatttgtaaatgtaaaatagtattttaattaggttattttgaatgtattagaatgagaaaataaatagttaagttatgatttgtagagaatgaaagtaagaagtataatgtagtttatgtgtatagtattaagaatttatttatatgtttaggttaataagtttagttttttggaaagaatttaaaatttgaagtgttagtttaatgataaataattattaaattatgtataatgtaataatattatttaaatgaaaaatttaaagttaagtttagagatgtaaattatggagtgtttaattttatgataatgaagttgttttattaaattttattttttggtagttttggagtgaggaagtaggtttaaggtagtgagtggtatagattgagtattttttttgtttttttatttatttatttatttgtttttgttggttataaatttttttttgttttttaatagttaattattgttacgattaaggtgatgttagaacgtggatttttattagaaaatttttaaattttaatatttttttaagatataggtttagttgaataaataagaaacgtgattttagagttaagaggtttgtattgtggaatttaattgaaggtttagatgaagatgaatagtttgggtttcgaatatgtataataatatattggatttgaattaaaataaataataaaggttttaattttttaaaaattttataattatataagtttttattatgtcgaaagaaaggaaagtttgttgttattagatataattttatattagtttagttaaaaaaagaaagaaaaattaaataataagggaaaggagtagatgaattattaatattttaatattatttgatgtttttttttgaaatatattttattgatttataaattaaagttgatatgattaagtcggttagattttgtaagatatagttgttaaaatatgatgttgagtataaaagttagaatttttgagaattatattattgagaggtagattttatattttgttttgtaaattaaatttttgtatattgtttatttatgtggttttttttgtcgtgtatgtgaggttagtttattttttttttgggtttttatatatattttttttatttatttttatatttaattttttttttatgagaataataaaatgattagagttagtaggagtgatttattgtttttgaaatgatttatgaaattaatattataaagaatggattgataaattaaagtattaattttttaatttataaagggaaatttagtttaatagtttgtatatttttttagtttagttattttattttttttttagttgcgaagtttgtttgagaaattaaaaattaatgaatattatttttttttttttttttttttaattttttttattattatattttaagttttagggtatatgtgtatattgtgtaggttagttatatacgtatatatgtgttatgttggtgtgttgtatttattaatttattatttagtattaggtatattttttaatgttatttttttttattttttttattttataatagtttttagagtgtgatgtttttttttttgtgtttatgtgattttattgtttaatttttatttatgagtgagaatatgtggtgtttggttttttgtttttgtgatagtttattgagaatgatggtttttaattttatatatgtttttataaaggatatgaatttattattttttatggttgtatagtattttatggtgtatatgtgttatatttttttaatttaatttattattgttggatatttgggttggttttaagtttttgttattgtgaataatgtcgtaataaatatacgtgtgtatgtgtttttatagtagtatgatttatagttttttgggtatatatttagtaatgggattgttgggttaaatggtatttttagttttagatttttgaggaattgttatattgatttttataatggttgaattagtttatagttttattaatagcgtaaaagtgtttttatttttttatattttttttagtatttgttgttttttgattttttaatgattgttattttaattggtgtgagatggtattttatagtggttttgatttgtatttttttgatggttagtgatggtgagtatttttttatgtgttttttggttgtataaatgtttttttttgagaagggtttgtttaagttttttgtttattttttgatggggttgtttgttttttttttgtaaatttgtttgagtttattgtagattttggatattagttttttgttagatgagtaggttgcgaaaatttttttttattttgtaggttgtttgtttattttgatggtagttttttttgttgtgtagaagttttttagtttaattagattttatttgttaattttgttttttgttgttttgtttttggtgttttagatatgaagtttttgtttatgtttatgttttgaatggtaatgtttaggtttttttttagggtttttatggttttaggtttaacgtttaagtttttaatttattttgaattgatttttgtataaggtgtaaggaagggatttagttttagttttttatatatggttagttagtttttttagtattatttattaaatagggaattttttttttattgtttgttttttttaggtttgttaaagattagatagttgtagatatgtggcgttatttttgagggttttgttttgttttattgatttatatttttgttttggtattagtattatgttgttttggttattgtagttttgtagtatagtttgaagttaggtagtgtgatgtttttagttttgtttttttggtttaggattgttttggtgatgcgggtttttttttggttttatatgaatttgaaagtagttttttttaattttgtgaagaaaggtattggtagtttgatggggatggtattgaatttgtaaattattttgggtagtatggttatttttacgatattgattttttttattatgagtatggaatgtttttttatttgtttgtatttttttttatttttttgagtagcggtttgtagttttttttgaagaggttttttatattttttgtaagttggatttttaggtattttattttttttgaagtaattgtgaatgggagtttatttatgatttggttttttgtttgtttgttgttggtgtataggaatgtttgtgatttttgtatattgattttgtattttgagattttgttgaagttgtttattagtttaaagagattttgggttgagataatggggttttttagatatataattatgttatttgtaaatagggataatttgattttttttttttttaattgaatattttttattttttttttttgtttgattgttttggttagaatttttaatattatgttgaataggagtggtgagagagggtatttttgttttgtgttagtttttaaagggaatgtttttagtttttgtttatttagtatgatattggttgtgggtttgttatagatagtttttattattttgaaatatgttttattaatatttaatttattgagagtttttagtatgaaaggttgttgaattttgttaaaggttttttttgtatttattgagataattatgtggtttttgtttttggttttgtttatatgttggattatatttattgatttgcgtatattgaattagttttgtattttagggatgaagtcgatttgattatggtggataagttttttgatgtgttgttggatttggtttgttagtattttattgaggatttttgtattaatgtttattaaggatattggtttaaaatttttttttttggttgtgtttttgttaggttttggtattagaatgatgttggttttataaaaagagttagggaggattttttttttttttattgattggaatagttttagaaggaatggtattagtttttttttgtatttttggtagaattcggttgtgaatttatttggttttggattttttttggttggtaagttattgattattgttataattttagattttgttattggtttatttagagatttaatttttttttggtttagttttgggagagtgtatgtgttaaggaatttatttattttttttagattttttagtttatttgtatagaggtgtttgtagtattttttgatggtagtttgtatttttgtgggatcgttggtgatattttttttattattttttattgcgtttatttgatttttttttttttttttttttattagttttgttagcggtttattaattttgttgatttttttaaaaaattagtttttggatttattaattttttgaagagttttttgtgtttttattttttttagttttgttttgattttagttattttttgttttttgttagtttttgaatgtgtttgtttttgtttttttagtttttttaattgtgacgttagggtgttaattttggattttttttgtttttttttgtgggtatttagtgttataaatttttttttatatattgttttgaatgcgttttagagattttggtatgttgtgtttttgtttttattggttttaaagaatatttttatttttgtttttattttattatgtatttagtagttatttaggagtaggttgtttagtttttatgtagttgagcggtttgggtgagatttttaattttgagttttagtttgattgtattgtggtttgagagatagtttgttataatttttgtttttttatatttgttgaggagagttttatttttaagtatgtggttaattttggaataggtgtggtgtggtgttgaaaaaaatgtatattttgttgatttagattttttggataagttatttttttttttataaaagttatttggaaaatatagatttataaaaagagaagttggatatatttttttaatttaatttaattttattaatttagttgaatttattaaattttgaattatagagttttttattgaattatattatgatataagatatgagaagaaaaataaaagaaaatgatttttgtttaaaaattttatagttgtgtaaggtagatagatatatagttatgggatgtagtaattttaaattatagagttttttattgagttatattatgatatagaatatgagaagaaaaataaaaaaatatggtttttatttaaaaatttaatagttgtgtaaggtagatagatatatagttatgggatatagtaatttaaatatttataaggtttcgaggcgttatggaatgagagaggtttattattaattggtaaaagagtagtggagttgggtttttatataagagtaagaatttgttag

SEQ ID NO: 1947 - DNA, 6121 bp, Artificial Sequence
  chemically treated genomic DNA (Homo sapiens)
tttttttattttataattaatttttttgaaaaggtttttttgtttttttttttatattttttatttatgttttagttttttgtagtatggtttttattttttgattttcgtagaattattttatttttattttttttatttttatagagtttttttattaaaagtgtatttaagaggttttttttttgttaaaattatttttagattttgttttttttttttaatttttttgtagtatttttttttttttgaaaatttttttgtttgttggtttttatgatattaggttttgttgattttttgttaatttttagatttttttttttattttttttgtgggggtttttttttttttatttgatttttaagacgtaagtgttttttagagtttttattgagattgatttttttttttattttgaagttttagataatatatattttgtttttaattgttattaagatatgttaaagatttttaaatttttttttttagtttattttttttgaattgtagatgaggttaattgttttttggatattattttgttgttttatggtatcgtaaagttaagaaattttaaatttaatttatgattttggttattagatttgtgattttatgtatattttttttttgttgaattgtattttgttttttaaattttaaatttagaatttttttttgtcgtttttttttttataatttttatggataattaatgattaagttttatttattttattttagttttttttcgataattaaaatgaaaatataattatattagaatatttatgagaattttattatttggatgagtgtgttaaaattaaatgtttatagaaattttatggtttgtgtttttatttgtgtttataatagtatttggggttagattattaaaatatttagatttttttattggttaaatgaaagataaatgatgttaatatatgaaatattaattaaatagagaggggtgttgggttaaatgaattattatatgttatttagtaaaataggtcggttatgtaaaaaagaacgtgtatatggttaggtgcggtggtttacgtttgtaattttagtattttggtaggttaatattggtggattacgaggttaggagatcgagattattttggtttatatggtgaaattttatttttattaaaaatataaaaataaaattagttaggcgtggtggtgggtgtttgtagttttagttattcgggaggttgaggcgggagaatggcgtgaattcgagaggtggagtttgtagtgagttgagattgcgttattgtattttagtttgggtgatagagcgagattttgttttaaaaaaaaaaaaaaaaagaatttgtatataattagtgaattttatttttttattttaagaagtaatttaattttagttaaatgttatttgttgtatttaagtgatattaatggtgatgtattgttttttatttttttttttagttattttatttataaatttttttattttatagttgtatgagttgttagtttaaggagtatatatttagttttatgtatatttatagtaatattttaatgttaattttagggatttgaaaaataatttttttaagagataggatttcgtttggttgttttagttagagtgtagtggtgtaattatagtttattggagtttgtagtttcgaatttttgggtttaagtgatttttttatttaagttttttaggtaggtagaattataggcgtaagtttgtttgtttaatttttgtttgtttgtttgtttgtttgttttgtataaagagggtttttttatgttgtttaggttggttgtaaatttttagttttaagtaatttttttgttttggtttttcgaagtgttgagattatagatttgagttattgtatttagttagattttttagtggaaaattaatttttttattattggtttaggaaatattgttttagatgttgagattttaataattgttatttttattagtatattggtttaaagttaaatttgtagttatttttagtaagtgtttaggatttgatataatatgtttgatgattgaatttgttttggttttatataatattttatagttatttattttttaattttattttttttaattatagttaatgtttttattgtgttatatttgatgtgtttttatggttgttttatattattttgggaataagaaaggatatgaatgtttattttcggtagggagaaaggggtaataagtaatgtgaatttgatataatataaagtaattatagttttaggtgttttagggtattagatttaagatgaaaattaagagtggagaaaagaaagggagattagattgttattgtgtttatgtagaaatggaagatataagaaagtttattgtgatttgtattaagaataattattttgttttgagatgttgttaatttgtaattttagttttaattttgtgtttatagaaatatgtgttgtattgaattaaggtttaatggatttggggttgtgtaggatgtgttttattaatagtatgtttgtaggtagtatgtttagtaaaagttattattattttttattttttgttaattagggatataatgtattgtggaaagtcgtagggatttttgtttaagaaagtttgggtattgtttaagttttttcgtaattgagatagtttgagatatggttttgtgggaaaggaaaggttttatattttttagtttgatattcgtgaagggtttgtgttgaggaggagtagtgaaagagggaggtttttttgtagttaagaggaaggtttttgttttttgttcgtttttgggaatggaatgttttagtgtaaagttgattattcgttttattttgagataggagaaaatcgttttgtggttggaggcgagatatgttggtagtaatattgttttgttattttttgttatattgagatgtttgtgtaaagtgaaatataaatttagtttatgtgtatatttaggcgtagtatttttttttgaatttatttatgatatagatttttttgtttatatgttttttgttgattttttttttattattattttgttgttttgttatatttttttcgttaagatagtaaaaatagtgattaataaatattgagggaatttagagattagcgttggtgcgggtttttgtatattgagcgttagttttttgggtttattgttttttttatatattttgtttttgtgttttatttttttttttagtttttcggttttatttgatgagaaatatttataggtgtggagggttagattttttttaaaaagtttatatatttttttaaatagttttataggaataaatggaggtggttgttaatattttttaagttattttaaaaattaagttgataaggtgtatgttttttttttttttttcgggaaaaatattagtgttttttggtgtttaaagtgtattttgagtagtattacgtagattagtttatttttaaagaataatgtattaatttaatgttagagataattttttaaaataaattttggaggttgggtacggtggtttacgtttgtaattttagtattttgggaggtcgaggtaggcggattatttgaggttaggagttcgagattaatttggttaatatggtgtaatatcgtttttattaaatataaaaattagtttagtatggtggtatatttgtagttttagttatttgggaagttgaaagaggagaattatttgaatttaggaggcggaagttgtagtgagtcgagattgtattagtttgttagggtaagattttgttttataaataaataaataaataaataaatattggagtattaaattttgggtagtaatatataagtatgttattgttttataaattataatataaaatattttttatttttatgtttttgagagtaatgaatatataaaatataatttttggaggagattaaaattttttttttaatttatcgttttttaaggttttatatttttagtttaattttattggattatagataatttttcgttaattgagtatggtggtttacgtttgtaattttaggattttgggaggtcgaggagggttaattatttgagtttaggagttcgagattagtttgggttgttgaaatttatttttattaaaggaaaaagaaaagaaaagaaagaaagaaaaattagttgagtgtgattgtgtgtatttgtaattttagttattcggaaggttgaggtgggaggattttttgagtttaggaagttaaggttgtagtgagcggtgatcgttttattgtattttagttagggtaatagagtaaggttttgttttaaaaaagaaaataataagaattttatttattattttttaatgtaaataattaatggagtttttaaagatttagatataggtggtgttaggatttgtttttgtaatttttttattttttgtattaggtagcgcggaattttttaggcgatttcgcgttggtcgggagtattttttttttagttaaaggtacgttttattatcgtttttcggggcgcgttaggtagcgggtcggttaagttgcgtcgtttagggcgttttgtttcgttcgtttttgtgtcgatttggaaatattttgtggtgttttagattgttataaagttcggggtggtgtagttttagcgcgtttcgtttttcggtttgtaggtggtatataagttttttcgttgtcgggattcgggattgaatttttgtcgggcggtaatttttttttttatcgggattatcgggaaagtggtattatggattttttatttttgattgtggttacgtttttttcgttgatttcgtttattttacgggaattggcgtgtggcgattggaggcgtgtcgggggcggggttgggggaggtgggttgaggaggcggggtttgggaggggataaagtcgggaagaggaaaagttcggatttattttgtggtttcgggtttttgtagagtttattttagaagcggaggtattgggagttcggtttgggattgttaggttgtggttgtgagtttgagtttgtgagcggttgtggcgttttaatttttcgttagtatattatttcggtaggtaattttaggttttaaggggcggtttcggtttttggttgtggaggggtggttttaatttcgtagaaggtaggaatggggtaaaggaaaaaagcgtagattttgggtgtggagggagttaaggtttgcgtgtaaagaagggaataaatttaggtattgagaatgggaaaagaaaagggaaggaggggatgttggatgtttggatatgtagaaggtttgtttttgggtttgggagggagaaattgggcggtgaggaagttggatgtaacgataaggggaaaattaggtttgtatttgggttggaaaatcgaggggtggaagttgtaagaatgtatgtagaagattaagtttggagtgtaggaggaagaaaacgtgtagtagttgggggttggatgtaaagaaggttgtatatgtcgacgggcgtttgtaggtaatttaggcggcgaggaatagttttgaagtcgatttttcgcgttcgttagggggcgtggaggggcggagttttagcggtttttagaggggtcgttaggttatacggggcgagagggggttgggggaaatattttcgttagtttcgggtgtttggagtttaaaaggttttagtattagcgaggggaggggaggggaggggcgggcgtggagatttggaaggaggtatcgatttagttttgattgtagtttttttgtataacggttataaggacgggtgtaggttaagagtaaggatatgtaaattttaagatttgttaacgggcggcgaagcgggtacgttttcgtatacgtagagataaattgtgtttttatgatttttatttggaaagtgtttgcgggtttaaaattggtttttgttttatcgagtatatttagtattgtattttaaatcggataaattgggttgtttggtaggtattaaaaatagttaaatttttttgtgagtgttttgtatgttaatatttttattttttgttttgttttagg

SEQ ID NO: 1948 - DNA, 6121 bp, Artificial Sequence
  chemically treated genomic DNA (Homo sapiens)
tttaaaataaaataaggaataaaagtgttaatatatagaatatttataggagaatttagttgtttttagtatttgttagatagtttagtttattcggtttaaagtatagtgttgagtgtattcggtgggataaaggttaattttaggttcgtaggtattttttaaataaaggttatgggagtataatttatttttgcgtgtgcgagggcgtgttcgtttcgtcgttcgttagtaggttttggggtttgtatgtttttgtttttggtttgtattcgtttttatggtcgttgtgtaagagggttgtaattaaggttggatcggtatttttttttaggtttttacgttcgttttttttttttttttttttcgttggtgttgggattttttaaattttaggtattcggaattggcgggggtgttttttttagttttttttcgtttcgtgtggtttagcgatttttttgaaggtcgttggagtttcgtttttttacgttttttggcggacgcgagggatcggttttaaggttatttttcgtcgtttgagttgtttgtagacgttcgtcggtatgtatagttttttttgtatttagtttttagttgttgtacgtttttttttttttatattttaggtttagttttttatatgtatttttgtaatttttatttttcgattttttaatttaagtgtagatttgattttttttttgtcgttgtatttaatttttttatcgtttagttttttttttttaggtttaaaagtagattttttgtatatttaagtatttagtatttttttttttttttttttttttttatttttaatatttggatttgtttttttttttgtacgtaggttttgattttttttatatttaagatttgcgttttttttttttattttatttttgttttttgcggaattagagttatttttttatagttagggatcggggtcgttttttggagtttgaggttatttgtcgggatgatatgttggcgaagagttggggcgttatagtcgtttataagtttagatttataattatagtttggtaattttaaatcggatttttagtgttttcgtttttgaagtagattttgtagaaattcgggattatagggtaggttcgagtttttttttttttcggttttgtttttttttaggtttcgtttttttagtttattttttttagtttcgttttcgatacgtttttaatcgttatacgttaattttcgtgggatgggcggagttagcgagaggggcgtggttatagttaaagatggagaatttatggtgttattttttcggtgatttcggtgggggaaggggttgtcgttcggtagagatttagtttcgaatttcgatagcgaagagatttgtatgttatttgtaggtcggggagcggggcgcgttggggttgtattatttcgaattttgtaataatttagagtattatagagtgtttttaggtcggtataaaagcgaacgggatagggcgttttgggcggcgtagtttggtcggttcgttgtttagcgcgtttcgaggggcggtaatggaacgtatttttggttgaagaaagagtgttttcggttagcgcggggtcgtttagggggtttcgcgttgtttaatgtaaaggatggaaaagttatagaagtaggttttgatattatttatgtttaggtttttagaaattttattgattgtttgtattagaagataatgaatgggatttttattatttttttttttaagatagggttttgttttgttgttttggttggagtgtagtggagcgattatcgtttattgtagttttgattttttgggtttaagagatttttttattttagtttttcgagtagttgggattataggtgtatataattatatttaattaattttttttttttttttttttttttttttttttttggtagagatgggttttagtagtttaggttggtttcgaatttttggatttaagtgattggtttttttcggttttttaaagttttgggattataagcgtgagttattatgtttagttggcgggggattatttgtgatttaatgaagttggattagagatgtgaagttttagaaaacggtggattgaaaaaagaattttagttttttttagagattatattttgtgtgtttattgtttttaaaaatatgaaaataaagagtattttatattgtgatttgtaggataatagtatgtttgtatattgttgtttagaatttaatgttttaatatttatttatttatttatttatttatgagatagagttttgttttgataggttggtgtagtttcggtttattgtaattttcgttttttgggtttaagtgattttttttttttagttttttaagtaattgggattataggtgtgttattatgttaagttaatttttgtatttagtagagacggtgttgtattatgttggttaggttggtttcgaatttttgattttaagtgattcgtttgtttcggttttttaaagtgttggaattataggcgtgagttatcgtgtttagtttttaaaatttattttaaaaaattatttttaatattgaattagtatattattttttgaagataaattgatttacgtggtattatttaaggtgtattttggatattagagggtattggtatttttttcgagagaaaagaaaaaagtatatattttgttaatttggtttttgaggtggtttaagggatattggtagttatttttatttatttttgtagaattgtttagagaggtatatgagttttttgaagggggtttgattttttatatttgtgggtattttttattaggtggagtcgagagattgagaaaagaaataagatatagagataaagtatatagaaagaatagtgggtttaggagattggcgtttaatgtgtaaggattcgtattagcgttggtttttgagtttttttagtatttattgattattatttttattattttggcgaggggagtgtggtagggtaatagggtgatggtggggagaaggttagtaggaaatatgtgagtaaaggaatttgtattatgaataagtttaaggaaaggtattacgtttggatgtatatataggttagatttatgttttattttatataaatattttagtgtagtaaagagtaatagagtagtattgttgttagtatatttcgtttttagttatagggcggtttttttttattttagaatagaacgaatggttagttttatattgagatattttatttttagggacgagtaggagatagaaattttttttttaattgtaaagaggttttttttttttattatttttttttagtatagattttttacgggtgttaggttgggggatgtaaggtttttttttttttataaggttatattttaggttgttttagttgcgggaaagtttggataatatttaggtttttttgggtagaggtttttgcggttttttatagtgtattgtgtttttggttaatagagaatggagaatggtgatgatttttattaggtatattgtttgtaaatatattgttaataaggtatattttgtatagttttaaatttattaaattttgatttaatatagtatatgtttttgtgagtatagggttggggttaaagttatagattaatagtattttaaagtagaataattgtttttagtatagattataatggatttttttatgttttttatttttatatagatatagtaataatttgattttttttttttttttttatttttaatttttattttgaatttgatgttttaagatatttgagattgtaattattttatattatattaggtttatattgtttattatttttttttttttatcgaaagtaagtatttatatttttttttgtttttaaaataatgtagggtagttataaaaatatattaaatatagtataataaaaatattgattataattgagaaaaataaggttaaaaaatgaatagttataggatgttatatagaattaaggtaaatttaattattaaatatgttatattaaattttaaatatttgttagagatggttgtaaatttggttttaagttaatgtattagtaaaggtggtagttattggagttttagtatttaaaatagtgttttttaagttagtaatggaggagttgattttttattgaaaaatttggttgggtgtagtggtttaagtttgtgattttagtatttcgggaggttaaggtaggaggattgtttgaggttaggagtttgtaattagtttgggtaatatagggagattttttttatataaaataaataaataaataaataaataaaaattagataggtaagtttgcgtttatagttttatttatttgggaggtttaagtgggaggattatttgagtttaagaattcgaggttgtaggttttagtgagttataattgtattattgtattttaattggggtaattaagcgagattttattttttaaaaaaattattttttagatttttaggattgatattaaaatattgttataaatatgtataaaattagatatatgttttttaggttgatagtttatataattgtaaaataaaaaaatttatagataaaatgattagaaagaaaagtagaaaataatatattattattaatattatttaaatataataaataatatttagttgaaattaaattattttttgaaatgggaagatgaagtttattggttatgtgtaggttttttttttttttttttttgagatagagtttcgttttgttatttaggttggagtgtagtggcgtaattttagtttattgtaagttttatttttcgggtttacgttattttttcgttttagtttttcgagtagttgggattataggtatttattattacgtttggttaattttgtttttgtatttttagtagagatggggttttattatgtgagttaggatggtttcgattttttgatttcgtgatttattagtgttggtttattaaagtgttgggattataggcgtgagttatcgtatttggttatgtgtacgtttttttttatatagtcggtttattttattggatgatatatgatggtttatttagtttagtatttttttttatttggttaatattttatgtgttgatattatttgttttttatttagttagtaaaagaatttgagtattttaatagtttggttttaaatattgttataaatataaatggaaatataggttatgaaatttttgtaagtatttggttttgatatatttatttagataatgggatttttataaatattttaatgtggttgtatttttattttgattatcgaaaaaaaattgaggtagaatgaatagagtttggttattgattgtttatgaagattatgagagagagaacggtaaaagggaattttgaatttggagtttgggagataaggtgtagtttaataaagaaggaatatatatagagttatagatttgatggttaagattatgggttaagtttaaggttttttaattttgcgatgttatgggatagtaagatgatgtttaggaggtagttggttttatttgtagtttagaaagggtgggttggagaaagaaatttgggaatttttagtatgttttgataatagttgaagatagagtatatattatttaggattttaaagtaaggagaaaagttaattttagtgagaattttgagggatatttacgttttaaaggttaggtagaggaaaaggagtttttataaagagaatgagaaggagagtttgggggttaataaagaattagtagagtttgatgttatagaagttaatagataagaaagtttttaaaaaagagggagtattatagagagattaaaagaaaaagatagggtttgaaaataattttggtaaaaggaaaattttttgaatgtatttttagtaaaaaggttttatgaggatgaagaagatagaagtggaatggttttacgaggattagaagatagaagttatattataggggattgaagtatgaatggggggtatggaaagggagataagaaaatttttttaagaaggttgattgtaaagtgaagaaa

SEQ ID NO: 1949 - DNA, 8456 bp, Artificial Sequence
  chemically treated genomic DNA (Homo sapiens)
tgttttggttcgggttttttattttttttttttcgcgttgagacggcgaggaaagttagttcggaaatttgcgttcgtttaaaattcggtttggttttagttatcgttttaggaattttttttatcgtaggggcggaggtcgagagtagggatggagaagtggatttgcgcgggtggatttcggggcgcgggtggatttcggggcgcggggggatttcgaggagcgggtggattgtggggcgcgggtatcgtttcgtagcgatttttgtcggcggttttggggatggttcgtatttgtttgcgtgtatttggtatacgtgtaggtatatgtttttgtttacgtgtagattgggcgggggatgggggggtttatatcggtgtatatttttgtatattttttagtaatttgaaattttattacgagagatatttttatttcgttatttttgtgtatttgtacggagtttttagggttatagatttgtgtgtaaatgaaatgaggatgtagtttgggtgtttaagggggggtgttttgagtgtggttgtttgtatgtttttttgagggtattttattttttgtttttattcgtttttatgagcgagtatttatgagtataggatgtgtatatatttgagttttattagtggtatacgtagttttattatttttttaggtttgtgtttgtatgaaatgtgtatgggtgtgtgtgtgtacgcgtgtgtttttattcggggaatgtggggagaggtgtatggagttaagatgggtggtaaatagtatgtttttgaaattaaaggattaatgtggaggaaggcgttttagatgtattaaattttttgttttttattttattttttttgatttgggaagaattaggattttgtttttaagtttttgggtatatagttgttttatttcgatatgaatttagtttttcgtttgatcgttttttggttttttttttttttcgatttgtggaatttagggaatttgtttagtgttgtttttaagtattttggttatgatgtaaatttagagaaattagtatttttatttttttttttattttttatttaaaagttatttttttttagtttattatttgggattttgatgtttatgtttttttttcgttattgatatatatatagagagagataaataaaaaaggaattttttgaaatttttttagaaggttttgagagttgtttttaatgttgtaataagttagtttttagtttaagtttttattagaaaggagtagagtatataagttttagtattagtaatagtagtagaagaaataatatttgttttagggttattggatttttcgttttgtttagagtaaggtaagtattttttaagtttttattttttttttttttttgtgggtttgtagttgtttaggtgtagaaatcgttagtgtgttattttagtagttggtaggagggagttggtggatttttggaagtatttttggtgagttatttgttggaatattagtgaaaatttagtattttagggatcgatgtatagtgtttattttaaaagttatttaataataattgtatagtaagatttgtgtgtatgtatagtttgtggaaatgtttgttttattttattttgaagtggtgtgtattgatgtataaaagtatatttttaaatgttaatgtttattagttaaaggattgtatagagttaaagtgagtggtgtttgttttattattgaaatttttaaaaagtttttcgtgtattttttaaagtaattggatttataattataataatgttataaattagatttgtttttatatttgtgatggttttggtcgttagttgtgatattaattaaaatgatagttgggatttttatttttgtggattaattaattttggttttagttaaaaaatgaaaagttattattgttttttaaagagtttttaaatttgtgagaagggggaaaaaaaggtttttttatttgtttaggtaaaattgtgtgtaataataatgttattttaataaagggattattaaattttaggtgatgatttatttttttaaataaggaattgtaagatattagatggaatgtgggtaattttttagagtttagtttattggaatttgaaattgtatgattttcgtatatttttttatgttattaataagttatggaatttttttgtgttggattttgggggtaaagtgtaaaataagatagatatgatttatggtataagagagtttatttagtgtggtagagaagataaatagtaaagaagagattgtattgttgttattgtagtaaatgttgtggaaggaggggagtaaatagtgggttttgattttatttaggtattatgatattttacgtgaattatgttattaattttttattatagtagtatgtttattttatagattaggagtgtggggtttaaaggggttaagtgatttatttagagttatatagttttagaagtttgtttggtttttaaattagggatttttgtatgtgttatttatgttatttgtgattatatttttttattttttaataataatttttttttttaattaaaggtaataaataaaatttaaaaaagagatgtttatttaagcgttattggtatgttgatgttggtattagtgttgggaagtttttagtatattttaggaagtaggagtgtgtaacgtggggtttttttgttttttatgtaagggttttaagagtttagaaaatttatgaaattgtatatataaaaatgtgttttaattattaagatttttagatttattatgttgagaaatgtgggttgagggatagcgttttttagtattagttgatgggttagagagttaaaggaggagatttattattattattttttttggatagtgttttgtggttttaaatgtaggtgatattaaaatgggagttgttttttagaattatggtcggggtttttttgattttgaagtgtagtttatttgagattgttaaatgtatttgaggtatgtagaggaagtgttgggtatatagttagtgggaatattttagcgtaagtggttaggagatgttaggaatttttattattttttttttagtgtgttagtttttgggttttataggcgtatgtaattgtagtatttttgtgtatatttttttattgtttagaatgatttttttgattatttatgatatataaaatatagatatcgaattgtttttttatttttttttttaggtttaagttaatatgttattggttgttttttataatatgttattttattgttttttttaataagtttttgagataagtattaggtttattttatagataaagagattgaggtttagcgagtaatttggttaataagttgtttttattgtttaatagtaaatgagcggtgggattaaaatttaagtttgtgtttgtttaattttaagtttgtgaatgtattaatcggtgttttgtgttagttagtattttgttatagttataatttagattgaagtgatagttatgtttttaaaattttatgttgtggtgatagtattgagtagtgtttaagaaggtttgatttttaggtttgtttttgttatttataaattttataagggaataaagtatatagtaaggttcgtttagagttagtagtagttttgataaagttgtaatttgttaatatttcgttatttaatttaggaatgtttatttttaaggtatttgattgaaatagttgagtattgttttttatatagtttaaaatagtggttttagaattatttttttttagattatgggtgttttgtaaggtgaatggagttgttttagaatgttttaataattatttttattttattcgtaagtggtatgtaatttttgtaatcggaagatttttataaattttggatattaatttagattggtttttatattagatggtggtttatttaatataaaattatgtattttattattttatggtggatatattaatatgttgtggtttttttttaatgaatattttgatttttaggggttttggattttgaatatgggttaaattagtggtttttaaggtgtggttttagcgttagtagtatttgttttttttggaaattttttagaaatgtatatttttaggtttttatgtttgttgaattagatattttgggggtgggatttagtcgtttgttgtagtagtgtttttaggttattttgatagttatttaaattttagaattattaggttttttatatgggagagagtagtttttgaatttggaaaataagagaagttaaatttttatagtaagggttggtgattaggtcgttgttagaatttgaaagttcgtttttgtattatcgtttttgtttttaatttaagttttttagttttgggtgttttagtatatattgttttgtgttgtagtgatataaatgtatggtttatttttttagttggcggggaggtatttaatatattgatttaataaatatttattgagtaaaagtatttgtttttaggaagcgggatttaggtaagtttttttttttttttttaattgtttttagtttagtgttttttatgtagtaagtattaaataaataattgttagatgttgatttagaaagttatattttttttttaagttttaagttttttattttaaaaataagaggattgtattagatggtttgttttaggttttttttagttttagagttttaaatattttatggttttttatttagagatgtttttttttatagattgttatagaatttttgtaatttatttagtatttgtttgatagtatggagaagaaaggggagaattaagattttatttaaaaaaaaagtagttagaatgtgtatatggtttataaaggtaataagaattattgatattttttttttttttttttttttttttttttttttttttttttttttttttttttttgtttttttttttttttatagatgtgttattagtagttggttattttttggttttttttggtttttttggtattttttttcgtggttatatgggaattgaagaaagatggtaattagttttttattattttttgtggaggttttatttttaagttaggatttttgggtagttattggtgggaaattaaattgaaatgggtaattatgtattgggttttttagagaaagttattattttgggaaaatgtaatgttatattttttttttttattttgatggtatttatattgtttggtttttatattggatgatattggtatattatggtggggaaagatatatgatatatgatatggtggggaaagatatatgatatatgatattttttaatattattaaaaattgttttatataattaaaattttaaagtagaggatttgtaaagtataataattgtgttcgttttttattttattatatgatattgtttttttagttggtattgtgatgatttatttttgattaagtattttggaggaagtataggatttagatttatattgatttgggtttaagttttaggtttgttaatgattggttatgtgattttaagttgggttatttttaattttgaatttttttaattgtaaattggatgttataaagtggatgtttattacgtgggttatttagtgggttaatgaatgtagaatataattcgatagatagtaaagtgaaagtaaatgttagttagtattattattttggttgtttaaaatattttttatgatttaagagatattttttattattttaatgattagtaaaaattattagtagattaatagaatagttaatggtaaaataaggagttttgtttatttttttagtattttatatttagtaaatgtgtattttgatcgttggttgtatttgaaagatttttagatttttattattgaagttaatattataatgttggcgattattatttttaattgtataataataatagttaatgtttattgagtgtattgttttatttaatttttataagagttatatgaagtagagattgtttgtattttattttatagatgttggaaattgaggttagagagattaagtaatttgtttaatgttatatatttggtaagggtggaatagggatttgattttaattttgttttgttttaaagttggtgtatttaaatttgtgaaaacgtttttataaggatatgaagtaatttttttttaggtttttggagagttgaataagaggaaatggatataaattaaggatgaaaatattttagttgatgattagaaataattttttgatattttagaaagtattattttgaaatgggtatttgaaagaaatttgggattatttttttttttttaagaattttaggaagatagaatttagttattttttttttatgagaatttgagagatttagatatttttttaagtaaaggtaaaggtttgagttaggggtatatggtagattttttttaattttgggattgttagcgagtttaggaattttggttttggtatatttgattttttagtgatttttgatttggtaaattatagaaattttagaaaattagtgtgagaaatttttcgaggtgtgatttaggagggtagacgatgtagtgaggttaagtgttaggtttttgatgtttttttttagttttttttttgtagttgttttttttgttgttgagtaaatattttttagggttttcgagttttagttgggataggaaagtaattatgttttttaggtgttagggggataaaaaaaaaattaagaaaaagttaaaagtgttatatggttttatattagtatagttaattatttttttagagttggattttaaatgtttttgattttttatttttgttatttatttagtttttataatttaattgatgtaaagtgaaaattttatattttataatgttttatatttagaggttaataacgagaattattatttataaagtatgtaagggtattgtgtatgagtttatataatttatatatttattttttaaagtaagggttaatattttttttattttaaagatgatgatattgaggtttatagtagttgaatgttttgttaaaggttataagattggagtaagggttagagttgtttttaaatttaggtttttgttattttaaaatgtaggtttttaattattgtgatttataaatttgagtaggtattagtattatttggagagtttaagaattatataattaaatttattttaaggtttttgatttagtagttgagaatttgtatttttgatttattttaaggtgatgttgttgatggtgttttatcgattatgttttgggaattattatattaaataattttatttaattaataatttatgtatggattaaaaaaatgaatgaagttttgttatgatatattttgaaatattatattaagttattttttaaaggttagtttagatattagtattaggtattttttgtaaagtttaagagataaaaggtttgagttgtagtttttgtatttttgatttgttgtgattatgtttagatcgttggttttagtacgtttttttattaaatgggaagattaagttttattggattgttttataagagtgtaagatagttaaaaataataataataataataataatgtagagagaatgaaaatttttattggtgatttaaaatagagggaacgaaatttttaaatatttatggaaaattgttaagagagtttttttgtatagttggttgattttttagtttataagtaacgataattaatatcgaatttattgtgtggtagatattgtgttaagtattttacgtgtttttttttttttttatttaatttttagttaaatgtaaggtagatattgttattattattattttatagatgaggaaattgaggtttatgataatgaaatattttgttttaaattttttagttggttagtggagataggatgatagttttggttcgttgttttcgatattttgagtttttaattattatgttattttgttgaatattgtgttttgtcgtattttttatgaaattgaaattgtgttggaagttttttttttttagatttttggtaaagagttttgtgttgtttgtagtttttggtatattaaggtgtttttaatttgttaaataattaaaggttattattaaaggtagttttttagttaatgagtcgatggtagttataaaattttttgttttttttttttatgattttgagtttaagtagggttttatgttttgagattattttagtaagtatttgttaaatatttgttgtaaataaggttgtgtttaggtaatggggatgttcgaagggttaataaaatatagttttagagtttttggagtttatagtttggttttttattttatgtgtattttagt

SEQ ID NO: 1950 - DNA, 8456 bp, Artificial Sequence
  chemically treated genomic DNA (Homo sapiens)
attggaatgtatataaagtggagaattaggttgtaagttttaggaattttgggattgtgttttattaatttttcgggtatttttattgtttaaatataattttgtttataataagtatttggtaaatgtttgttgagatgattttaaggtatgagattttgtttgggtttaaggttatggaaaagagaaataaagagttttatagttgttatcgatttattgattggaaggttgtttttaatagtaatttttgattatttagtagattggaaatattttaatatattaaaaattgtaaatagtataagattttttgttaaaggtttgggggagagaaatttttagtataattttagttttatagagaatacggtagggtataatatttagtagagtaatatagtggttaaaagtttagggtgtcgagaataacgaattaagattgttattttgtttttattaattagttgggggatttggaataaggtattttattattatgagttttagtttttttatttgtaaaatgataataataatagtatttgttttatatttgattgaggattaaatgaaaaaaaaaaaaagtacgtaaagtatttagtatagtgtttgttatatagtaaattcggtgttagttatcgttatttatagattgaggagttagttaattgtatagagaaatttttttaataattttttatggatatttaaggatttcgttttttttgttttaaattattagtggagatttttattttttttgtattattattattattattattatttttagttattttatatttttatgaagtagtttagtagagtttagtttttttatttaatgaagaagcgtattgaggttaacgatttaagtatggttatagtaagttagaagtataagggttatagtttagattttttgttttttgggttttgtaagggatgtttaatgttagtgtttaaattggtttttgaggaatggtttagtatagtattttagagtgtgttatagtaaagttttatttatttttttaatttatgtataaattattaattgaatagaattgtttaatgtagtagtttttaaagtatgatcgatgaaatattattagtagtattattttggaatagattagaaatgtaaatttttagttgttgaattagaaattttgggatggatttagttatatggtttttaagttttttagatggtgttgatgtttgtttaagtttatgagttatagtggttgagagtttgtattttggagtggtagaggtttggatttagaagtagttttagtttttgttttagttttgtggtttttggtaagatatttaattattgtaagttttagtgttattatttttaaaatgagaaaaatattagtttttgttttagaaggtggatatgtggattatataagtttatatatagtgtttttatatgttttataaatggtggttttcgttattggtttttggatgtaaagtattgtagaatataaagtttttattttatattaattggattataaggattgaatggataataaaaataagaggttaaaagtatttggggtttaattttggggaaatgattagttgtgttgatgtaaaattatgtggtatttttggtttttttttggttttttttttgtttttttgatatttgaagagtatggttatttttttgttttaattgaggttcggaagttttagaagatgtttgtttaatagtagggaaaatagttgtaggaggaaagttgaagaggagtattaagaatttggtatttagttttattgtatcgtttgtttttttaagttatatttcggagagttttttatattgattttttggaatttttgtggtttattaaattagaagttattaaggggttaaatatgttaggattaaggtttttgagttcgttaataattttagggttggaagggatttgttatatatttttggtttaggtttttgtttttatttaagagagtgtttaaattttttaaatttttatggagaaggggtggttggattttgtttttttaaaatttttgagaagagaggagtggttttagattttttttaggtatttattttaagatggtattttttagaatattaaaagattatttttgattattagttgaaatatttttatttttaatttatgtttatttttttttatttagttttttaaagatttgggaaaaaattattttatgtttttgtaaaaacgtttttataaatttaagtgtattagttttgaagtaagatagaattgggattaagtttttgttttatttttattaggtatgtgatattgggtaagttatttaatttttttggttttagtttttaatatttgtaaaatgggatatagatagtttttattttatatggtttttgtgagaattaagtgagatagtgtatttaataaatattaattattattattatataattaaagatagtaatcgttaatattatgatgttggttttagtgataaaaatttgagggttttttaggtatagttaacggttagaatgtatatttattgagtgtgagatattagaaggatgggtagaattttttattttattattaattattttattagtttattaataatttttattgattattgggataataaaaagtattttttgaattatgaaagatattttaaataattaaaatagtaatattagttgatatttatttttattttattatttgtcgagttgtattttgtatttattaatttattaaataatttacgtggtaggtatttattttgtaatatttagtttatagttgaggaaatttaggattagaggtgatttagtttaaagttatataattagttattgatagatttaggatttgaatttaagttaatgtgagtttgaattttatgttttttttaaagtgtttggttagaggtaagttattatagtgttaattgagggggtagtattatgtggtggaatgagaaacgaatatagttgttatattttgtaaattttttattttggaattttaattgtgtgaaatagtttttagtaatattggaaaatattatatgttatatgtttttttttattatattatatattatatgtttttttttattatagtgtattaatgttatttaatgtgaaaattaaataatatagatattattaaagtagaaaagagagatatggtattgtatttttttagagtgatggttttttttagaggatttagtgtatggttgtttattttagtttgattttttattagtggttgtttaagagttttggtttagaagtggggtttttatagagaataatgagaggttggttattatttttttttagtttttatatggttacgaggggagatgttagaaaaattagggaaaattaagagatgattaattgttggtgatatatttataagaagggagagaagtagggggaagagaaggaggaaaagagaaggaagaggaagaaaaaagagaagaaagaatgttaataatttttgttatttttgtgaattatatatatattttagttattttttttttaaataaaattttgattttttttttttttttttatattgttaagtaaatattaagtaaattataggagttttatggtagtttgtggggaagaatatttttaaatagagaattatagggtatttggggttttggagttgaaagagatttaaggtaagttatttgatataatttttttatttttaagatgagaaatttaaagtttagagaaggaatgtgattttttggattaatatttagtagttgtttatttagtgtttattatataaagagtattgggttagaagtagttgagagagaaaaaaagggtttatttggatttcgttttttaggagtaaatatttttatttaataaatatttattaagttagtgtgttaaatgttttttcgttagttggggagatgagttatatatttgtattattgtagtataaagtagtgtgtgttggagtatttagaattgaaggatttgggttagggataggaacggtaatatagaggcgaatttttaggttttggtaacgatttggttattagtttttgttgtaggggtttagttttttttgttttttaagtttaaagattatttttttttatatagagaatttagtggttttaaaatttgagtgattgttaggataatttggaagtattgttataatagacggttgagttttatttttagagtgtttgatttagtaggtatgagggtttgagaatatgtatttttagaaagtttttaggggaagtagatgttgttggcgttaagattatattttgagaattattggtttaatttatgtttagggtttagaatttttgaaaattaaagtgtttattgggaaaagattataatatattgatatatttattatgaaatagtaaaatgtataattttatgttaaataagttattatttgatatagaaattagtttaggttagtatttagggtttatgaaaatttttcgattgtaaaaattatatgttatttacgaatgaggtagggatgattattgaaatattttgaaataattttatttattttgtagagtatttatggtttggaggaaagtggttttgaaattattgttttaaattatatgaagggtaatgtttaattgttttagttaaatattttaaaaatgagtatttttgggttgggtgacggaatattgataaattatagttttgttagaattgttattaattttaggcggattttgttatgtattttatttttttataaagtttgtgagtggtagagataggtttagaagttaagtttttttggatattgtttagtgttgttattatagtatggagttttaggggtatggttattattttagtttaggttatgattgtagtaaagtattagttggtatagggtatcggttagtatatttataggtttgaagttaaatagatataggtttgaattttggttttatcgtttatttgttgttgagtagtgggagtaatttgttggttaagttattcgttgagttttagtttttttgtttataaaatggatttaatatttattttaaaggtttgttgggaaaggtaatgagataatatattatagaaggtaattaataatatattaatttgaatttagaggaagaggtaagggaataattcggtatttgtgttttatatattatggatagttaagaaagttattttaggtagtagggaaatgtgtatagaggtattgtaattatatgcgtttgtaaaatttagaggttggtatattggaagggaaatagtggagatttttggtattttttggttatttacgttgaggtatttttattagttgtgtgtttagtattttttttgtatgttttagatgtatttgataattttaggtgaattgtattttagggttaagggaatttcggttatggttttaagaagtaatttttattttagtattatttatatttgaaattatagagtattgtttaggagaggtgatggtggtgggtttttttttttggttttttggtttattagttgatattagggagcgttattttttagtttatattttttagtatggtaagtttgagagttttgatgattaaaatatatttttgtgtgtgtaattttataggttttttaaatttttgaaatttttgtatgaaggataaagggattttacgttatatatttttattttttggagtatgttaagggttttttaatattggtgttaatattagtatgttaatgacgtttgggtgggtattttttttttaagttttgtttgttatttttaattagaaaagggagttattattaaagaataaaaagatatagttatagatggtatgggtggtatatgtaaagatttttagtttgagggttaggtagatttttagaattgtgtgattttgggtgagttatttggtttttttaagttttatatttttgatttataaaatgggtatgttattgtggtaaggagttagtgatataatttacgtgaagtgttatggtgtttagatgaagttaggatttattatttgtttttttttttttatagtatttattataatggtaataatatagttttttttttattgtttgttttttttgttatattgagtgaatttttttatgttatggattatgtttattttgttttgtattttatttttagagtttagtatagagggattttatgatttattagtagtatgaaggaatgtacggaaattatataattttagattttagtaaattaaattttaagaggttatttatattttatttagtattttgtaattttttgtttgaaaaagtgggttattatttggggtttagtaatttttttgttaaaatgatattgttgttgtatataattttatttgggtaagtaaaaaaatttttttttttttttttttatagatttaaaaattttttaggaagtaataatagttttttattttttaattggggttaaagttagttaatttataagaatggggattttagttgttattttggttgatattataattgacgattaagattattataaatatgggagtaagtttgatttgtaatattattataattatgaatttaattattttaaggaatgtacgaaaggttttttaaaaattttaatagtaaggtaggtattatttattttagttttatataattttttaattgatgggtattaatatttaggaatatatttttatatattaatatatattattttaaaataagataaaataaatatttttataaattatgtatatatatagattttgttatatagttattattaggtggtttttaaaatggatattgtatatcggtttttagagtattaagtttttattaatgttttagtagatgatttattagggatgtttttaggaatttattaatttttttttgttagttgttggggtagtatattaacggtttttatatttggatagttgtaggtttatagggaggggagggaggtaggggtttgggaagtgtttattttgttttgggtaggacggagagtttaatggttttgaaatagatgttgttttttttgttgttgttgttggtattggaatttatatattttatttttttttgatggaaatttaaattagaaattgatttgttgtaatattgaaaataatttttaaaattttttgggggaattttaagaagttttttttttgtttgtttttttttgtgtgtgtattaataacgaggagggaatatagatattaaaattttaggtaatgaattaagaggaaatgatttttgggtggggaataaggaaggagatggagatgttaatttttttgggtttatattatggttaaggtgtttggagatagtattaggtagattttttgggttttatagatcgaggaagaaggaaggttaaggggcggttagacgggaggttgagtttatgtcgggatggaataattgtatgtttaagggtttaaaaataaaattttggttttttttaagttagagaggatgagatgaagggtaaagggtttagtatatttggggcgtttttttttatattagttttttaattttagaaatatattatttattatttattttggttttatgtatttttttttatatttttcgagtgggaatatacgcgtgtatatatatatttatgtatattttatatagatatagatttggggagatgataaaattgcgtgtattattaataagatttaaatatgtgtatattttgtgtttataggtattcgtttataggggcggatgggagtagaaagtgaaatatttttagggaggtatatagataattatatttaaggtatttttttttgggtatttagattatatttttattttatttgtatataaatttatggttttaggggtttcgtgtagatgtataggaatagcggaataaagatatttttcgtggtggaattttaagttgttaagaggtatgtaaaggtgtatatcggtgtggatttttttatttttcgtttagtttgtacgtgaataggaatatgtatttgtacgtatattaggtatacgtagatagatgcgggttatttttagagtcgtcgatagaggtcgttgcgagacggtattcgcgttttatagtttattcgtttttcggagttttttcgcgtttcggagtttattcgcgtttcggagtttattcgcgtaggtttatttttttatttttgttttcgattttcgtttttgcggtgggggaagtttttggggcggtggttgggattaggtcgggttttaggcgggcgtagattttcgggttaatttttttcgtcgttttagcgcgggaagggggaaatgggaaattcgggttagagta

SEQ ID NO: 1951 - DNA, 8101 bp, Artificial Sequence
  chemically treated genomic DNA (Homo sapiens)
tatatgtttattatttatgaggagataaatattttacggttagatcggttgtattatggacgagtgtacgtggtcgaggtaaaggaagagtaattataggatggttttttttgttttgtgatttaattattttagataattatgatttttatttattttaagaattgtaaaatatggattttatttatataaatatgtttatatatataggttgagtatttttaatttgaaaatttaaaatttaaaatgttttaaaacgtaaattattttgagtattaatatgatatttaaaggaaatgtttattggagtattttagtttttagatttttagattagaaatttttagtgggtaaatataatgtaaatgttttaaaatagaaaaaaaattttgaaatttggattatttttggttataaatattttagagatatttaatttgtatagatttaaaatatgaattatataaaatgtggagtgtttgatgtttatgtggtttttttggtattatttgtttagtttttttatatttttttttttattttataattaattatttatattttaaaaattttatgagttagtttgggtaagatggtaaaattttgtttgtataaaagtaaaatttaataggtatggtggggtgtgtttgtaattttagttatttgggaagttgagatgggaggatcgtttgagtttaggaggtcgaagttgtagtgagttatggttacgttattgtattttagtttgggtaatagagtgagattttgttttaaataaataaataaataaaaaatttgtgagtttataaatgttatgatatagttttttgttatttttaggttttttttagtgtttgagatttggttaatgtttaatatatgtttaggatgaatgaatagaaaagttatgaaaatgttttatatttaaagaaataagagtaatattagtaaaataaaggaaagtttattagattataaaatttttgttatatttatttggttataattattttttaaaaatagtgttttatttatattattaaatatgattagtatttttaggtgaaattttttgagtattttgaatttgtagatatattttaatgtttttgaaaaggtatatttatataatggaatattatttggtaataaaagaaataaaatattgatatttgttataagatataaaaaaagtattatattgtatgattttatttatgtgagataggtgatattagtaaaatgatagagaatttttaaaaattttgttttttataaaagtaatgagagaattggtaaatagggaaaaaaagtttagaattaacgtttttagaattttggaaattatttaaagttttgtagttatttggaaatggtatataatgtataaagatgtaatttatatgatagtaatatattagagaagaggagggaatgatattaatagaaataaagtttttgtatattgttgaaattaagttggtatttatataaatcgtttagtatggatatatgtatagagatagaatgtagattagtggttgtttgggtttgagggtggtaatgggtagtgattataaattgatataagggttttttttaaggtaatagaaatgttttaaaattatattatgatgatgtttgtatgttttcgtaaatttattataaattgtatgtttaaaatgagggaatattattgtatgtaaattattttttaagttgttaaaatataaattaaaattatataaagtattatatttgtatgttagtaatagttattatttgttaagaatggtgttgaatattttatatatattgtattatttaatttattttaattataatgatagtataagatattaggtattattgtgtttatttaagagatgtaaaaattgagtttaataagggtaataaaatataaaggttaaaaaggtaggttttggaggttaggcgtaatggtttacgtttgtaattttagtattttgggaggttgaggtgggtggattacgaggttaggagattgagattattttggttaatattatgaaattttgtttttattaaaaatataaaaaattagttaggcgtggtggtatatatttgtagttaggagtttgagattagtttggttaatatggtaaaatttcgtttttattaaaaatatattaaaaaaaaaattaggttaggtgtagtggtttatatttgtaattgtagtattttgggaggttgaggtgggtagattatgaggttaggagttcgagattagtttggttaatatggcgaaattttgtttttattaaaaatataaaaattagttaggtgtagtggtacgtgtttataattttagttatttgggaggttgaggtaggagaattatttgaattcgggaggtagaggttgtagtgagttgagattatattattgtattttagtttgggtgatagagtaagattttgttttaaaaaaaaaataaaaattattaaatagaatatagtaagtgttgataagagtgtggtgaaattgggattttttagtttttttggtgggaatgtgaaatggtgtatttattgtggaaatattgtggaaatattttagaaaattaaaagtaggattattatatgttttagtagttttatttttggatatttatttaaaataattgaaaatagaatttttataagatatttgtatatttatgtttattgtagtattatttataatagttaagaagtaattaaatgtttattaatagatgaatagataaagaaaatgtggtatatatagatatatgtaatggaatattatttttttttaaaaatgaaggaaattttgttataggttataatatagatgaattttgagaattttatgttaagtgaaataagttagttataaaaggacgaatattttatgattttatttatatgaattatttgaaatagttaatttttagtaatagaaattagaatagtggtgttaggggttggggagggaaaaagggaatcgtttaatgggtatggagttttttttttgtaagttggtaagttttagagatttgttgtgtaatgttgtgtttatagttaataagattgtatagttaaaaatggttaagatggtaaattttatgttgtgagttttttattataataataattaaaataaaataatataaacgtttgtgtaagaaaagattgtattttttgttatcgatgtgtacgtttaatgaatgatttgagttgtatgatttagttagtttttatatgtttttttttttttttttttatttattttatgtttgtataaataaaagtatatttaaaagataagtggatattgggaattttattttattttattgttttttattttttgtttttatttttttttttttttttatgggaataatttaggatatttgatttttaaatgtaaatattttaggaggtaggtattttttcgttttattttatttttttttatgtattttaagtgttttgtttttgatttattcggggtgtttgtttttaaggaatttttggaagtgagtttgtttaaggaagattttgattttttgtttttatgtgtagggaaattttagatatgttagtagtcgtgttttagtgtttagggaggagttgatgatagtgttgtttagattggtagatgtgcgtatttaaggtttttattttatagagatttaaaggtttattttgagcgaggtggggttagaggaagtttttgatataggaagtgggcgtatagtatttgttgtggaaatttgtgtttgtttttttgtttacgttggtgatttttgttaggtaggaagtttttttattcgtaatatttttttagggagtttttgtggtcgtttttggttgttgtttagtattgtgggatggtttggggttttttgtttattgtttttttgtttaagtttttgtagggtttattttatattttatttagattttttttaggaattaagtgtgaaaaagatattattagtgttttagaatttataggaaagttatagagatttaatagatgttgagggttagagaaatttagggtaggaaaataatgtattatagttttaaatagttagaaggaggatattgattatttttaatataaagaaatgattaatgtttgagatgatggatatgttattattttatttgattattaaacgttgtatgtgttataatattattatggattttataagtatttattattattatttattagtttttaaaataatatattttttaaatgaaggagtttattagttagtattttagtatttgagtttttgtttttttaataattgattttatatttttttttaattcggagtttttttttatttatttttaattttttagtagagttgaattttagagaatattttggattttttagaggatattatgttttagtttgtagtaggattttcgttgtttgaggtttagttaattagagttgtttttagatgattaaaatgtgttataaaatgaaattgtttaatttttttggttataagtatgtttttttttaaagattagggtaaaagtataacgttagtatgattaataaaagtagtaaatatttattttgtgtattttatatatttataagtacgtaggtttagtaaaattttttatttttttttttggttttttggtagtcgaaaattttaaggtgatttgcgtatacgagtttttattttttaaatttgtaaaaataaatttgatttgttgtggttttttggggattttaaagttgtaatatttagtttataggttgtttatattttttttttttttttattttttttttagtttgattaaaattgatagttcgagggaaagagagggattttggattttattttatttttgggtagttttgggtagttgtttgggttatagtttatagtagtaaagggtgttatttttttagtttttcggttaaagttaattgtaagcgagttatgtggagtttagatttagttaggtaacgtttttttaagttttggtttgtgatagggaagagtttttagttttgtgatattttaagttatagttacggtgattaatgagtaaatgggtggattgaggaggggttgatggttttttagttattttgattggtagtgtttattatagtgtttgatagattgttttttcgagttattaatcgtaaattttattaatattagtttatttggaaatgtcgagatagttaagagtttgaatgtttgcgggatgttaatatacgatgaaattttatgttttttagagattattttaagttttagaataaaagagtttaatgtttatagttttttaaatgttatttggaagaaaatttatttacgggggggagaaaatgggaaagagtgaaatttaatgtttgagaaaagtgattaaagtttgtataatatttaaaagatatgtttttatttgttaggtatgaaatattaagaaattttgttttttttaaattttttggatgttgtatgtatttttatagagaaatagattttatggttatagatatagttttggaaattggattagggatataatattattatttgtatataatatgtattataaaagtttattggaaaatttaatataaaatattattatgttaattagttataaaatttttgtattgaaatagtgtattagaatatattcgtttttatttaaaagtgagtgtttaatataatttgagtatttgaattgatttttttgtagaatgtggttttgtttgttttataagaggtgaaaaaatgattttattttagtaattgataaatttttagagttatatgatatgtaatttttgtagagtatattttttgtttgtaattaaaagtaaattaagatgggtgatttagttttaattaggatagattatatttttttaaagtatgtttaattaaggttttttttttaggtatgttgttataaattaattagatttatttgtttatttgaataatttgttttttattaaatgtgattattttgtaagtaggtaatgtgatatatattgataattataagttatttgttatttattaggatagattgtataatagatagaatgatattattattggttgtatttcgtttatatgtaaattttaattgtgtttttagtaaaataatattttttttatattttgatttttttttaggtaagtttgtttatataataatataatttatttatttgtaatatattttttgttttaaatatggtttttaatagtttaaaggaatattatattggaaattgtggttttattgtgtatgatttatatttattggtaattttggaaggggttttagtaatatttgggagattttattttcggagtatatgaggtttttgttttttttttttgttaggtggttttttttttatttttattggattaggtagagatttttatggttatgagtgaataagaatggattgtttattttaagattttttttgagtatagtttttaagttttatagatatatgtgttatttaaagaagatttgataaaagattattttttattttgaaatagtttttttgatgtttttaagatagggtatataggagattagagaaataaattagggataatatttgattttgtttatttattattagatagggttttatttttgttgtttaggttggagtgtggtggcgtagtcgtggtttattgtaatttttattttttaggtttaagcgatttttttattttaatttttcgagtagttgggattataggtatgtgttattatgttcggttaattgttgtattttttggtagagatgaggttttattatgttgtttaggttgatttcgaatttttgggtttaagtgatttattcgtttcggttttttaaagtgttggaattataggtttgagttattataattagttaatatgtgatttgaatttgtgtattgatttgttttgttaaaataaaggatatgtttataattttttttaaagatagaaatttaaataattttaatggttggtataagaagaattgttttttttttgttggagggatttttaattagaatttttttaaaaagatattagtttatgaaaagaaaattataattttttttatttagatgaaaatgtataatttgtattatattggagagagataatatataggagatagaaataattaaattaagattgaataaggaaataagattaatttaaggagagttttttaggttgagtttttgtgtgttcgggtggattagatgttcgtgaatagttttgtatgggaattttatgtacgttttttttttttggtttttttgttgtttatggtttagtgagtggtaataaagtgattttattgattgtggtatgattgtttaaattttagttaagatttttattttttataatttattatttttattatattgtttttttattagtttaaatttatatttggagagaaaacggttagttaaagataatttggatttgaagtgatttgtttagatgtttttttttttaaggacgagtttttttatttgtttatttttattttttttatttgtttttaaaatagttgtgagaagagaggagtttttttttattttttatttttatacgtgttttgtttttgatttttttattatgtattttatatttttattagggtatgaaaattaaatagtttgagagaaaaataagtggatatgataggtggttgaaattaaaaatatttatatttattgaaggaaagaaggtttgaaaaatgtatgttttagtcgggtttagtggtgtatatgtttgtggttttagttacgttggaggttgaggtaggaggattgtttgagtttaggagtttaagattttagtggattataagtatatttgtgaatagttattatattttagtttgggtagtagagtgagattttgtttaaaaaataaaaatgatgtgaatgttttatagtgagaggtgttatatgttttggatagtaattgttttttttttttgtattgattaaatattttgtttgaaaaatagg

SEQ ID NO: 1952 - DNA, 8101 bp, Artificial Sequence
  chemically treated genomic DNA (Homo sapiens)
tttattttttaaataaagtgtttaattaatataaagaaagaaaataattattatttaaagtatgtgatattttttattgtgaagtatttatattatttttattttttagatagggttttattttgttgtttaggttggagtgtagtgattatttataggtgtgtttatagtttattagagttttgggtttttaggtttaagtaatttttttgttttagtttttaacgtagttggaattataggtatgtgtattattgagttcggttgaggtatatattttttaaatttttttttttttagtgagtgtgaatatttttaattttaattatttgttatgtttatttgttttttttttaagttgtttggtttttatgttttggtgggagtgtgagatgtatggtggggaaattagagatagggtacgtgtggagatgggggatgagaaggggtttttttttttttataattgttttgagggtaggtggagaaggtggaaatggataaataaagagattcgtttttagaggggaggatatttaagtaaattattttaagtttaaattatttttggttagtcgttttttttttaagtgtgggtttgggttggtgagggggtagtatagtaggagtagtgggttgtggggaataggagttttaattgagatttagataattatgttataattagtggagttattttattgttatttattaggttatgggtaatagagaagttaggggaggggagcgtgtatgaggtttttatataggattgtttacgaatatttggtttattcgaatatatagaggtttagtttgagggattttttttgggttggttttgtttttttgtttaattttgatttgattatttttattttttgtatattatttttttttagtataatataagttatgtatttttatttggatgaaaagaattataattttttttttatgaattaatatttttttaaaaggattttagttaagaatttttttaatagaaaaaaaataattttttttatattagttattaaaattatttagatttttgtttttaaaggaaattatagatatgttttttattttggtagagtaaattagtgtatagatttaaattatatattggttggttgtggtggtttaagtttataattttagtattttgggaggtcgaggcgggtggattatttgagtttaggagttcgagattagtttgggtaatatggtgaaattttatttttattaaaaaatataataattagtcgggtatggtggtatatgtttatagttttagttattcgggaggttgaggtgggaggatcgtttgaatttgggaggtggaggttgtagtgagttacgattgcgttattatattttagtttggataataagagtgaaattttgtttaataataaataaataaaattagatattgtttttaatttatttttttgattttttatatattttattttgaaagtattaggaaaattattttaagataaaggatagttttttattaaattttttttaaatagtatatatgtttgtaaaatttggaaattatatttaaaggaaattttgaagtagatagtttatttttatttatttatggttataaaggtttttatttggtttagtggaagtgagaaagaagttatttgataggagagagaggtagaagttttatgtgtttcgggagtggaattttttaggtgttgttagaattttttttaaaattattaatgaatatagattatgtataataagattatagtttttaatataatgtttttttaagttattaggaattatgtttagggtaaagagtatattgtaaataaatagattatgttgttatatgaataggtttgtttaaaggagaattaaagtatgaaaggaatgttattttgttgaaagtataattgagatttatatgtgaacgaaatgtagttaatgatggtgttattttatttattatataatttgttttaataagtggtaagtaatttataattattagtgtatattatattatttgtttataaaataattatatttggtaaagagtaagttatttaaataagtagatagatttggttagtttatgataatatgtttgagaaaaaagttttaattaaatatgttttgggggagtatagtttgttttgattaaaattaaattatttattttaatttgtttttgattataagtagaaaatatattttgtaagagttatatattatgtgattttgaggatttgttagttattaaaatagaattatttttttattttttataaagtaagtaaaattatattttataaaaaaattagtttaagtatttagattatattgaatatttatttttaaatgaaaacgaatgtgttttaatgtattattttaatataggggttttataattagttaatatgatgatgttttatgttaagttttttagtaaatttttgtaatatatattatatataaatgataatattatgtttttaatttagtttttagggttgtatttgtagttataggatttatttttttgtaagaatatatgtagtatttaggaagtttaaagagagtagaattttttaatgttttatgtttggtaaatggaagtatgttttttaggtattatgtaaattttgattattttttttaagtattggattttatttttttttattttttttttttcgtgggtaaatttttttttaagtagtatttggaaagttataggtattggatttttttgttttgaggtttgggatggtttttaaagggtataaagttttatcgtatattaatatttcgtaagtatttaagtttttaattgtttcggtatttttaggtgggttgatgttaatggggtttgcggttaatagttcgggagagtaatttgttaggtattgtaataaatattgttagttaaggtgattgggaggttattagtttttttttagtttatttatttatttattaattatcgtaattgtaatttaaaatgttataaagttggaaatttttttttattataaattaaaatttaaaaggacgttatttggttgggtttaaattttatataattcgtttgtagttgattttgatcgggaggttgaagaaatggtattttttgttgttgtgaattgtagtttagataattgtttagggttgtttaaagatagggtgaaatttagagtttttttttttttttcgggttattaattttaattaggttagaaaagagatggaggaaggggaagaatgtaggtaatttgtgggttaaatattataattttggagtttttagaagattatagtaggttagatttgtttttgtaggtttaaaaagtgggaattcgtatgcgtagattattttggggttttcggttattagggggttaggaaagaaagtgaaaggttttgttaagtttacgtatttatggatgtatggaatatatagaatgagtgtttgttatttttattaattatgttaacgttgtgtttttgttttgatttttaagaaaagatatatttatagttagagaaattaaatagttttattttatggtatattttaattatttgaagatagttttggttgattggattttaaataacgagagttttgttgtaagttagaatataatgttttttaagaaatttaggatattttttggaatttaattttattggggagttgagagtgggtagagggaggtttcggattagagaaaggtataaggttagttattgggaaagtaggggtttaaatattaagatgttggttggtgagtttttttatttaaaaaatatgttattttaaaaattgataaataataatgataaatatttatggagtttatagtgatgttgtgatatatataacgtttagtgattagataaggtaataatatatttattattttaaatattgattatttttttgtgttgggaatagttaatattttttttttagttatttgaaattatagtatattatttttttattttggatttttttaatttttagtatttattgaatttttgtggtttttttatgaattttgagatattgatgatgttttttttatatttaatttttgaagggagtttaagtaagatataagataagttttgtagaaatttgaatagagaaataatagatagagggttttaaattattttatagtgttggatagtagttaaaaacggttataggagttttttagggaaatgttgcggatgggaaaattttttatttgataagagttattagcgtaggtaggggggtaggtatagatttttatagtaagtgttatgcgtttattttttgtgttagaggttttttttagttttatttcgtttagggtgagtttttgagtttttgtgaagtagaggttttggatgcgtatatttgttagtttagatagtattgttattagtttttttttagatattggggtacggttgttggtatgtttgaagtttttttatatatggaaatagaaagttagggttttttttaggtaggtttatttttaggggttttttagaggtagatatttcgaatgaattaaaaataagatatttaaaatgtatagggagaaatgaaataagacggggaaatatttgttttttggagtatttatatttagaagttaggtgttttgggttatttttatgaaggaaggaaaaaaaatgaaggtagggaataaggggtaataaaatgaaataaaatttttagtgtttatttattttttaaatgtgtttttgtttgtgtaaatataaggtgagtgagaaagagggaaggaaggtatatggaaattgattgagttatgtagtttaggttatttattaaacgtatatatcggtgatagaaaatataatttttttttgtataaacgtttatattattttattttaattgttattgtggtaaaaaatttataatatgaaatttattattttaattatttttaattgtatagttttgttaattataagtataatattgtataatagatttttagaatttattagtttgtaaaagggaaattttatatttattgaacgattttttttttttttttttagtttttggtattattattttaatttttgttgttaagaattgattattttagataatttatataagtggaattatgaagtattcgtttttttgtgattggtttgttttatttagtataaggtttttaaggtttatttatattatagtttatgatagaattttttttatttttaagggggaataatattttattgtatatatttatatatattatattttttttgtttatttatttgttgatggatatttggttgttttttggttattgtgaataatgttgtaatgaatatgaatgtgtaaatattttgtgaagattttgtttttagttattttagatagatatttagaagtgggattgttggagtatatggtaattttatttttaattttttgagatatttttatagtgtttttatagtggatgtattattttatatttttattaagagggttgaagggttttaattttattatatttttgttaatatttgttatgttttgtttggtaatttttgttttttttttgagataaagttttgttttgttatttaggttggagtgtagtggtgtgattttagtttattataatttttgtttttcgggtttaagtgatttttttgttttagttttttaagtaattgggattataggtacgtgttattatatttggttaatttttgtatttttagtagagatagggtttcgttatgttggttaggttggtttcgaatttttgattttatgatttgtttattttagttttttagagtgttgtaattataggtgtgagttattgtatttgatttaattttttttttaatgtatttttggtagagacgaggttttgttatgttagttaggttggttttaaatttttgattgtaggtgtgtgttattacgtttggttaattttttgtatttttagtagagatagggttttatggtgttagttaggatggttttaattttttgatttcgtgatttatttattttagttttttaaagtgttggaattataggcgtgagttattgcgtttggtttttaaagtttgtttttttaatttttatattttgttgtttttgttgaatttagtttttatattttttaaataggtatagtaatatttaatgttttgtgttattattataattaaggtaaattaaatgatataatatatataaagtgtttagtattatttttaataaatggtagttattattaatatataaatatgatgttttatataattttaatttatattttagtagtttaaggaataatttatatataataatatttttttattttaagtatataatttgtaataaatttacggaagtatgtaaatattattataatgtaattttagaatatttttattattttaagaagaatttttgtgttaatttgtagttattatttattattatttttaaatttaggtaattattaatttatattttgtttttatgtatgtgtttatgttggacgatttatataaatgttagtttaattttaatagtatataaaaattttgtttttattagtattattttttttttttttttggtatgttattattatataaattgtatttttatatattgtgtgttatttttagatggttgtaaggttttgagtaatttttagagttttgaaaacgttgattttgaattttttttttttgtttgttagtttttttattgtttttatgaaggatagaatttttagagattttttattattttattgatattatttgttttatataaatagaattatataatatgatattttttttgtgttttatagtaagtattaatattttgttttttttattgttagatagtattttattgtatagatgtatttttttagaaatattaaaatatgtttgtaagtttaaagtatttaaaaagttttatttagaggtattggttatatttaataatataaatggaatattatttttaaggaatagttgtaattaaataagtataataaaagttttatgatttgatgagtttttttttattttgttagtattatttttatttttttggatgtaaaatatttttatagtttttttatttatttattttaagtatatgttgaatattaattaggttttaggtattgagggagatttgaggatgatagagagttatgttatagtatttataagtttataggttttttgtttgtttgtttgtttgagatagggttttattttgttgtttaggttggagtgtagtagcgtgattatggtttattgtagtttcgattttttgggtttaaacgatttttttattttagttttttaagtagttgggattataggtatattttattatgtttattgaattttgtttttgtgtagatagagttttgttattttgtttaggttgatttatggggtttttaagatatggataattaattgtgaaatgggagagaaagtgtaaaaaggttggatagatggtattaagaaagttatatgggtattaaatattttatattttatataatttatgttttgaatttatataagttgggtatttttgaaatgtttgtgattagaagtgatttaagttttagaattttttttttattttggaatatttgtattgtatttatttattgagaatttttaatttgaaaatttgaaagttgaaatgttttagtgagtattttttttgagtgttatgttggtgtttaaaatagtttgcgttttggggtattttggattttggatttttagattaaggatgtttaatttgtatatataaatatatttatataaatagaatttatattttataatttttaaaatgagtaaaaattatgattgtttgaaataattaagttataaaatagaaaggattattttatggttgttttttttttatttcgattacgtgtattcgtttatgatgtagtcggtttggtcgtggggtgtttgtttttttatagatgatggatatgtg

SEQ ID NO: 1953 - DNA, 7624 bp, Artificial Sequence
  chemically treated genomic DNA (Homo sapiens)
  unsure 4, 23, 32, 35, 45, 47, 51, 59, 72..73, 83, 89, 95, 105, 113: n is a or g or c or t
  unsure 118, 139, 149, 159, 162, 173, 186, 188, 221, 225, 227, 231: n is a or g or c or t
  unsure 243, 250, 268, 287, 318, 338, 376, 386, 403, 408, 424, 469: n is a or g or c or t
  unsure 497..498, 505, 510, 532, 534, 569, 576, 586, 599, 618: n is a or g or c or t
  unsure 627..628, 641, 651, 666, 672, 685, 691, 694, 696, 703: n is a or g or c or t
  unsure 705..706, 709, 711, 713, 715, 736, 771, 779, 782..783: n is a or g or c or t
  unsure 787, 793, 803, 832: n is a or g or c or t
  unsure 834..835, 841, 870, 873, 884, 887, 890, 911, 913, 915..916: n is a or g or c or t
  unsure 919, 922..923, 926, 937..938, 941, 944..945, 954, 956: n is a or g or c or t
  unsure 976..977: n is a or g or c or t
  unsure 981..982, 985, 991, 994, 1001, 1006, 1015, 1018, 1023, 1026: n is a or g or c or t
  unsure 1035, 1038, 1041, 1044, 1047, 1049, 1052, 1055, 1066, 1069: n is a or g or c or t
  unsure 1071, 1077, 1080, 1083, 1086, 1088, 1090, 1093, 1096, 1102: n is a or g or c or t
  unsure 1110, 1113, 1116, 1118..1119, 1121, 1123..1124, 1127: n is a or g or c or t
  unsure 1129..1130, 1133, 1139, 1141, 1143, 1147, 1150, 1152..1153: n is a or g or c or t
  unsure 1159, 1164, 1167, 1170, 1172..1173, 1175, 1184..1185, 1187: n is a or g or c or t
  unsure 1190, 1193: n is a or g or c or t
  unsure 1195..1196, 1198..1199, 1201, 1205, 1207, 1210..1211, 1213: n is a or g or c or t
  unsure 1216, 1219, 1225, 1228, 1231, 1237, 1240, 1243, 1246, 1249: n is a or g or c or t
  unsure 1252, 1254..1255, 1260..1261, 1263..1264, 1266, 1269,  1272..1273: n is a or g or c or t
  unsure 1275, 1278, 1284, 1287, 1290, 1293, 1296, 1298, 1301..1302: n is a or g or c or t
  unsure 1305..1306, 1308, 1310, 1313, 1315, 1325, 1331..1332, 1335: n is a or g or c or t
  unsure 1338, 1343..1344, 1347, 1352..1353, 1356, 1359, 1364, 1370: n is a or g or c or t
  unsure 1376..1377, 1380, 1385, 1391, 1394..1395, 1397, 1400, 1403..1404: n is a or g or c or t
  unsure 1406, 1409..1410, 1412, 1415..1416, 1418, 1421, 1424, 1427: n is a or g or c or t
  unsure 1430..1431, 1434, 1439..1440, 1442, 1445, 1451, 1454, 1462: n is a or g or c or t
  unsure 1465, 1468, 1470..1471, 1473, 1476, 1478..1479, 1481..1482: n is a or g or c or t
  unsure 1484..1485, 1487..1488, 1490, 1493, 1495..1496, 1499, 1502: n is a or g or c or t
  unsure 1504..1505, 1507, 1510, 1517..1518, 1520..1521, 1526, 1529: n is a or g or c or t
  unsure 1532, 1535, 1538, 1540..1541, 1543..1544, 1552, 1557..1558: n is a or g or c or t
  unsure 1571, 1574, 1586, 1591, 1594, 1596..1597, 1600..1601, 1603: n is a or g or c or t
  unsure 1615, 1617, 1620, 1623, 1626, 1629, 1631..1632, 1637, 1643: n is a or g or c or t
  unsure 1646, 1649, 1655, 1658, 1661..1662, 1670, 1673, 1678..1679: n is a or g or c or t
  unsure 1681, 1684, 1693, 1696, 1699, 1705..1706, 1711, 1715, 1717..1718: n is a or g or c or t
  unsure 1723, 1726..1727, 1735, 1738..1739, 1742, 1747, 1750..1751: n is a or g or c or t
  unsure 1753, 1756, 1759, 1762..1763, 1765..1766, 1768, 1771, 1774: n is a or g or c or t
  unsure 1777, 1779..1780, 1782..1783, 1786, 1789, 1791..1792, 1795: n is a or g or c or t
  unsure 1798, 1800..1801, 1806, 1809, 1812..1813, 1815..1816, 1824: n is a or g or c or t
  unsure 1827..1828, 1830, 1833, 1836, 1843, 1845, 1848, 1851, 1857: n is a or g or c or t
  unsure 1859, 1862..1863, 1868, 1871, 1873..1874, 1877, 1883, 1886: n is a or g or c or t
  unsure 1889..1890, 1895, 1898, 1904, 1907, 1910, 1913, 1916, 1918..1919: n is a or g or c or t
  unsure 1922, 1925..1926, 1928, 1931, 1933, 1936, 1938..1939, 1941: n is a or g or c or t
  unsure 1943..1944, 1946, 1949, 1951..1952, 1954, 1957, 1962, 1965: n is a or g or c or t
  unsure 1968, 1973, 1976, 1978, 2000, 2003, 2005, 2012, 2014, 2016: n is a or g or c or t
  unsure 2018..2019, 2021, 2024, 2026, 2028, 2031, 2033, 2035..2036: n is a or g or c or t
  unsure 2038, 2040, 2044..2045, 2047, 2049, 2056, 2071, 2074, 2080: n is a or g or c or t
  unsure 2082, 2084, 2086, 2091, 2093, 2095, 2097, 2099, 2103, 2109: n is a or g or c or t
  unsure 2111, 2113, 2116, 2118, 2120, 2130, 2138, 2140, 2150, 2153: n is a or g or c or t
  unsure 2155, 2161, 2219, 2224..2225, 2227, 2231, 2233, 2235, 2237: n is a or g or c or t
  unsure 2239, 2241, 2243, 2246, 2248..2249, 2252, 2254, 2256, 2258..2259: n is a or g or c or t
  unsure 2262, 2264, 2268..2269, 2272, 2277, 2279, 2281, 2283..2284: n is a or g or c or t
  unsure 2286, 2289..2290, 2292, 2295, 2298..2299, 2302, 2306, 2309..2310: n is a or g or c or t
  unsure 2313..2314, 2316, 2318, 2320, 2325, 2327..2328, 2331, 2333: n is a or g or c or t
  unsure 2336, 2338, 2342..2343, 2345, 2347..2348, 2352, 2356..2357: n is a or g or c or t
  unsure 2362..2363, 2366..2367, 2370, 2372, 2375, 2377, 2384, 2387: n is a or g or c or t
  unsure 2390, 2392, 2394..2395: n is a or g or c or t
tttnttggaggtggttttttttntttattttnagnagggttgttnantcgngggggcgngtattcgcggttnnttttttaaanaagganattgtntttttttatnttgtttgntgatnatgtttgggtttaagaagatnagaaaatggncgggtttttnttntttcggagttngttttttagtaanantacgggggtagttattttttttttttttttttnttgntnacgngcggtgcggagntgttatntcgtacgtttttttattntaataagaagatggttgtnattgttttttttttttgttttatcgataaantatttgttgggagacgttanggtcgatcgatttttagcgcgttttattatttgttgtncgggggtcgntttttattttttttttnttttnataggttgatagtagnaaaagggagatgttttattcgttttttttgattgttgttcggggnatagttttcgtagtttttttttttaatnnttttatngtatnatatttttgttttgtttttttngntttttggggtgggttttaagagaagtttagaggtngtgttgngcgatttttnggatcgatagggnatatgttttatatattttnttttttttnntaatagggggggngttaaagganacgggtagtatgtantatggncgcggttttaganttttanatntntttttgntnnttngntntntttcgttttttttacgagcgngtcggagagtagagaagaaagaagtaattatatanaagattanttnnaatnttcgtnttgggcggtntcgagggttttgatatgttgtttttgttntnnaaaaanttttcgttgtcgtatagatattattaatntantagatagaganttntanttttggtcggtcgttcggcgnantnnttncgnncgntatttattatnnttnatnnnaaaagaantntggtcgttcgatatcgtganntatnnaancgtagntgntggttgnggttnatgaggagnttntcgtngtnattattatnagnttngtngtngncgnatnacgttataatntgntnttgttntantanttntntnttnatnatgtgnttattatnttngtnanngnanngtnanntgnaagggngntnattnaangnntagcgnttttnttnatngnngntttaggttnngnttnttngnngnntntttnangtnngnatnttnaaaagntgngtntagagnttngancgnttnggngnntcganntnngntanttnngnttntagganggnttnttnttntngtnntgnngntnaanantttttcgttncgttannagnagncgtgnntantttannaanggnggtantttttnataagnnggnttgtntagatngtnnantantanntnttnngncgnntnttnttnatnagnnttnttttnntnttnttaatnaantggtgaanganatntnngntgngnnanntnntnnanttnannagntgntnnanttncggtgtnntnntcgangtnttntanggngnntnntttttaanagttnnnttagaagtattnttnatagttggtttntagtngtntnnttnntntaaggatgaagngnatngtntantangnnggggncggtgnttnatnatttanttnttnnaataggtntgntggtnngnatnttaacggangtngtngtggtnngttgntttntnnttganagnnaatagttnttnnttnttgtnagnntntanttnttnngnntngtnagntantnntnngtncgntnnttnatntnnttttnttnggnngnntttttttnttnntnttntanaaaaagngntgngtngttttngnggnngggantantnntantaaatnganggnnttttnttngtaagnagncgnttntantnnttnatnntnttnantangnntntnntnggngnntnttntaagnttnaanggganaangngaaattattttttttttttgtnatnanattcgtngngngnnanaanantngtngnanngngntgtnngntntaagtgngtaaggttggggganttnatattnantngncgttntntntngnttantttttntnanagntntntggggtgttntttatagngnaaggtggtanganantttttntggtgtttttttagagagagagagagagagagagagagagagagagagagagagaganagatnntnaggntntnanangntnatngnnatngngntnngtngnatgnnngnttatntntngnntnttnngntangtnnntntttnagnnttnnantntnttagngnnagngnggngnatgnntntnnnttntagnnaggtnncgnnnantnttngntcgaggnggnttnangnnttataaggttataagagttcgttttgtttggtttttattaaggtttgttgtagtcgtttatttaggtttaaggtcgttatttgaatgtcgtttgttatttagttattttagtttattgtaggtttatgggaggtgatttaggtaaattgggtttttgaagaatgtagaatttgagagatatgggtttaaagttagttatttcgtttatttttttttgttgttgttattttttttgtttttttttttttttttttttttgaggtagagttttattttgttatttaggttggaatgtagtagtataattttagtttattgtaattttcgttttcggggattaagcgatttttttgttttagttttttaagtagttgggattataggcggttattatttcgtttggttaatttttttttttttttttttttttttttttttttttttgagatggaattttattttttcgtttaggttggagtagtggcgcgattttggtttattgtaatttttattttttgattttaagcgatttttttgttttagttttttaagtagttgggattataggtggttattatttcgtttagttaattttttttttttttttttttttttttttttttttttttgagatggaattttattttttcgtttaggttggagtagtggcgcgattttggtttattgtaatttttatttttcgattttaagcgatttttttgttttagtttttcgagtagttgggattataggtattcgttattatgttcggttaatttttgtatttttaatagagatagggttttagtatgttggttaggttggttttaaatttttgattttaagtgatttatttgtttggggtttttaaagtgttaggattataggtttgagttatcgtttatttttattcgattttgaggagtttttttaatttttgagtttgtttttttatttttataatggagatgttgatttttattttataggtagtagatgtgttttacgggagatagtgtatagtgagcgtttagtgaatatgaattattatttatttttagcgcggtagtttttttattttgtgttgagatagggagatggatcgtgaagtgtttaggtttatattgtaagggagtttgggttttgtattaggtttggagttttaattttaggttttgtgttattgtgaaggttttttattttgttttttttagtttttgtttttgtgttattttttttgtttgattttttaatttaggtttttttttttttttatttattttttgtttttatttttttttgtagttgaggtgtatatagtatcgtttttattttataagttttaataatgttttgtgggtttttttttttttattagtttatttaggtagtgacgtatgtgtattttttttttggtggggttaaggtcgagtttttggatttgatgaggttatttggagttttttatattattggtgatttggtttttagttaatgatgggtgtttttttagtttggttttaggggaaatggaaattttttgtttgtttgttgttcgtgataatttttttgttttttgtttataatagaaagttttgatagtttgtggtttgtatttgggggtttgagcggttttgtttgttttgttttttatttgttgtaggagatagtgttaagttttttatttttgttaggggttgtggttttgtttttatttgaattcgaattgttgttttattttttaattatgattaatgggtgttgttttggtttttgattatagtaggggtcgttattatgtttttttgaagatatgaggttgttttgtttgttttttgaaataggttgttttttagtattttgtttgtaagagggatggtagtttgttatttatttatttttgattataataaagttattgttttatgttttgagatgatatgggaattgttttttcggtttgatttgattgtaatatgtatggtttgtttattagttatttaatagggatattgtttttttttttgattttgaacgatgttatttttgttgttagatagaaataaaagggttttttagttgtaacggtggtgttgaggtgttgtttgttttttattataagttgagtgtgtgttcgtttgttttttgtttattgggtttaaaggttgtttttgaattttttgtttagatgtattttggagggtagaagggagggtttattagatattttttttttaattttaaattttttagtgttattttgggatagtaggggaagatggatttggtttggagatgtaggggatttttaggggttgagaggtaggggtttatggtggtaggaagtttggcgtgttagagggttgtggttgggttgttggggttcggttggttgcggagtttttcggaggaggtaggaagttagggtgggacgtgggcgcggggagataggtggtggttacgacggcgaagggagttgagattgtttaggtagttaggttaggttaggaggattatgtgaatggggttagagggttttcgggttgggtaggtaaggagcgttggtattgggggcgtaggcgtcggggtgagaggtttgatagtagacggttgtagttgtgcgggtttaggttttttagggatgtagtagttttttgtggttggggagagaagattttcgtttaaggttaggtgggaggtaggtagtgtagttgggtcgttttttttttgcgaagttggtgtcgtttgtttttgtcgtgttgtttattagtggttttatttgattgggagcgtgttttttggatattaggtatatggatagttaggtgttaaaaaggtttttagaaattattaagtttagttttttaggttatgaggatgaggtttttgaggtttagagagaataaggtatttattgtttacggttttttagtaaggtagtggtagggttgagagtgatggttgaggttgtggttatttcgtttggagtagggtgatggataggttggatttagaggatttaggaatttttttggtttttggggtagattttagtgataagaattttttgagaaagagagagagagagagagagagagagagagagagagagagagatagagattatttaaggtatttagatggatatgcgaggagtgattttagttttagcgatcgagggaagaattttttgatgggcgtgaattgatatgtgtgggggtgtttattatttgggatggagttttagggtggatggatatatttgatttgagtatgggaagttggaagtgaaagagaatgatgggagaaaggaagaggaagtattatttttattttagataggggtgtagttggttttgggtgaggaagcgttgaatttttatttggaaagttattatttttgtttttgttaagcgttatagtaggatgtttttttttcgtttttggttttttttcgttttagttttgtttgtgtagggttagttggttttgttgatttttgttttaaattttagggaggtggagagagattggggaggtatagttgttatttgtttatttttttattttttaattttgagttttaatttttttgggaagtttttatttagttagatttttaggttttttttgtttcgttggagttttttttgatatatatttttcgtttagttagttggttttagttttttttttgtttatagttttaagttttgtagttttttgtgggggttagggaatatggtggtttttttcgtattttagggagggttatttattttggataggtatgagtagttttttttatttagttttatgttgatagacgaattagatagggttttttgtttttgggttttaggaatagaggttttttttaaagagagaagggttaagtggataagggttaagaataggttgagtattggtttagaggaggggagaaggtgttttttaagatttggaaagttttttgtaagagttaagatagttttgagaaggagaaagatttatttttaagagtgcgtaggatatgaagttaaggttattatttttggattttgttttttgggtattacgagggtagagattttagagtaagattaaaggttagagagtttataggtgtggtgtggagtagagaatgtgtattttagagataggtcgatttagttataatttcgttggattatttttttgagtaagtggttttatttttttttttgagttttagtttatttatttgtaaagaggtaataattaagttgggtacggtggtttatatttgtaattttagtattttgggaggttgaggcgggtagattatttgaggttaggagtttgagattaggttggtcgatatggtgaaattttgttttttcgttaaaaatgtaaaattagttcgagcgtggtggtaggtgtttgtaattttagttatttagggggttgaggtagaattgtttgaattcgggatgtataggttgtaatgagtagagatcgagttattgtattttagtttaggtaatagagcgaaattttattttaaataaaaatgtttttcgggtttaagtgatttttttgttttagttttttaagtgttaggattaataggcgcgttattatgtttagttaatttttgtatttttagtagagatggagttttattatattggttaggatggtttcgattttttgatttcgtgattcgtttatttcggttttttaaagtgttgggattataggtatgagttatcgtatttggttagtatatagtaggtgtttaagggaggtggggtattttttttttttgtaaatgatgtattaaagggagggttgtttatatttaaattatgtttatttagtattttggtgggttagtgaattatttatttttttatatttgtggtgtggttttgtaaattagtttgttttttgtatatagtgtgaggagtgtgagaatttaggtaggttggattttgagcggggttatgggatttattttagaagagggttttttacgtagttatatatagatatatatatatatatatatatataagttaaaatattatatatattatgggaaaatttacgtgtatagatgtgtttagaggtagggtaggggttatatataaaatatagattatattttataattttatgtatatatttacgagttgatggttttaaggttaagtttaatttagtgaaagtaatttttagtggggt

SEQ ID NO: 1954 - DNA, 7624 bp, Artificial Sequence
  chemically treated genomic DNA (Homo sapiens)
  unsure 5230..5231, 5233, 5235, 5238, 5241, 5248, 5250, 5253, 5255: n is a or g or c or t
  unsure 5257..5258, 5262..5263, 5268..5269, 5273, 5276..5277, 5280: n is a or g or c or t
  unsure 5282..5283, 5287, 5289, 5292, 5294, 5297..5298, 5300, 5305: n is a or g or c or t
  unsure 5307, 5309, 5311..5312, 5315..5316, 5319, 5323, 5325..5326: n is a or g or c or t
  unsure 5330, 5333, 5335..5336, 5339, 5341..5342, 5344, 5346, 5348: n is a or g or c or t
  unsure 5353, 5355..5356, 5361, 5363, 5366..5367, 5369, 5371, 5373: n is a or g or c or t
  unsure 5376..5377, 5379, 5382, 5384, 5386, 5388, 5390, 5392, 5394: n is a or g or c or t
  unsure 5398, 5400..5401, 5406, 5464, 5470, 5472, 5475, 5485, 5487: n is a or g or c or t
  unsure 5495, 5505, 5507, 5509, 5512, 5514, 5516, 5522, 5526, 5528: n is a or g or c or t
  unsure 5530, 5532, 5534, 5539, 5541, 5543, 5545, 5551, 5554, 5569: n is a or g or c or t
  unsure 5576, 5578, 5580..5581, 5585, 5587, 5589..5590, 5592, 5594: n is a or g or c or t
  unsure 5597, 5599, 5601, 5604, 5606..5607, 5609, 5611, 5613, 5620: n is a or g or c or t
  unsure 5622, 5625, 5647, 5649, 5652, 5657, 5660, 5663, 5668, 5671: n is a or g or c or t
  unsure 5673..5674, 5676, 5679, 5681..5682, 5684, 5686..5687, 5689: n is a or g or c or t
  unsure 5692, 5694, 5697, 5699..5700, 5703, 5706..5707, 5709, 5712: n is a or g or c or t
  unsure 5715, 5718, 5721, 5727, 5730, 5735..5736, 5739, 5742, 5748: n is a or g or c or t
  unsure 5751..5752, 5754, 5757, 5762..5763, 5766, 5768, 5774, 5777: n is a or g or c or t
  unsure 5780, 5782, 5789, 5792, 5795, 5797..5798, 5801, 5809..5810: n is a or g or c or t
  unsure 5812..5813, 5816, 5819, 5824..5825, 5827, 5830, 5833..5834: n is a or g or c or t
  unsure 5836, 5839, 5842..5843, 5845..5846, 5848, 5851, 5854, 5857: n is a or g or c or t
  unsure 5859..5860, 5862..5863, 5866, 5869, 5872, 5874..5875, 5878: n is a or g or c or t
  unsure 5883, 5886..5887, 5890, 5898..5899, 5902, 5907..5908, 5910: n is a or g or c or t
  unsure 5914, 5919..5920, 5926, 5929, 5932, 5941, 5944, 5946..5947: n is a or g or c or t
  unsure 5952, 5955, 5963..5964, 5967, 5970, 5976, 5979, 5982, 5988: n is a or g or c or t
  unsure 5993..5994, 5996, 5999, 6002, 6005, 6008, 6010, 6022, 6024..6025: n is a or g or c or t
  unsure 6028..6029, 6031, 6034, 6039, 6051, 6054, 6066..6067, 6073: n is a or g or c or t
  unsure 6081..6082, 6084..6085, 6087, 6090, 6093, 6096, 6099, 6104..6105: n is a or g or c or t
  unsure 6107..6108, 6115, 6118, 6120..6121, 6123, 6126, 6129..6130: n is a or g or c or t
  unsure 6132, 6135, 6137..6138, 6140..6141, 6143..6144, 6146..6147: n is a or g or c or t
  unsure 6149, 6152, 6154..6155, 6157, 6160, 6163, 6171, 6174, 6180: n is a or g or c or t
  unsure 6183, 6185..6186, 6191, 6194..6195, 6198, 6201, 6204, 6207: n is a or g or c or t
  unsure 6209..6210, 6213, 6215..6216, 6219, 6221..6222, 6225, 6228: n is a or g or c or t
  unsure 6230..6231, 6234, 6240, 6245, 6248..6249, 6255, 6261, 6266: n is a or g or c or t
  unsure 6269, 6272..6273, 6278, 6281..6282, 6287, 6290, 6293..6294: n is a or g or c or t
  unsure 6300, 6310, 6312, 6315, 6317, 6319..6320, 6323..6324, 6327: n is a or g or c or t
  unsure 6329, 6332, 6335, 6338, 6341, 6347, 6350, 6352..6353, 6356: n is a or g or c or t
  unsure 6359, 6361..6362, 6364..6365, 6370..6371, 6373, 6376, 6379: n is a or g or c or t
  unsure 6382, 6385, 6388, 6394, 6397, 6400, 6406, 6409, 6412,6414..6415: n is a or g or c or t
  unsure 6418, 6420, 6424, 6426..6427, 6429..6430, 6432, 6435, 6438: n is a or g or c or t
  unsure 6440..6441, 6450, 6452..6453, 6455, 6458, 6461, 6466, 6472..6473: n is a or g or c or t
  unsure 6475, 6478, 6482, 6484, 6486, 6492, 6495..6496, 6498, 6501..6502: n is a or g or c or t
  unsure 6504, 6506..6507, 6509, 6512, 6515, 6523, 6529, 6532, 6535: n is a or g or c or t
  unsure 6537, 6539, 6542, 6545, 6548, 6554, 6556, 6559, 6570, 6573: n is a or g or c or t
  unsure 6576, 6578, 6581, 6584, 6587, 6590, 6599, 6602, 6607, 6610: n is a or g or c or t
  unsure 6619, 6624, 6631, 6634, 6640, 6643..6644, 6648..6649, 6669: n is a or g or c or t
  unsure 6671, 6679..6680, 6684, 6687..6688, 6699, 6702..6703, 6706: n is a or g or c or t
  unsure 6709..6710, 6712, 6714, 6735, 6738, 6741, 6752, 6755, 6784: n is a or g or c or t
  unsure 6790..6791, 6793, 6822, 6832, 6838, 6842..6843, 6846, 6854: n is a or g or c or t
  unsure 6889, 6910, 6912, 6914, 6916, 6919..6920, 6922, 6929, 6931: n is a or g or c or t
  unsure 6934, 6940, 6953, 6959, 6974, 6984, 6997..6998, 7007, 7026: n is a or g or c or t
  unsure 7039, 7049, 7056, 7091, 7093, 7115, 7120, 7127..7128, 7156: n is a or g or c or t
  unsure 7201, 7217, 7222, 7239, 7249, 7287, 7307, 7338, 7357, 7375: n is a or g or c or t
  unsure 7382, 7394, 7398, 7400, 7404, 7437, 7439, 7452, 7463, 7466: n is a or g or c or t
  unsure 7476, 7486, 7507, 7512, 7520, 7530, 7536, 7542, 7552..7553: n is a or g or c or t
  unsure 7566, 7574, 7578, 7580, 7590, 7593, 7602, 7621: n is a or g or c or t
attttattgagaattatttttattgaattgagtttggttttgaagttattagttcgtgggtgtgtgtatggagttataggatgtagtttgtgttttatgtgtagtttttgttttgtttttgaatatatttgtatacgtagatttttttatgatatgtatggtgttttggtttgtgtgtgtgtgtgtgtgtgtgtgtttgtgtgtggttgcgtgagagatttttttttaaagtagattttatggtttcgtttagagtttagtttgtttgagtttttatattttttatattgtatataggaaataggttgatttgtaaagttatattataagtgtgagggaatgggtggtttattggtttattaaggtgttgagtgggtataatttgggtgtggatagttttttttttggtgtattatttgtagggggagggagtgttttattttttttaaatatttattatgtgttggttaggtgcggtggtttatgtttgtaattttagtattttggggggtcgaggtgggcggattacgaggttaggagatcgaaattattttggttaatatagtgaaattttatttttattaaaaatgtaaaaattagttgggtatggtggcgcgtttgttaattttagtatttgggaggttgaggtaggagaattatttgaattcgggaggtatttttgtttgagatggggtttcgttttgttgtttaggttggagtgtaatgattcgatttttgtttattataatttgtgtatttcgggtttaagtaattttgttttagttttttgagtagttaggattataggtatttgttattacgttcgggttaattttgtatttttaacggaaagatagggttttattatgtcggttagtttggttttaagtttttggttttaaatgatttgttcgttttagttttttaaagtgttgggattataggtgtgagttatcgtgtttagtttgattattgtttttttatagataagtaaattgaagtttagagagagagatgaagttatttgtttaaggaaatggtttagcggaattgtgattgggtcggtttgtttttgaaatgtatattttttgttttatattatatttgtgggttttttggtttttggttttgttttgaggtttttgttttcgtggtatttaaggaatagaatttagggatagtgattttggttttatgttttacgtatttttgaaaatgggttttttttttttttagaattgttttgatttttgtaggaagttttttagattttaagagatattttttttttttttttgaattaatgtttagtttgtttttggtttttgtttatttggtttttttttttttgagaagagtttttgtttttggggtttaagagtaagggattttgtttgattcgtttgttagtatagggttgggtggaaggaattgtttatgtttgtttagggtgaatgattttttttgaagtgcgaggagagttattatgttttttagtttttataagaggttataggatttggagttgtagataggagaaaggttgggattagttgattaggcggaaagtgtgtgttaagaaaaattttaacgaagtaggggaaatttggaaatttggttgagtgaggattttttaaaaaaattaaggtttagagttaaaaagtgaggaggtgagtaggtagtaattatgtttttttagtttttttttatttttttggggtttgaagtaggaattagtaaaattaattggttttatataggtagggttgaagcgggagggagttaggggcgaggggaggatattttgttgtgacgtttggtaggggtaggaatggtgattttttagatggaagtttagcgtttttttatttaggattaattgtatttttgtttgggataaaaatagtatttttttttttttttttttattatttttttttatttttaattttttatatttagattagatatgtttatttattttggagttttattttagatgatggatatttttatatatattagtttacgtttattaggagatttttttttcgatcgttgaggttaaaattatttttcgtatgtttatttggatgttttgggtgatttttgttttttttttttttttttttttttttttttttttttttttttttttttaggagatttttgttattggggtttgttttagaaattagaaggatttttgggttttttgagtttagtttgtttattattttgttttaggcggggtggttatagttttagttattatttttagttttgttattgttttgttgagaaatcgtgggtagtgagtgttttgttttttttgggttttaggagttttatttttatggtttgagggattgggtttggtggtttttggaagtttttttaatatttgattgtttatgtgtttggtgtttaggaaatacgtttttagttaggtggggttattggtggatagtacgatagaggtaagcgatattagtttcgtaggaaagaggcgatttagttatattgtttgttttttatttgattttgagcgaggattttttttttttagttataaagggttgttgtatttttagggagtttgggttcgtatagttgtagtcgtttgttattaggttttttatttcggcgtttgcgtttttaatattagcgttttttatttgtttagttcgggagttttttggttttatttatatggtttttttggtttaatttggttgtttggatagttttagtttttttcgtcgtcgtagttattatttgttttttcgcgtttacgttttattttgattttttgtttttttcggagggtttcgtagttaatcgggttttagtagtttaattataattttttagtacgttaagttttttgttattatagatttttgttttttagtttttgggggttttttatatttttagattaggtttatttttttttattgttttagggtgatattgggaggtttaaagttgaggggaggatgtttgatagatttttttttttgttttttagggtgtatttgggtaagagatttaagggtagtttttgggtttagtgagtagggggtaagcggatatatatttagtttatggtgagaggtaaatagtattttagtattatcgttgtagttgagagatttttttgtttttgtttggtagtaaaggtagtatcgtttagagttagaggagaggataatatttttgttaaatagttggtgagtagattatgtatgttatagttaggttaggtcgagagaataatttttatgttattttagggtatggaatagtagttttattatagttaagggtaggtgaatggtaggttattattttttttatagatagaatgttggaaaatagtttgttttaggaggtagataggataattttatgtttttaagagggtatagtaacggtttttgttgtagttagaggttaggataatatttattaattatggttggagagtagggtaatagttcgaatttaggtagaggtaaggttatagtttttggtagaggtggagggtttggtattattttttgtaataggtggaagatagagtaaatagggtcgtttaggtttttaggtgtaggttatagattgttaggattttttgttataagtaggaggtaagaagattgttacgagtagtaggtaggtaaagaatttttattttttttggggttaggttgagggggtatttattattagttgagggttaggttattagtgatatgaggaattttaggtggttttattaggtttaagaattcggttttgattttattaggaggaaagtgtatatgcgttattgtttgagtgagttggtagggggaggggaatttatagagtattgttggggtttgtgaggtggaagcgatgttgtgtgtattttagttgtagagagaagtgggggtaggaaataggtggggggaagaggaagtttgagttggaaagttagataaagagggtaatatagaaataaaggttgagagagataaagtgaaaaatttttatagtgatatagagtttagagttggagttttaagtttggtgtagggtttagatttttttgtaatgtaagtttgaatattttacggtttatttttttgttttagtatagagtagaaagattgtcgcgttgggagtgagtaatagtttatatttattgagcgtttattgtgtattatttttcgtaaggtatatttgttgtttgtggagtgagaattagtatttttattgtggaggtgaggaaatagatttaggggttaagggagttttttagggtcgaatagaaataaacggtggtttaggtttgtaattttagtattttggaaattttaggtaggtggattatttgaggttaggagtttgagattagtttggttaatatgttgaaattttgtttttattaaaaatataaaaattagtcgggtatggtggcgggtgtttataattttagttattcgggaggttgaggtaggagaatcgtttgaaatcggaaggtggaggttgtagtgagttaagatcgcgttattattttagtttgggcgaaagagtgaaattttattttaaaaaaaagaaaaaaaaaagaaaagaaaagaaaggaaattagttaggcgaggtggtggttatttgtaattttagttatttgggaggttgaggtaggagaatcgtttgaaattagaaggtggaggttgtagtgagttaagatcgcgttattattttagtttgggcgaaagagtgaaattttattttaaaaaaaagaaaaaaaaagaaaagaaaagaaaggaaattagttaggcgaggtggtggtcgtttgtaattttagttatttgggaggttgaggtaggagaatcgtttgattttcggaggcggaggttgtagtgagttgagattgtgttattgtattttagtttgggtgatagagtgagattttgttttaaaaaaaaaaaaaaaaaaagaagtagaagaaataataataataaaaagaaataaacggggtagttggttttgaatttatgttttttagattttgtattttttaggagtttaatttatttaagttattttttatgggtttgtagtgaattagggtggttgagtgataggcgatatttagataacggttttgggtttgaataaacgattgtaatagattttgatgggaattagataaagcgggtttttatgattttatggnntntnggnttntttcggntnagngntnnncgnnatttnnttanagnnngngnntatntnttntnttnntnttggngngntnnagnnttnaggngnnnatntantnnagngnntnananatggntnnntatntnatnngntntnatnntnatngntntntngngntttnannatttntttttttttttttttttttttttttttttttttttttttttttttggagagatattangagagntnttntattattttntnttatgggngatattttangngnttntngngagagntggntnangngnggcgntngntngatatnggnttttttaattttatntatttgngntnnatantntnntntngtngntnttntnntntntnacgagtntnatnataagaggagaagataattttntnttnttttnttnggntttgnggngnntnttngnngngnntntantnggngnngtnggnngntgnggncgnttntttatnaangaggnnttnttngtttgntannantanttttnnttntngaagtnatntantnttttttntgnggngnngangaagaggnntnnttnagngaggnngngtnggnngncgnatnngnngntanttnatnanntnnagnaantangnnttnataanggnngangattgttnnttnttaannanggantaatnngttatngtnatnttcgttgangtntnngttantanatttattnngangantgggtnatnaantatcgnttttnntntgntgngtngtntnttttatttttanannagnnanatnattanagattaattatnagnagtatttttaannngattnttgggggnngnntnttntanggngtntcggnngnnatatcgnggntnngntanttnntnggntnnannanntnntntantnnangtnttntttattanttngttggnagngnngaggnggnnttnatnagngangnncgntnnagngnntgntantnnatnatttgnataanttnntttgtnaggaantattnttnttnntgagntgnntacgnttnttnntggcgnaacggaggantnttngntnntanngtnanagnaanganttnttttgnaantnnaantantnngnntcggnntnttnaancgnttnganttttanatntantttttngangtntnnatntngggngnntnntnggnagntnnagtttaggntnntngtnaangaaancgttanntnttnggtnantntttttntanntngtnntntnntnatnaanataataantatatnatnagnanangantantangataanantanattatgacgtngtncgntnatngtnggnttngtagtagtngtngcggnggnttttttatnaattntaattantanttgcgnttnnatannttacgatgtcgaacgattanantttttttnnngtnganngtaatgaatgncgnncgngannantncgtcgggcggtcgattaaaantgngantttttatttgntgnattggtgatgtttatgcggtagcggggantttttnnangatagaaataatatattagggttttcggngtcgtttaangcgagngttnnggntggttttntatataattattttttttttttttatttttcgatncgttcgtaaaagaaacgggangngntnaannantaaaagngnatntgggantttggggtcgcgnttatantatatattgttcgtnttttttggtnttttttttgttgnnagaaagagnaaagtatataggatatatnttttatcggtttnggggatcgtntaatatngtttttgggttttttttaggatttattttaaaggntnaggggggtagaataaaaatatnatatnatggggnngttaaggaggggggttgcgggggttgtntttcggataataattaagaggagcgagtaaagtattttttttttnttattattaatttatnaaaanaaggaggaagtagagancgattttcgnatagtaaatagtagggcgcgttgggaatcggtcggttntggcgttttttaataaatantttgtcggtaaaataaaggaggaggataatnataattatttttttattanaataggaaaacgtgcggngtaatantttcgtatcgtncgtngntagnaaggagggggggggaaaataattattttcgtgntnttattgggaggtnggtttcgaganggngggggttcgnttattttttngtttttttaaatttaaatatnattantaaataangtgaagaagnataatntttttntttggggggnngatcgcgggtgtncgtttttncggntnagtagttttnttnaaaatgggngggggaaattatttttagnaga

SEQ ID NO: 1955 - DNA, 8592 bp, Artificial Sequence
  chemically treated genomic DNA (Homo sapiens)
ttatgtttattttatagaaagataattattttatgttatggaatgaaatatgtatatgttatatatttatattttttgattttatttttaaaaattagagcgtatatatttgtaaatgtatagaatagaaattttttggaaggttgggtattatattattaattattggttgattttaagaagtgggattggagttggggagggggagagaattgtttttattttatatagttttttattattttaatttttatattagtatattttgtatttgtgattgtaatatattttaaattttattggtaaaaattataaataggattttaattaaatttattattgaaaagaatttaaattttttattttgtaattttgttttgtagttatgtattatatttgaagagaaaataatgattttataaagttatgagaagagatgagtggagtgattgttttatatagtggtttagtatatttttgtgttcgttttttttagaaattttatatattgtatttttgttggttgaaaattgattatttgatttatggtataattttgaatcgaaaagtttttgtttttattatataattatatttttttaatttggattattattgtattttgtaattttaatagataatttataaggtacgattatgtttttgattaattgtgtaggatatattgttggttatatttggattttttatttttgtttttttttttttgaattgatttttagttgagtttatacgtttattttttattatatatatataatttttgtgatttaggggaagttaattttatttttagtttttagggtagattaggatttgtttaattagtgatttttagagtgtggtttttagataagtagtattagtattatttggagtttgttagtaatataaattattagattttatttttaatttattaaaattagaaatgtgggttttagaaatttgtgttttaattaattttagaagtgattttgaatgatattagagtttgagaattattgtttttaattaaggttggtaattttgtattttttattagtaattgatttagtgtttggtttttttttggttacggttaatgttttaaagatggatatgtaatttagattgatttaattagaatgaaaggtagaaattttatttaaggatgaaagagattttttgttttttttattgaatttaaagaagatttgatattttagaattttgagagaagttaatttgaggataaagttaatgtgaggtagaattagaattttttaaagatagagagaatttagtcgtaattgtttgggtttagttttaatttaatttatagtttagtgagataatagatttttttattgtttaagttattttgaattggggttttttttgtttttgtagtttaaagtatttaatttattaaaatatatataataattttttaattgtttaaagttaaatttgaattttttaagtaagttgtatttttattgttttgtttttagtatagcggttttaatatttaattgtttgatgttgtgaataagaataaatatatgtgaatgaatgattatgtattgaaggagtaggtagataatatcgtttttattatttttattaaatataatttatttaaagttattaggaggttttaaaaatagttaatttattaatgtaaataatgaattggtatggtaattttagttttaatattatttttgttgtaattaagtgaaattttttttagttagtttaagtaaaacggaggtttattttaagattattggagtggtttatagattatggattttattttaattttagttaataattatgtgtgttattgatgaggggagtgtatttgggttaaagaaaattgaaattgattattaattatgaaaaaataatttattaatttatagggttttttgtgagtaggaagattagaaagaaaagatattttttaatttgttttttggttttttatttattttagagtaaaatattattttgtgttatgtgttagaagatatttatgggttttataaatgggataggtttgttaattttttggtatttgggatattttttgttagtatagaagaggttggtaatgagttatggatattgttagaagatagttataaggaattaggtagtaaattaagttttggtattgttattttatttttttagttttgtgtagggtttaatggtgtgttgagggatttttataatttttattttttttttaatttaaaaatttgagtttaatttttggaaattgttttaggtattagagggtagtaggaaatttttttttattgtgttgtataaaatttgtaatacggtattgttttgaaggtaaaatattatttaattgtaaggaattttttttatatggattattttaaaaatatagattttaaaatttattggtttagagtttttggggtttggagtaaaagtattttgatttttgaaattttagtttgttaggtttagttttttaatttcgttatttgtaaaatggttttatttaatttaaatcgaaaagtttttagttttgaaggaaaaatgttataaaatttaaagtttaataatttagataaaataataagtaagatttttagatatgatatataaaaaatttttacgggggaaaatagtaaattgagttatattaaaattataagtatttatttattaaaagataatattaagagagtgaaaagttattttacgaagtgggtgtaaatattcgttatatgtatatatttaagtagagataggtatttagaataaagagtttttataagttaataaaaaaagttagatagttgaagtttttatatattgttgatggtagtgtaaattagtataattattttgaaaatttggtaggatttattatgatttagtaattttatttttagttatatatttagtagaaatttttttttattatattttaagttttagggtatatgtgtataacgtgtaggtttgttatatatgtatatatgtgttatgttggtgtgttgtatttattaattttagaaatgtgtgttttttaaaaaaaaaatttggatgttggttgtatgggaggtatttattttgggaaaaatttattgagttatatttttaaggttggtataattttttttatataatatgttttaataaaatagttttttttttaagaaatagttttatagaatataaagatttatatttatggtttagtaaaattataaatatttatttgtattatgtttgaaatttaggttttttatgagtttaaattatgcgtaatgaattgaaaatatttaatatatataatgtttaatataaaacggtttttaagattgaaggttttaatgatagaatggttggaattgaaatttatttttgttatttattgtgtgatattgggtaaattatttaatttatgtttttgtttttttatttgtaaatggaaatattaatggtatttattttagagggttgttgttagtatttaataagttaatatatgttgaaggtttagtgtagttatatatagaaagtatttagtaagtgtttgttatttttataatattaatgtttgtttaataaatatttatggaatttttattttgtgtaaggtatagagttggttgttagagtaatgagagaattaaagaaaataaaatgattaaattttatgggttgaaaattatggagagtttagggtaatgacgtatatatattatatagtggataaatgtttgttattgttgttgttgagatagtagtaagtatggtatttttatttaaattatatttcgagattagtaggcggaaagttttaaatttatatttaatttgaaggttttatttgagtattagaaagagatttaatagtaatggtttatgaattcgaagatgggatttaatttttaaaattgggaagttaatgaaaaataagtttaagtaatgcgggtattgagtttttagggttagtgtggcgtttatgtagtttatacgaatagagttaataaaaagttatgtgtaaaaataatataaattatattgttgttttttggatttgaaaaatttattatgatatatttttgaaaaaataaaattttggattattatgaatattttgacgatatttttttttaagtaagggaaagaggagttttttttaaaatatagaacgtatttattgagtggaagatcgattttatattaaatgtttaggttttatagacgtttgggtttatagtatattattttttttattaaaattaaattaaattaaagttagttttatttgaatgtatttttgttatggttttaaaatttggaaagtttttggaattaaattttgagatgtaaaggttggttgataaatttatagaaatttttttttcgatattaatttataaattttaaggtattttataatttcgtgggtgttggtttttagtttgtaacgttttaatatagtttggtagagtttagtgggttgggattataagtattcgggattgtgttattgaaaaattgatgttatattaaaaggaatattttttttttaatatattaaaaaggttttgtataggttgggtttagaggttttagggttagttaatttttgtttttaggtattttaagaagtcggagaaagttttttgtaggtaaggatttatcggcgtttttcgtattttgtcgcgcgggaagcgaaggttggagttttttttttattttcggagggtgggcggggtcgaaggatcgtatcgttttagattcgttttttgcgcgtggtttcgtttatagttgtttttggtcgtgcggtcgcgcggaaagcggaggtcgggggcggggtttattttttgtttttgggggtttttcgggttttgttaattagcgagcgttttgttggttattcgtagttattcgcgtttttttttttttcgttttttttcgcgttttagaatttaagatggcgggatttaggtaaaggggttttcgggttagagttcggtcgttgttttgcgttttgttgttgttattcggtcgtttcgttcggggcgacggcgtgggaggagatttcgcggtcgcgttgttatatcgtcgtttcgagtataaatatagttttaaggggtcgtatttggtgtagagcgacgggatcgtgtttttttgggtttacgcggggagtaagtcggagtagagggttgggggtcgggttttttttttttttttgttgttttttcgttttttattcgcggttattttggtgtgttgaggttttcgttttagtagttgtatattatatgcgttgtggaggggatttttttggtagttttttcgtcgggttttttttggttcgtacggtttttttcgtttgttttcgagttttttttttatttattttgtttttttttattcgtttgttgtttttttttttttgatttcgtcggtatttttcgttggatttagaggtgtttggttattttttatattttttagtatttaaatttgtttttaggtattatgttttataacgttacgtttttaggagaaatgtgttttatttttagttattttaatttgagatatgttttagaagtttttttattttttttttcgtttttattttttattttcgattttcgatttttttgtttcggtgttagtaatggttaatgtttcgtttgaattttatgtttattgacggtttttgagatggtatatagtagtattagagtaattttttaagtttttgtatgttagaagatatttttatattgttggaattatatattttttttttagtgatttggtgtggtttttgattttttttttcgtagtaatatattatgtaattttttaggagaagggatatatttttagggattgattgtttttgaatttgagattaagaatagtattatatttttagttttttaaaaaaattggaagtattgaaataattttgggtttatattttatttattttttgtgtttggtatttttgtagataagagagttttgttagagtatttatttacgtgaaagaaaatatatttgtattttttagtgttgatgtgttattgttgattaaggagttaatcgtagtatttggtatgatataagttttgtttagtgattattagatatattcgttgaataagtggtaaatgtttttatatgagatgaggagttttggtagtttgaattttatttttgtgtgtgattaatttttttttttttttttttttttattataaggtttagggtatatgtgtataacgtgtaggttggttagtatgtatatatttgttatgttggtgtgttgtatttattaattagttatttaatattaggtatattttttaatgttattttttttattttttttataagtaattttttatataaggtttttatatattattttagattatttagtttttgaaataaaatgttttatttttagaaagtaattattgaataggaagtatttttttaggaagcgttattttttttaaattaatgtgtaattgaaaggtatagattttaatttgatttaatgattaagttattaagtagttgaagtagagtgtagttatttcgttatttagtagttatttattatgtgtttatgtagtaagggtatattattgggtatttgttattaaggtatttttatttttgatatataaaggtgatgtaaatgatattaaatataagtttttggagtttttgtttttatttgtgggatgatgaattatttagtagtgatggatttgtttatatatttttatttttatatttttttattgtttgtttgtttttttatttttttttttttttttttatatttatatatattatattagttaattaggaatgttaattaattagttaaattagttattttgattttttttatagagtcggaattaattaatttattttgttgtagaaatgttaagataatgtattagtaaattaaagtcgtgtggttagaatgaatttgaaataaagtattagtattttagttatgatttatttggttattggttttgggaatttttgttatagatattttttgtttttattgttattgtagtttttgtataagttttattgtaattatattgattattttttttttttcgttttgttttgtaatttattattttaaaaaaaaagtagagaaatttaagatttagtttaaatatagttttttatttttaattttaaattaagattaaatttatggtgttttttttttttaattttaatgtttttttagtatatttaaggttataagggtaaaaaatgataatttgtaattttttatagtttttagagtttttttatttttattttttgatttgatttttagtagataaggcgggtgttatttgttttatagatgaaaaattgatgtttagaaaggttaaggtttttgaaaaaggatatataagtagtaagtgttagtgaagttgaatttaaatttaggttttttgattttgtgtttagtttttttttatgatgtttatattttattttttgaatgtttgtaagtaatagtgaatagtgattgattttattaaagtattttagtttttttttttgttaatttttttttatttgtaaagtgagattatagttatagttgtattttttagtatgggttttagaattagttaatatttgagagttagaattgtttaaattttaagtttgatagatttttagtaattatttagtttaataataggagaaatagttaatatttattgaaatatttaaagttatttgtgtaggtatttaaatatttatgaggttgtttaagaaatggagtaatttgtttatagattaaatagttagtaagtagtagagttggggtttgaatttagtttggagatgtaaattatcgttttagggattattattttttttgagaattttttgaagaattgttttttgaagtttagttgattttttttatggaagaatgtatataagtatagtattttgtatataatttttagggtgtttatggaagtgatcgagtttagtttttttattttataggtaaatatatggtgaatttaagagaataagagaattatttgtttaaagttatatagttgaattgagattaggaataagttttttgatttttagtggtatgttttttttatattgtttgagttttttaatttttgtaaataggtaaaatacgttgtagtttttttaaaaatataaatttttaaggtttttaaaaagaatgttatgagatttagatagtttgttttaaagttataatttttttttttttatttattgtttttgtaatttttagtgtatgagtgtagttttaattttttttatttgataagggaggtgttagttttaaatttttaaagttaaaattgttaatatgaaattttttttaaattattattgtataggttattaagtttttgtaggtatatttagtagtttggaaatgattattgagttttatttaattataatttaaagttttttttttttgatttttgttttaga

SEQ ID NO: 1956 - DNA, 8592 bp, Artificial Sequence
  chemically treated genomic DNA (Homo sapiens)
tttagaatagaaattaggggaaaaaagttttaagttataattaggtaaaatttaatgattatttttaaattgttaaatatatttatagagatttagtaatttgtataataatgatttggaaaaaattttatgttgatagttttaattttaaaagtttagggttaatattttttttattaaataaaaaaaattaaagttatatttatatattaaaaattatagggatagtgggtgagagaaagggaattatgattttaaggtaaattatttgagttttataatattttttttaaaaattttaaaaatttgtatttttagaaaagttgtaacgtattttatttgtttgtaaaggttagaaagtttaaatagtgtgaaaagaatatattattaggaattaagagatttgtttttagttttagtttagttgtgtgattttgagtaaataatttttttatttttttggatttattatatgtttatttgtaaaatgaaggagttaggttcgattatttttataaatattttaaaagttatatgtaaaatattgtatttatatatatttttttatggagagggttaattgaattttaaaaagtaattttttagaagatttttagagaaaatagtgatttttaaaacggtggtttatatttttaggttaggtttaagttttagttttattatttattagttgtttgatttgtaggtaagttattttattttttgaatagttttataggtatttaagtgtttatataagtagttttaaatgttttaataaatgttagttattttttttattattagattaggtaattattaaaggtttattagatttaaaatttgaataattttagtttttagatattaattaattttgaaatttatgttgggaaatataattgtaattgtaattttattttataggtagaaaaaagttgataaaaaggaaagttgagatattttagtaggattagttattgtttattgttatttataaatatttaaaggatggggtgtgggtattatggaaagagattgaatatagaattagaagatttagatttgagtttaattttattgatatttattatttatgtatttttttttaaaaattttaatttttttgaatattagttttttatttataaaatagataatattcgttttgtttattaaggattaaattagagaatgaaagtgaaagaattttgagagttataaagggttataaattattattttttgtttttatggttttaagtgtattaaaggaatattagagttaagaaagagaaatattatagatttggttttaatttggggttgaaggtaaagggttgtgtttaaattagattttaaatttttttattttttttttaaagtaatgaattgtagagtaaaacgaaaagaaaaaaatgattaatgtagttatagtgaggtttatgtaaaaattatagtgataatgaaagtaagggatgtttatagtagagatttttagagttagtagttagataaattatggttaaaatattaatattttgttttaaatttattttagttatacggttttaatttattggtatattattttgatatttttgtagtagaatagattagttggtttcggttttgtaaaggaagttaaggtagttgatttgattagttgattaatatttttaattggttaatgtagtgtatgtgagtgtgagaaaaagagaaaagggatagaagaataggtaggtagtggagaggtgtagaagtgaaaatgtgtgaataaatttattattattgaataatttattattttataaatagaaataaaaattttaaaaatttgtgtttgatattatttgtattatttttgtgtattaagaatagagatattttgataataaatgtttagtaatatatttttgttgtatgggtatataataaatgattgttgagtaacgaaataattgtattttattttaattatttaatgatttggttattaagttaaattaaaatttatattttttaattatatattaatttgagagaaatagcgttttttaaaagggtgttttttatttagtaattattttttagaaatgaaatattttgttttaagaattggataatttaaagtgatgtataaaaattttatataaaagattatttatgggggaggtgggagggatagtattaggagatatatttaatgttaaatgattagttaatgggtgtagtatattaatatggtaaatgtatatatattaattaatttgtacgttgtgtatatgtattttaaattttatagtaaaaaaaaaaaaaaaaaaaaagattaattatatataaagatagaatttaaattgttagagttttttattttatataaaggtatttgttatttgtttaacgggtatatttgatggttattgaatagagtttatgttatgttaagtgttacgattgattttttagttagtagtgatatattagtattaaaaagtgtagatatgtttttttttacgtaagtaaatgttttagtaaggtttttttatttataaaagtgttaaatatagagagtgaataaaatatgaatttaagattattttaatgtttttaatttttttaaagggttaaaaatgtaatgttatttttagttttaggtttagaaataattaatttttaaaaatatatttttttttttaaaaagttatataatgtgttattacgagagaaaagattaaagattatattaagttattgagaggaaaatgtgtagttttaatagtataagaatgttttttgatatataaagatttaaaaaattattttaatattattatatgttattttaggagtcgttagtgggtatggggtttaagcgaagtattaattattgttaatatcggagtaaagaaatcggggatcgggggtggggggtggaagcgggaaaggaagtaagggggtttttagaatatgttttaggttgggatggttgggggtagggtatattttttttagagacgtggcgttgtgaaatatgatatttagaagtaagtttgagtgttaggaagtgtaggaggtaattaaatatttttagatttaacggaaagtatcgacgagattaaagaagggaagatagtaggcgggtgagagagaatagaatgggtgagggaaagattcggggataagcggagggaatcgtgcgaattaggagggattcggcggaggggttgttaggagggttttttttatagcgtatatggtgtgtagttgttggaacgggaattttagtatattagggtagtcgcggatgaaaggcgaagaggtagtagaagggggagaggaattcggtttttagttttttgtttcggtttatttttcgcgtgggtttagaagggtacggtttcgtcgttttgtattaggtgcggttttttgaagttgtatttgtattcgaaacggcgatgtggtaacgcgatcgcggggtttttttttacgtcgtcgtttcggacgaagcgatcgagtgatagtagtaaggcgtagaatagcggtcgaattttggttcggagatttttttgtttggatttcgttattttggattttggaacgcggaggagggcgggagagggaggggcgcggatggttgcggatggttaatagggcgttcgttgattggtagagttcgggggatttttaagggtaaggggtgagtttcgttttcggttttcgtttttcgcgcggtcgtacggttaggagtagttgtgggcggggttacgcgtagggggcgggtttggggcggtgcggtttttcggtttcgtttatttttcgggggtggggaaaggattttaattttcgtttttcgcgcggtagagtgcgggaagcgtcgatgggtttttatttgtagggagtttttttcggttttttagaatatttgggagtaggaattggttagttttaagatttttggatttagtttgtataaaatttttttagtatattagaagaaaggtgttttttttgatgtgatattagttttttagtggtataatttcgaatgtttatggttttagtttattgagttttattaagttatgttagagcgttgtaaattagaaattagtatttacggggttgtaggatgttttaggatttataagttggtgtcggaaagagggtttttgtgaatttgttagttagtttttatattttaaaatttaattttaagagttttttaaattttgaaattatggtaagagtgtatttaaatgaaattgattttggtttggtttggttttggtgagagggataatgtgttatggatttaggcgtttgtagaatttggatatttgatataggatcggttttttatttaatgaatacgttttatattttaaaggggattttttttttttttgtttaggaaaaaatatcgttaaaatatttatggtaatttaaagttttgtttttttaaaaatgtgttatgatgagttttttaagtttaagaaatagtagtatgatttatattgtttttatatatggttttttattagttttgttcgtgtgggttatatgaacgttatattagttttagggatttaatattcgtattatttaaatttattttttattaattttttagttttggaagttgaattttattttcggatttatgggttattattgttaaatttttttttagtgtttaaataaaatttttaagttgaatatggatttaaggtttttcgtttgttagtttcgagatgtaatttaaatgaaagtattatatttattgttattttagtagtagtagtaataaatatttatttattgtatggtgtatgtgcgttattgttttggattttttatggtttttaatttataggatttaattattttattttttttggtttttttattgttttggtaattagttttatgttttgtatagagtgaagattttataaatatttgttaaataaatattaatgttataaaaatggtaaatatttattgagtgttttttgtgtgtaattgtattaagtttttaatatatgttaatttattgaatgttgatagtagttttttaaggtagatgttattaatatttttatttatagatgaggaaatagaagtatagattaaataatttgtttaatgttatatagtaagtggtagaggtaggttttaattttagttattttattattgaagtttttaattttaagaatcgttttatgttaaatattatgtatattaagtatttttaatttattacgtatgatttgaatttatgagggatttgaattttaagtataatataagtaaatatttgtaattttgttgaattataaatgtaaatttttatgttttgtgaagttgttttttaaaaaaaaaattgttttattgaagtatattatatagagaaaattatgttagttttaagaatgtaatttaatgaattttttttaaaatgaatattttttatgtaattagtatttagattttttttttaaaaaatatatatttttagagttaatgggtgtagtatattaatatggtatatgtatatatatgtaataaatttgtacgttgtgtatatgtattttagaatttaaagtataataaaaaaaaatttttattgggtatgtaattaggagtagagttgttgggttatagtagattttgttaaatttttagagtggttgtgttaatttatattgttattagtagtatgtgagggttttagttgtttgattttttttgttagtttgtagaaattttttattttgaatatttgtttttgtttggatatatatatatagcgaatatttgtatttatttcgtgggatgattttttatttttttaatgttgttttttagtgaatagatatttataattttaatatagtttaatttattattttttttcgtaagggttttttgtgtgttatgtttgggaattttgtttgttgttttgtttaagttgttaaattttaaattttatagtattttttttttagaattgagagtttttcggtttgagttagataagattattttataaatagcgaaattgagaaattgggtttggtaaattgaagttttaaggattagaatgtttttattttaggttttaggaattttgggttagtgaattttaaaatttgtgtttttgaagtaatttatgtaggggaaattttttataattaagtgatgttttatttttagggtaatatcgtattgtaaattttgtataatataatgaggagggattttttattattttttagtgtttgaggtaatttttaaaaattaagtttagatttttgaattgggaggggaataaaaattatgagggttttttaatatattattgggttttgtatagagttggagagatggagtggtagtattagggtttggtttgttgtttgattttttataattattttttggtaatatttatgatttattgttagttttttttgtgttagtaaaaagtattttaaatgttagaagattgataggtttgttttatttataaaatttatggatgttttttagtatatagtatagaatggtgttttgttttggagtgaataagaagttaaaaagtagattgggagatattttttttttttggtttttttatttatagggagttttgtggattaatgggttgtttttttataattggtgattaattttaattttttttgatttagatatattttttttattaatggtatatataattgttggttggagttggggtaaaatttatggtttgtgagttattttagtagttttaaaatagattttcgttttgtttaagttagttggaaagaattttatttagttatagtaaaaatagtgttaaaattaaggttattatgttaatttattgtttgtattagtggattaattatttttggagttttttaatgattttgaataaattgtatttgataagagtaatgaaaacgatattgtttgtttgtttttttagtgtatgattatttatttatatgtgtttgtttttatttataatattagataattaagtgttaaaatcgttatattagaggtaaggtagtaggaatataatttgtttggggaatttagatttaattttgaatagttagaaaattattatatgtgttttaataagttgaatgttttaggttgtaagggtaaaaaaagttttaatttaaagtggtttaaataataaagaaatttgttattttattgaattgtaaattagattaggattgggtttaggtagttacgattaggttttttttatttttgagaagttttggttttattttatattgattttgtttttaggttagttttttttaaggttttaagatgttagattttttttaggtttaatgggagagatagaaaattttttttatttttggataaaatttttgttttttattttgattaggttaatttaggttatatgtttatttttggaatattaatcgtagttaggggaagattaagtattgaattagttgttggtaaagagtataagattattagttttgattgagaatagtggtttttaaattttaatattatttagaattatttttggagttggttaaaatataaatttttgagatttatatttttagttttagtaggttgagaatagggtttaataatttgtattgttaataagttttaggtgatattaatgttgtttatttggggattatattttgagaattattagttagataaattttgatttattttgggaattggggatggagttagttttttttgagttataagggttatgtgtgtgtgatggggagtgaacgtatgaatttaattggggattagtttagaaggaggaaggtagaaatgaaagatttaaatataattaatagtgtgttttgtatagttaattaagaatatgatcgtgttttatagattatttattaggattataaaatgtagtagtgatttaagttagaaggatataattatatgataagaataaagatttttcggtttaaggttatgttatagattaaataattagtttttaattaatagggatataatatatgaggtttttaaggaagacgaatatagaggtgtattgaattattatgtagaatagttattttatttatttttttttatgattttatggagttattattttttttttaagtatagtgtataattgtaaggtagagttataaagtgaagagtttaaattttttttagtaatgagtttaattagggttttgtttataatttttattaataaaatttaaaatatattataattataaatgtaaaatatgttaatataaaaattaaaatagtggagaattgtataaagtaaaaataattttttttttttttttaattttaattttattttttggagttaattaatgattagtagtgtgatatttaattttttagagaatttttattttgtgtatttataaatatatacgttttgatttttaaaaataggattagaagatataaatgtatggtatatatatattttattttataatataaagtagttatttttttataaggtaagtatgg

SEQ ID NO: 1957 - DNA, 11047 bp, Artificial Sequence
  chemically treated genomic DNA (Homo sapiens)
taagatgttattttagtgatttttaatacgtttagggaaaaaagagatttaaaattggtaattttatgttataatgtgataattaagtttataaggaattgtgattaaaaaaaaagtttttgatatgtatgtatattataaatatattaaagattagtgtaaaataagggatatttgaggttatatgtaaagtaatgtggggcgtaagataaaattgtatgtatgtttagtattgatttaaaattattagggtgataggaagaaaagaggtgaggtttattttttgaaaagaaagtaaagggattattgaatttttaatgttattttttaaatttttaatagttaaagtttaagaagttatattagggatagattttttggttattatttatattgattaaaataagtgtgtagtataaaagggaatgataatttataatttttttgacgtaaagtaataggtttgggagatgggaagtggtttaagaggaaaattattattgtttagttttgattttttagtttatattgttttaggaataaaggttaagttttaagtagagggtgttgagaatttaataaatgtagttgaatgataatggtcgttttttgttaagtaggttgaggtagatgtatattttaaggtaattgttttgatttatttaatttaagttagaaaatggttgtgttttagtttaaagttagataattggtttattggtggttttataaaattttgatttttgtttatttttaaatttatattttgggttaagtttttaagttgtttgtttttgggtaagatagtaaattttattaattaattaaatttttatttaggattatggatttttttgtttgggtatggagaggttagtgattttattttttagataatgagattttattgtttttaaatttttttgtaagtttttataagttggtttgtgcgaagtttttttttttgtaatttgaatataaaggatttaaatttttattattttaaaatgatagttaaagaaaagttattatatttttttaatattttaataattaaaagagtaagtatatttttatagaattagtttagagtaaggatgataaatgttatattgttttttttatattgttatgggagatttttaagaaaatttattaaatagaggttgagaaatttagattttgttacgtagtaattttttttttttttaggaaatttatgagattagtagatgatgtttattgttaatatttttaagtaaggtaggtgaagtttttgtgttatttttaagagataagttgtatatttttaatagggaagaaagtatattatttgaaaattttttgttaaaagtttttatttatttagaaattgtgtttgtttgttttttgtttttttatataaaataatagaaaaaattggtagggttttaaagtaaaattattggaagttatataagttttaaggatagaatttaaaggggttaggatatttttttatttagtttgttatttagattaggtttgtagtgggttagttgtaagttatttattattattattaaggaagttatatttttttagggattaaatgttattttggattgttgaagaattttatatttaggtagtagttaggagaggagttaagtattatttgggattgtatttattattttttgtttttatttatttttttgttattagtgtgttatttgatatggaataagagaaaagtttttttgggaaatttgttttttgagatattattgtttttattttattttgtttaggaaatatagtatggtaggtatttttaatttttgtaagttttagaataggtttatggtatatgatatacgatttttttatagagttgggatgtagttttatatttttttttaatttagtgttttaagtagtcgttattattggattggagttgttataagataggaagttttttgatatttttagttgtttagaatagaatattatgattaatataaatgtagtgtagtttatttgtttataaatttttaaaatgtattaagaattggttttgaaaaaaaaaggaattggttttattttattaagtaatatatatatcgtttatttttttttagaatagttatttttttagattttttttttaagaaaaagttatttaatagtagaaatgaaaaagaaaattaaatattgatttttaaagattttaaaatgtttatagatttgagtttattttagaattagaatttttaatattgaagaagggaatagggaagatttattgttttttataaatattttgttttttattagtatttttaaatattatattttttaatttaatagtttttttatagttatgtttttttataatttattttttgtattattattatttttaaatatatttttatttgtttataaattttttttattgttttgaaattgttttatagtgtgtagttttttatttgttaaatgtgtatttatttaataattatttttttatatataaagagttgtataaggtattatgaggaatatagatatataaaaaaggaattaattattatagagtttttaatttagagaagatattattattttaaataattataatataaagtagtaagaattgtttttgtttaaggttaagaattattgtggatattgatgttgttaagtttggaatgtggtcggagaaattgttgtagaagttttatataggattttagtgtatatttttggtttaaagtggttcgtagaaagtgatgggaggggtttgtaaggaagaagaggtttttaaatttttttttgaagagaaagtagaatattggtaagtaaaggattttgaatgttaatttatagattaagtattttagagttattttaagttttagagaagtatagtaatatcgttaagaaagttttatgatataagaggaagagattaaaaatttttataggagttgggttttgatatggtaaacgtttaaattagaggttatttttggggaggaaaattttaaaaatatttggtttttaggaattttttttttatacgtatattttattaaagtgtaatagattaaaaggtgttttagttagggtaaattaggtaagtggtttttaaaatttacgttgatttaaaagtttttgtatttttttaaatttttttttaaagaggatagttattttagcgtttatgcgataatttttattgatatagtgggttaaagagtttgttttcgggtatgtaaaaaggtttttttttatataagtgatttaaaaaatgtgtaaaggaaaagataatgttttattagatatagtaaaatattaagttatttttttgtattttgtgttttttacgattatttttttcggtatttttttttttaatttgatttaaagttaaattaattatagtatgtgtaaaaggaaagtaatggatgatttttgtttagaattttgagtttttttaaagtaaattagttagagagaaaaaaagataatgtaattattaatttaattaaaaagtgtttatgtttttgatttttattattacgaattttagtttattaataagttaatagttgttacgtattttgtttttttttggatttttattaaggttgttggttatgatattgagtcgttatttttagaatttaagtgtttttttagttatgagaagggaaaaggaagtaaaaatgtttaggtagttttagtatataatattttgattgttttgtataattatttaataggtttttttttttaacgtttatcgatgaatgtgagtttgttcggtttttgggacgtaatataaaatttttttggggtaaagaggaagaacgtttaggttcggaggttgtttcgattcgtttttatttcgtgtttttttggagcgtttcgtttcgttagcggaagtaaagtttatttttaagatacgtttttttttttttttagggttatttcggagtaaggtcgatttaggacggtttttttttttttgtacgacgtaaaagtatttttttagtgggtttggtttagaagaaaatagaagggatttggttatagtttcgttaagtcgtaattatagagtgtatagggtattggcgtgttgagttttaggcgtggggaaaggaaggcggttttttaaggaacgtttattttttatttttttggggggtgcgtgggagaaggaaagagtttattgaagttttttattttttgttttttattttagggcgggttagcgaggacgtagtttgttttggggttttatgggagggtgcggggaggttcgtttaaagttttaacgtatttaagttattttttatttggaaaggagtcggttgtttggaggttttcgtttcgcggggaagggtttcggattcgattttggtaggtggggagtagcggattagtttaaacgcggagttaatttcgttaaagtttttaattgtacgtatttaagatggtcgttttcgttcggtagcggggcggaaacgagtttttttagtttgttagtcgagtttatattttttggcgaaggtcgtcgaattttcggtagtaaatttcgtggtttttcgtcgtcgttcgcgtatgcgtaacgaaattgttttacgagtcgggaaaagtggcgtttgcgtattagtcgtaggggtgtgttttagtggttatttggaaaggggtgggtagttggtaaaggggttagttagcgtttgcgtagtattaagtttaaggtagcgttttgagttgaagggtttggcgcgtttggaaagcgtttgcgtattttttttattgggggtggtgttaaagcgggaaggtgggcgtggttttagggaacgtttgcgcgttgttttttcgaaggggtggggcgatttttgaattggagttagtgggcgtggttttagaggcgtttgcgcggaggcggttggagggaggttcgatttttttttgttcgggttcgttattttgttaggtagcggtagtggcggcggtagcggcggttggagtttttgattgggtttcggagttcggtattggagttaattagcgcgggtagcgaatcgggggagcgaggtacggtgagtgtgaggagttaatatttagcggtttagagtcggttttagcgtttcgattggcgggtttcgttgattatttaggagaggtttaggcgttcgtcgagttcggggagtcgagttgagtttagtcgagtcgggcggttagcggtttcggttcggggtttgcgagcgtttcggggtattttcggtcgaggtttgtaggggtcgtttcgcgcggggatggcgtttcggggagtaggtatttcggggtttcgattttcgtagggtgttagggttagttgggaatgcgtttttgtttttcgatttaggtttaggtttttaggttttaggtttggggttacgaatggttttatattaggggatatatgcgcgttttgggtttcggcgatttttttttggtcgttttggtcgtaaatttaaatttgtttttgtattttttatttttcggtttttgggataggaagttttttcggggttcgcgtttttcgtttttcgtttttagcgagtcgggtttgttttatttgtagtttttttaggtcgggagggaggtttggggagggtgcgcgtcgcggtcgcggggtttcgtgtgcggttggtaacggggttggttcgtttacgtttcggagttttatgggttcgttttcgttgtttttttggtggggagagggggtcgttagttcgtttattttttttgtttcgtcgcgtttttttttttagttcgtttcgttcgggttttcggttcggcgtcgttattattttttttggttcgttattttttttttttttcgtttcgttcgtagtggtaggatcgtatattttcgttttggagtttaattaagcggttttcgttttttgttcgggttgtaagattagtttattcggtgtttggaattttatttttagaagattgatatttttgcgtatttttttcggaggttgtataatttgttgtttatattattaattttatttattgtttattttgtgaaattttttttttttgggaatatagtatagttttgggggttttttttttttttgtttttgttttcgtttttttatgttattttgtgttaggtttgatttagtttatttattttttggtttatgtttttttgatatatttttaagttttgtgttaacgtttttttagtagatgtttagaaattaatagtgttgtggggttttttttagggtgagaggttgttgttggtaattaattatttagtagttagtatatgttaggtataattcgtgtgttagggagggagtacgtagaggttaataagaattgtgtttatttgatggaaattgataggtgaataggtagttaatatttaacggttagtgttataaaggggttaagtttagttgttgtgaagtatttatgcgtgagttagttttcgtgaaaggtttattattatcgtatttttgattggttttgaagaatgatggtaatttttttataggaaagatggaagagtttgttcgaagagaagaaaagtatgtgtagaggaattaaattatattgttggaggtaggaagatgggatagggaagtgggtagtagttgtgatagtttaggggggaaagtttagttggtaaaatatttgtatattttgttaaggaatattttggaaatagttattattttgtatggaggtttaagtagaagggatttagagttatatttttttttaagattgaaaaaacgagtttttgatttgtttatgggttttgtttcgtgatagtggttgagttttttggggatgaagaggagatttgttttaggattttgaaaattatttttatttatgtgaattatttagtgtattttttggtatataaaggttttaagtatttggtgtttatttttaaatttatatttaatgttatataattaataggttttagaaaattcgtattttagtgtttttttattattaaaatttcggggataggttttatttttattttttagggtgagttttttattgttgtttaagtgatttttttaatttatttgattgttacgttattcgtattagtagatgagatgatagagtttaagtagtttaaaaaatatgtatatttgtttttggaacgtttttttgtttgtttttggatatagggtttttttttgttatttaggttggagtatagtggcgtaatcgtagtttattaatttggaatttttgggtttaagttattttttttttttgtttttttaaaacgttgggattataggtatgagttattgcgttttgatttgaaatagatgttttaattttagtatttaaaaataggtatgttttggttattttaaaattattaaatatttttgtttggtatttttttaaaaggtattataatttggtaatttttttgttaaatattttataagtttttattagtttgtagaagaatttttttgtttgatattttgagagaaagtagtgtggttttaagtttttttttttgtttagtttattgtttatatgttgaaatatttttgtttttgtttttatgtttttttgatttgtagtattttatttttttttatattattatatagttaaattttttttatatttaagattagtttattttgtaggtttttgatagtaaagaaaaaaaaagtttaagtagtatttttttttttttaagttttgttgatttatttttagttggaataaatttttgttttttaaatttttatattattttattttttaggattttagtataggtttttagtttattattaaatttaaagattttttgaagtttgaattttcgttagagatttttttttatttttaaaatttttagaatagtgtttggtatatggtatataattagtggagagaagtgtattagaaagttttaatttagaaatttgtaggatgatggggaagttggatagttttttgttgtagtttagttttttattaagcgtttattaggatttatttgttgagttgtgaaagaaattgagtgagttaatgttgggaatttttaaataatagaatagaaaatatttgttaggtatgatgatggtttacgattgtaattttagtattttgggaagtcgaagtgggagaattttttgagtttaggagtttgagattagtttgggtagtatagggagatttttttttttaaaagaaaaaaaagaatagaaaatattaaagtgtattttgtgttgtataaaggtaaatgttgttttatgaaatttttattttagttatatgttttatatatgtgtgtattgagttgtgataatgaaatgtgttttttattaagggttgtggttaaaaaagttaaaaagttattgttttaggttttgtttggtagtgattattaattgtgataattttatggttttttatatgtttatattagttgagtttttgaagaggttttagttttggagtttgtgtaggtttatatagaatgggtttttagtaagtggttggttaagttttagtttttgtattttggaatagtggggtaaagagaattgtattgagaagagaatgtattaggaagagaatttttatgttagttagaataaatatttattatttgtttttttttttttgaggaaaaattatttaaaattttgtgttaagagtaagagttagatagattaaatttggtttagtttgttataattttgggtaaagaggtattttgggaaagattatcgaattgtattgtagttttgttaattgaagtttatagtagtaggaatatatgattttattgaagttagttgtttatagtattaattattaatagtattaatattatgatataggttaaattattttgttattaatgtgagagagaattgttgttagatttgaagttgttttttaaattttgatattttttaaagtataaatttaaatattgttaaattggtttatttgtattattagaataaattagttaagaagaaaatttgtacgttatatatattagttattatgtgttttaagttatatttagttttgtaaagatgtaaatttttggatattagttaaggaaaaaattttatataagaaggaaatttggagttggggaggcgttgaaatttaaaagatattttttttatgatttttattttttaaaattaatttattgagagatattttagaaataaagtataataattttaaatgtgtattttgatgagttttgataaatttgtatatttgtgtaattgttattataatgaagatataaaatatttttattattttataatgtttttaaggttttatgttagttaattttttttttttttgtttttttgtattttttatttttaaggaattattgatttattttttgtttttagattattgatgttttttggagattttatataaatggaattatatatattcgtttatattataattttaattttattagtttatagttataaatgtattgtgtattagagataagatagaatttagggaagtttgttagtgtttttaatagatttatagtttggttgaaaatttgattttttattttatatttagaatttttgaggagtagatttagttaattaattttaaagagattggtgtaaaaattagaaaatcggtttgttatgttgttgattatatttgttttttgttggttaatttatatgtaaatttaaattatagttagaaatttatttagcgagtattttattagattaagggtagtgttttggagaattatatggttataagtttttttgttgtgatgatatagtttgttatttatggtttatagatttttatgttgtatttattttggttatgagtaatggggttgattaatttttattttgattaaattttgttatattttttttaatattttaatatttatttgggaaataagaattttttaaaatttttattttagaaataagaatttttaagtgtgtagtgaaattaaaggaatttgaaaataaatatttgtatatttgttagttagggtttattaatattttattataattgttttattagatatttttttatttatttatttattttttgatgtattttaaagtaaattttagatattaatatatttttttttaagtatttggatatatagttgtatatattttggtttttttttttatattgtattgagatattttgtaaatgattaattttattagtatgtgtggatttatggagagtggtattgtattttgttacgataatgagtagtttagttaggttacgttattttattatttagatgttggaatttatgagggtttagtgaaaaattagagagaaagatttatttatatttttgtttatatatttgtttttttttttatatttttaagatgaattgtcgattgttaatttatattattttaattttttaatgaagtttttattaaaggtttttagatattatttagtttatttaattgtatttttatttttaaaagtggatttttaatttttaaagtttatgagaagggtaaattttgtttattatatgtagtggatttgagtaatatgtttggtgggaagtaattacgtgttataatttaaagaagttttattttttaaagtatatgtgtaaatttgaaaattagtgttaggtatgttttgtattaaagtgatgtagtttaacgagtattttttaggtgtaagtattgttttgatagtattgaaaggtaaggttgttagtatattgaaagtattttagaaacgtgaaaatagtattatgttgttatgattgtgttatgtaattttagttaaaaatgatattgaatataagtattttttatttttttattttgtttttttgtaaataaagtatagtgataaattatttaggttaattgtttggtaaggtttttattgataattttattttagtttttttttttatttttttaatagg

SEQ ID NO: 1958 - DNA, 11047 bp, Artificial Sequence
  chemically treated genomic DNA (Homo sapiens)
tttgttagaaaggtggggaaagaaattaaagtgagattgttaataaaggttttattagataattaatttggataatttattattgtattttatttgtaagaaaataggataggagaataggaaatgtttatatttagtattatttttaattgggattatatggtataattataataatataatgttatttttacgtttttaaaatgtttttagtatattggtaattttattttttaatattgttagagtaatatttgtatttaagagatattcgttaagttatattattttgatataaggtatatttaatattgatttttaggtttgtatatatattttagagaataaagtttttttaagttgtaatacgtaattgttttttattaaatatgttatttaggtttattatatatggtaggtaaaatttattttttttatagattttaagagttgaagatttatttttaaaaataaggatataattagataaattgaatgatatttgagaatttttaataaagattttattaaaaaattaaaatgatataagttagtaatcggtaatttattttggaaatatgggagggaggatagatatataaataaaaatgtagataggtttttttttttgattttttattaggtttttataaattttaatatttgaataataaaatgacgtgatttaattgagttgtttattatcgtggtaaagtatagtattattttttataaatttatatatgttggtggaattaattatttgtaaggtgttttaatatagtgtgaaagaagaaattaaaatatgtgtaattatatgtttaagtatttagaaagaagtgtattgatatttaaaatttattttgaaatgtattaaaaaatggatgaatgggtggagaaatatttggtaaggtaattatagtaagatgttaatagattttaattggtaggtatataggtgtttatttttaaatttttttgattttattgtatatttgaaaatttttatttttagaataagaattttgagaaatttttattttttaaatgaatgttggaatgttaggaaaaatataataaaatttaattaaaataaaaattaattaattttattatttataattaaaatggatataatataagaatttatgagttataaataataggttatgttattatagtaagaggatttgtggttatatggttttttaaagtattgtttttgatttaatggaatgttcgttaggtaaatttttagttataatttggatttatatatagattggttaatagggagtaaatataattagtaatatgataaatcggttttttgatttttatattagtttttttggaattggttgattaagtttgttttttagagattttgggtatagaatagaaaattaggtttttagttagattgtgagtttgttaggggtattaataggtttttttaaattttattttgtttttaatatataatatatttatggttataaattaataaaattaaggttatgatgtaaacgaatatatatgattttatttatataaaatttttaaaagatattagtaatttagagatagaaaatggattagtggttttttgggagtggagaatatagggagataggaaagagggaggttgattggtatggagttttaggaatattgtagggtgatgaaaatgttttatatttttattgtggtagtagttgtataggtgtataaatttgttaaaatttattaaaatatatatttaaaattattatattttgtttttaaagtattttttaataaattgattttaaaaaataaggattatgaaaggaatgttttttaggttttaacgtttttttaattttaaattttttttttatatgagattttttttttgattaatatttagaagtttatatttttataagattaaatataatttgaagtatataatgattaatatatgtaacgtatagattttttttttaattagtttattttggtaatataaatgaattaatttagtaatatttaaatttatattttgaagagtattaagatttgaagagtagttttaaatttagtagtaatttttttttatattaatgatagagtgatttagtttgtattatgatattgatattgttaatggttaatgttataagtaattggttttagtaaagttatatgtttttattattgtgagttttagttagtaagattgtaatataattcgatagttttttttaaagtgtttttttgtttaagattatgataaattaagttagatttagtttgtttagtttttgtttttaatataaagttttgaatggtttttttttaaagagagagaaataaataataagtgtttattttggttagtatgaaaattttttttttagtgtattttttttttagtgtaattttttttgttttattattttaaggtgtaaaagttgagatttagttaattatttattaggaatttattttatgtggatttatataaattttaaagttaaaatttttttagaaatttaattagtgtaagtatatgaaaagttataggattattatagttgataattattattaggtaaagtttagaatagtagttttttaatttttttgattataatttttagtaagaaatatattttattattataatttagtgtatatatgtataaagtatgtaattgaaatgaaagttttatgaaatagtatttatttttatataatataagatgtattttggtattttttattttttttttttttttaagagagggggtttttttatgttatttaggttggttttaaatttttgagtttaaaggatttttttatttcggttttttaaagtgttgggattatagtcgtgagttattattatgtttggtagatattttttattttattatttaaaaatttttagtattggtttatttaattttttttataatttaataagtgggttttgatagacgtttgatgaaagattagattataataaagggttgtttagtttttttattattttatagatttttggattggagttttttaatgtatttttttttattaattatgtattatgtgttagatattgttttgaaggttttaaaaataaaaagaaatttttgacgaagatttaaattttaaagagtttttaagtttagtaatggattaaaaatttatattggaattttaagagataaagtgatatgggaatttggaggatagagatttgttttagttggggataaattaataaggtttaaaaaaaaaaaggtattatttgaattttttttttttttgttattagaggtttgtaggatgaattggttttaagtgtgagaaagatttagttatgtgatgatgtggaggaaggtgaagtattataaattaagagagtataaaaataagaatagaaatattttagtatgtgaatagtggattaaataggaaaaaaagtttggggttatattatttttttttaaaatgttagataaagaaatttttttgtagattggtggaagtttgtaaggtatttagtaaaaaagttattagattataatgttttttagaaagatgttaagtaaaagtatttagtgattttgaagtgattagaatatatttatttttaaatattaaggttaaaatatttattttaggttaggacgtagtggtttatgtttgtaattttaacgttttgggagaataagaagggaggatggtttgagtttaggagttttaggttagtgagttacgattgcgttattgtattttagtttggatgatagaggaaagttttgtatttaaaaataaataaaaaaacgttttaaaggtaaatatatatgttttttagattatttaagttttattattttatttgttaatgcggataacgtgataattaaatgaattaagaaaattatttaagtaataatgaaaaatttattttaaaaagtgaaaataaaatttgttttcgaagttttagtaatgaaagagtattggaatacgagttttttgaaatttattagttgtataatattaaatgtgaatttagaaatgggtattagatatttaagatttttatgtgttagggaatgtattagatgatttatatgagtaaaaataatttttagagttttaggataagttttttttttatttttaaagaatttagttattattacggggtagaatttataaataagttagaaattcgtttttttaattttaggaaaaaatatagttttagattttttttatttgaatttttatataaaataataattgtttttaaaatattttttagtaagatatataagtattttattaattgggtttttttttttaaattattataattattgtttatttttttattttatttttttgtttttaatagtgtaatttgatttttttgtatatgtttttttttttttcgagtaagtttttttattttttttgtggaagaattattattattttttaaggttagttaaaagtgcggtggtgataagttttttacggaggttagtttacgtatggatattttatagtaattgaatttggtttttttatagtattaatcgttaggtattaattatttgtttatttgttaatttttattaggtaggtatagtttttattgatttttacgtattttttttttaatatacggattatatttggtatatattaattgttggataattggttgttaatagtaattttttattttaaggaaaattttataatattgttagtttttaaatatttgttgagaaaacgttaatataggatttgaaagtgtattagaaaaatataaattaagagatgagtggattgggttaagtttgatataaagtaatatagaaaggcgaaggtaaaaataaagggaaaaaaaatttttaaaattgtattatatttttaagggagggagattttataaaatgagtagtggataagattagtaatatgaatagtaagttgtgtagttttcggaaagaatgcgtaagggtattaattttttaagagtgaggttttaggtatcgaatggattggttttatagttcggataagaaacggagatcgtttggttgggttttaagacggaggtgtgcggttttgttattgcgaacggggcggggaagagaggaaatgacgagttaaaaggggtggtaacggcgtcgggtcggagattcgggcggagcgggttgggaggaggggcgcggcggagtagggggagtgggcgaattaacggttttttttttttattagggagatagcgggggcgggtttatagggtttcgaggcgtgggcgggttagtttcgttgttagtcgtatacgggatttcgcggtcgcggcgcgtattttttttaggtttttttttcgatttagaggggttgtagataagatagattcggttcgttgggagcggggagcggggggcgcgggtttcggggaggttttttgttttaagggtcggagagtggagagtgtaagggtaggtttaagtttgcggttagaacgattaggaggaaatcgtcgaggtttagggcgcgtatgtgttttttagtgtagggttattcgtggttttaggtttggggtttgagaatttgggtttgagtcggggaatagggacgtatttttaattggttttggtattttgcgagggtcggagtttcgaggtgtttgtttttcgaggcgttattttcgcgcggggcggtttttgtaggtttcggtcgggagtgtttcgaggcgttcgtaggtttcgggtcggggtcgttggtcgttcggttcggttaggtttagttcgatttttcgggttcgacgggcgtttgggttttttttgagtggttagcgagattcgttaatcggggcgttggggtcggttttgggtcgttggatattggttttttatatttatcgtgtttcgttttttcggttcgttgttcgcgttgattggttttagtatcggatttcgaaatttaattagaggttttagtcgtcgttgtcgtcgttattgtcgttgtttagtaaaatggcgaattcgaataaaggggaatcgggtttttttttaatcgttttcgcgtaggcgtttttgaggttacgtttattaattttagtttagggatcgttttattttttcggaggagtaacgcgtaggcgttttttgaagttacgtttattttttcgttttgatattatttttagtgaaaggaatacgtaggcgttttttagacgcgttagattttttaatttaaaacgttgttttgagtttagtattacgtaggcgttaattagtttttttgttagttgtttatttttttttaagtggttattaggatatatttttgcggttaatgcgtaagcgttatttttttcgattcgtggggtagtttcgttacgtatgcgcgggcggcggcgggaaattacggaatttattgtcggaagttcggcggttttcgttaaagagtgtgggttcggttagtaagttagaggggttcgttttcgtttcgttatcgggcgggggcggttattttagatgcgtgtaattaagggttttggcgggattggtttcgcgtttgggttggttcgttgttttttatttattagggtcggattcggagttttttttcgcggggcggggatttttaaataatcgatttttttttaggtgaagggtgatttgggtacgttggggttttgagcgagttttttcgtatttttttataggattttaggatagattgcgttttcgttgattcgttttagggtaggagatagagaatgggaggttttaatagatttttttttttttttacgtattttttaaaaaagtggggggtgaacgttttttgagaggtcgtttttttttttttacgtttggggtttagtacgttagtattttgtatattttgtggttgcggtttaacgggattgtggttaagttttttttgtttttttttaagttagatttattggggaaatatttttgcgtcgtgtagagaaaaggagatcgttttaaatcggttttgtttcggagtggttttggagaaaggaggaggcgtgttttagggatgggttttgttttcgttgacggagcggggcgttttaggaaagtacgaaatgagagcgggtcgagatagttttcgaatttaagcgttttttttttttgttttagaagggttttgtattacgttttaggggtcgaataaatttatatttatcgataaacgttggggaaaaaagtttattaagtggttgtatagggtaattagaatattatatattaaggttgtttaagtatttttatttttttttttttttttatagttgaagaaatatttaaattttggaaatagcgatttagtattatggttagtagttttaatgaagatttagaaggaagtagagtgcgtaataattattgatttattggtgaattgaaattcgtaataatggaggttaaaagtataaatattttttaattaaattaatgattgtattatttttttttttttttagttgatttattttaaaaaggtttaaaattttaggtagggattatttattattttttttttatatatgttgtaattggtttggttttaaattagattggaggaaggggtgtcgggagaggtagtcgtgggggatataaaatatagaaaaatagtttagtattttattgtatttaataaaatattgtttttttttttgtatattttttagattatttatgtgaaaggagatttttttgtatgttcgaaaatagattttttagtttattgtattagtgaggattgtcgtatgggcgttgggatagttgttttttttaagaagaaatttggaggggtgtaagaatttttaaattaacgtgagttttggaaattatttatttggtttgttttggttagagtattttttaatttgttatattttaataaaatatgcgtgtaaagaggggatttttaagaattaaatgtttttaagatttttttttttaagaatggtttttagtttagacgtttattatattaaaatttaatttttgtgaaggtttttaattttttttttttgtattatgaaatttttttgacgatattattgtatttttttgaaatttgaaataattttgagatgtttagtttataggttggtatttaagattttttatttattaatattttgttttttttttaaagaggaatttagaaatttttttttttttatagattttttttattattttttacgggttattttaaattagaaatgtgtattagaattttatgtaaagtttttgtaatagttttttcgattatattttaggtttaatagtattagtgtttatagtgatttttagttttagataaaagtaatttttattgttttgtattatagttatttggaatgatgatattttttttggattgaaaattttgtaataattaattttttttttatatatttgtattttttataatgttttatatagttttttgtatgtaaaaagataattattgagtaaatatatatttggtaagtaaaaaattatatattataaaataattttaaggtaatagagaaagtttgtggataaatgaggatatatttaaaagtagtagtggtataaaagatgggttgtgaggaaatatgattgtaagaaagttgttaagttaaggaatatagtatttgggaatgttgataaaaagtaaagtgtttgtgggagataataggttttttttatttttttttttagtgttgaaaattttagttttgaggtaaatttagatttgtaaatattttaaaatttttagagattagtgtttggtttttttttttatttttattattaaataatttttttttagaaaagaaatttggagaagtggttgttttgaagagagatgggcgatatatatattatttggtaagatggggttaattttttttttttttagggttagtttttaatatattttaaggatttgtgaatagatgggttgtattgtatttgtgttgattatgatgttttattttagataattaagaatgttaaaaagttttttattttatgataattttagtttagtgatggcggttatttggagtattgggttagaaagaaatgtgaggttgtattttagttttgtgggaaagtcgtgtattatgtattataggtttgttttaagatttgtaaaagttaggaatgtttgttatattatattttttaggtagagtgagataaaaataataatgttttaagagatagattttttaaaggagttttttttttattttatgttaaatagtatattgatagtaagggggtgaataaaaataaaaaataataagtgtagttttaaataatatttagttttttttttaattattgtttgaatgtggggttttttaatagtttaggatggtatttggtttttgaaagggtgtggtttttttagtggtggtggtgggtagtttatagttaatttattataagtttgatttggatgataaattgagtggggagatgttttagtttttttgaattttgtttttaaagtttatgtggtttttagtggttttattttgggattttattagttttttttgttgttttatgtagagagataaaaagtaagtaagtatagtttttaaataagtagaggtttttagtagggaatttttaggtggtatgtttttttttttgttagagatatgtagtttattttttggaagtggtatagagattttatttattttgtttaaaaatattgataataggtattatttgttaattttatgggttttttaggaaaaggaaagattgttacgtggtagagtttgggttttttagtttttatttagtggatttttttgaaggttttttataatagtgtggaaagggtaatatgatatttgttatttttgttttagattaattttataaaaatgtgtttatttttttaattattgggatgttgggggaatgtgatgatttttttttggttattattttgggatgatgaaagtttgaattttttgtgtttagattataaagaaaagggtttcgtataagttaatttatgaaaatttatagaagagtttagaggtaatgaagttttattgtttgaagaatggagttattgatttttttatgtttaggtaaggaaatttatggttttaaatggagatttaattgattggtggggtttattattttatttaaagataaataatttaaaagtttaatttaaaatatagatttaaaggtggataaaagttaaaattttgtaaaattattagtgaattagttgtttggttttagattaaggtatagttattttttagtttgagttgaatgaattaggataattattttgaaatatatatttgttttagtttgtttagtagagagcgattattgttatttagttatatttgttgaatttttagtattttttgtttgaagtttggtttttatttttaaagtaatgtaagttaaagaattaagattgagtaatggtggttttttttttggattattttttattttttaaatttattattttgcgttaagaaagttgtaaattattatttttttttatattgtatatttgttttggttagtatgggtaatagttagaggatttgtttttgatgtaattttttagattttagttattgggaatttagggaatgatattgagggtttagtagtttttttgttttttttttaggaaatgggttttattttttttttttttgttattttggtagttttgagttaatgttgagtatatatgtagttttattttgcgttttatattattttgtatatggttttaaatgttttttattttatattggtttttgatatatttatggtgtatatatatattagaaattttttttttaattataattttttatggatttaattattatattatgatatgaaattattaattttaggttttttttttttttaggcgtgttgaggattattagagtaatattttg

SEQ ID NO: 1959 - DNA, 6403 bp, Artificial Sequence
  chemically treated genomic DNA (Homo sapiens)
gggatttgggcggaggtgggaagtagatagttttttagagaagtttaagtgaggatgattttaggttgaattaaagagtagaagaggttttattaagagttggtatggtggtttgaggattattatattttagttaaggtggtttgagggttattagttaaggttaaggtagatattattaattaattttagtatattttttagtgagtttttattagttttttaggtagttatattagtagtttagaggtgatatgtaaaatgatgtttgtatatgagttttgaattaggggtaagttggtttaattagttgaaagtgaaggttagggtaattttatgttatttaagggttagagtaagaattaggatatattgaattaggttgttatgaaggttgggaagttgtaaagttagattgtgtttggttttgagattagaagagtagatatatttaataatttttatatgtatatgatgttttattattttagagtgtttttatatttttttttttttagacggagtttcgtttttattggttaggtcggagtgtagtggtacgattttagtttattgtaatttttgttttttgggtttaagcgatttttttgttttagttttttaattatttgggattataggtgtgtgttattacgtttagttaattttgtattttttttagtagagatagggttttgttatgttggttaggttggtttcgaatttttgattttaagtgatttattcgtttcggtttttaaagtgttgggattataggcgtgagttatcgtgtttatttatattattttttgtattggaaaaagaaatgtgggttattgttttttttgaggttaaaagataaaataagtgaagggttttttatagttttttaagttgggggtagtgaagttttggagtttgtttgtgaaagttaattttttatatttttttataattttaagtttagtgatattattttagttgtttaaaattggttattgtaggagtatttatattatagtaattagtagatgttataaattagggttttttggaaagttagttatgaaatatttattattagtatattgttggttgtggggaaggttgatttatagaagggtgagaggtggtggaagttggaaaataaagacgttttttttgattaggggagatagttgttttgtttagaggaagggggagaggtggttttaggtaggttttgttggtttagaggagagtacgttgtttttggaggggaagggtggatagaaggagtagtaagtagagttatgtgttgttagagttcgtttttcgtgttttagtttgagtttataaggagagggttgggtgttcgttgatgataattatagtggtttagaggattttttagagttttggggtttttttagttttttgttagggatgtgatttggtaggtggattattaattgtattggtagtgattattgtaaatagttggtcgatagttagattattttggttgtttattattttattatttgttggggtttgtgcgcgggggagtattgatagcgagatggttggttagttaattattgtattgaaataaggtttttttatattttttgtttagttttaggggattttatggaaggaaagttggggtatagaacgttagggtgtggttgtgtatttttaggttttttattttttttattttattttatttttaattttagttttaggagggaggtagggtttagggtaaggttttagcggttttagtaggataggtcgggtgggggagtttatgtttataattttaggattttgggaggtcgaggtaggtagattatttgaagttaggagtttaagtttagttcggttaatatggtgaaaatttgtttgtattaaaaatataaaaattagtcgggtatggtggcggtatttgtgattttagttatttgggaggttgaggtaggataattatttgaattcgggaggtagaggttgtagtgagttgagattgtattattgtattttagttttggtaatagagtgagattttattttaaaaaaaaaaaaaaaaaaaaaaaagggggggggtgttggtaaggatatggagaaaaggggatttttgtatattgttggaatgtaaattagtataattattatggagaacggtttggatgttttttaaaaaattaaaaatagagttattatatgatatagtaattttattgttaggtatatatttaaaggaaaggaaattagtatatttaagagttattagtatttttatgtttattgtagtattgtttataatagttaagatttggaagtattttaagtgtttattagtagatgaatggataaagataatgtggtaatatatataatggagtattatttagttataaagaagaattagattttgttatttgtaataatatggatggaattggaggttataatgttgagtgaaataaattaggtatagaaagataaattttgtatgtttttatttatttatgggagttaaaaattaaaataattgaatttatagagatagagagtagaaggatggttacgagaggatgggaagggtagcgaggtgggtaggggggatgtggggattattaatgggtataaaaaatagttagaggttaggcgtagtggtttacgtttgtaattttagtattttgggaggtcgaggtgggcggaatatttgaggagtttaagattagtttggttaatatgatgaaatttcgtttttattaaaaatataaaaattagttgggcgtgatggtgtgtatttgtagttttagttgtttgggaggttgaggtaggagaatcgttggaatttaagaggtgaaggttgtagtgagttgagatcgcgttattgtattttagtttgggtgatagagtgagattttatattaaaaaaaaaaaaaaaaaaagttagaaagattgaataagatttaatatttgttagtataatagggtgaatatagtaaaaaataatttatttgtatttttaaaaataattagataagtataattgggttgtttgtaatatataaaaaataagtgtttgaagtggtggatattttatttattttgatgtgattattttgtattgtaggtttttattagaatattttatgtaatttataaatatatatatttattttgtatttataaaaagtttttaaaaagaaaaataaatagtaatcgaaaaaaaaagagagggagaaaagaaaaaagaaaaaaaaattaagtgtttggttgggtagaataaattttaaggttataatgttattgattatgggttttttggtttttagtgtatagaaattgatataaggttaatagtttttttaaatatgttttattggaatttacgttttggtataagggttataataaaagagagagcgaattttttggtttgttgattttttggaaaaaatcggtagggatttttttattaggtaaagtataggaattgacgttagaggtaggatgtgttgttgggtaaagtatacgagaagtggggtatgtaggttagtattatttggttgtaatggttattttgaggaatgggttaattggtggtttggttagtggtaataaggttgtaaattaattatttagtatttttttttaaggtgggatattcggtaatattgtttattttttaaggttagtttttggaattaagtgaaaggatgattaatggatatgttgttagtgaggtagtggtgtgggttttgtgattagtgggaatgtacgaaagaatgttttagcggggagtgagttgaagttaagttttatttttattttgttttaaagtgagtttagaaaaggggatttaaagaattttttttttttttttttttttttttgagatagagttttgttttgtcgtttaggttggagtgtagtggcgttattttggtttattgtaagtttcgtttttcgggtttatgttatttttttgttttagttttttaagtagttgggattgtaggtgtttattattaagtttagttaattttttgtattttttttttagtagagacggggttttattatgttagttaggatggtttcgattttttgatttcgtgatttgttcgttttagttttttaaagtgttgggattataggtatgagttttcgttttcggttttaaataatttttaaaggaagtaaagttaattttgaaagaattattaggatttggattgattgaaaggagtggggaagtttagggaggaggtgtttgttagatattgggttatggtagtggtcggtgaagttgtagttgtttagggtagggatggagagagagtttgggtatgaggagagggtttcgggatgtttggttggattagattttatagaaagttttatttaggtttttaaaattattttttttagattttatttgagattttttttttagttaatattttttagttttgaatatattttttatttttatttttttttttttttttttttttttttttatatgtttaaatttaaattatttttcgtgatttttttttttgggagatttatggtaagaacgagaagaatgatggtgtttgttaggggatgttttgtttttttgaattttggggttttatgtattaaataatttttttgacgagtttaagtgttttttttggtttataatttttggcggttggtttttattttttgggtaagtattgtatatagtttatggttttttttttattatattttttattttcgttcgtttaagttttttttttcgggaattttattattttttagaatagttagaatatttgtggtttatttttttgttagtgtttaattaattatttgttttaaaagaagggttgaattgatggaaggaatgttgttagtttgagatttaggaagataatttttgtagggttattttttggtttttggaggaaagagaaggagggtagtgttttagtggtatagaagtgagatataatggaattaggttttatttttaaggatatttatttaagttattttaattttcgggattatttagaaaaatattataagtttggttttaggtattttgtagaaagttagatttttaagtattttttgaaaaatttttttaagatattttgtttaggtaagtttgttgtttgtatgtttttttattaatgtgagttatatagatggagttttagggtacgattgggttttgtgtttttcgttgttgttttatagtttttttggtattatttatttatttaattaggataaaaacgaatattggtatagcgattttatagtttataaagtgtttttgtatttattgttttatttgattaagtaaaaggaaattagaggatcggagtgttgttttgagtttattttgatttgttaggcgatttgagggagatttttagttttaaagggttatttaagtggaaattttaaaatagtatttattttgattttaatttaagggaatgttgtgaatatgtatgagataaagattttttaatatatgaagaattgggtgatttttggagaaagatattatatatttaattttttttttaattaattttttttgaaagtattgtttaatagtttttatattttttatgtaatagattttttggatttggtttttagtttgtatattagatgtagattttttttatttttttttagattttaaaatttttggtaatatgtttttattttggattggggaataaaaaatgaaaagttttttttttttttttttgattttaaattttattaaagtttgaggttttttaaattgatgtgttttatttaaaatttaagtgagatatttttagtttttttgatatttatattttttttgttattatgatgtaaattatagggatttggggaaaatatgggatttttttttttttttttggagatatagattttattttgttgtttaggttggatggagtgtagggatgtgattatagtttattatagtttcgaatttttggatttaagggatttttttgttttagtttttttaataattaggtttttaggtatacgttattatgtttagttaattttaaaatttttttgtagagatgaggttttattatgttgtttaggttggttttattttttaggttttaagtgatttttttgttttggttttttagagtattgggattgtaggtatgagttattgtgtttggtttagaaaagatgttttaaaaaaatattttgagggaaaagttgtgaatagtagtggtttgtttttgaggatcgttagtatagttttagggaagataatgtaaatttgattttgtttattgttatgagatgtttgattttttttttttgttttttttattaatttaga

SEQ ID NO: 1960 - DNA, 6403 bp, Artificial Sequence
  chemically treated genomic DNA (Homo sapiens)
tttggattagtgggaggaataaagaggagagattaggtattttatggtagtgggtagagttaaatttatattgttttttttgggattgtgttggcgatttttaaagatagattattattgtttataattttttttttaaaatgtttttttaaaatattttttttgggttaggtatagtggtttatgtttatagttttaatattttggaaggttaaggtaggaggattatttgaggtttggaggatgagattagtttggataatatagtgagattttatttttataaaaaaattttaaaattagttaggtatggtggcgtgtgtttgaagatttagttattggagaggttgaggtagaaggattttttgagtttaggagttcgagattatgatgagttgtgattatatttttgtattttatttagtttaggtaatagagtgagatttatatttttaaaaaaaaaaaaaaaaattttatattttttttaaatttttgtaatttatattatagtgataaagaaaatataaatattaaaaagattaaaaatgttttatttgaattttaaataaagtatattagtttgaaaaattttaaattttaataaaatttaaagttaaaaagaaaaaaaaaaaattttttattttttattttttaatttagggtggaggtatgttgttaggaattttaaggtttaggagaaggtaaaaaagatttatatttggtgtatagattgaagattagatttagaaagtttgttatatggagaatgtaaaaattattaagtaatatttttaaggaaagttaattaaaaaagaaattgagtatataatgtttttttttaaaaattatttagttttttatatattgggaggtttttattttatgtatatttatagtatttttttgagttaggattagaataggtattgttttagaatttttatttaagtggttttttgaggttaaaagttttttttaagtcgtttagtaaattaaggtagatttaggatagtatttcggttttttggtttttttttgtttgattaagtgagatagtggatataaaagtattttgtaaattgtggaatcgttatattaatattcgtttttattttagttaaataaatgggtgatgttaaaagggttgtgaagtaataacgagagatataaaatttagtcgtgttttgagattttatttatatgatttatattagtggggagatatgtagataatagatttatttaggtagaatattttgaaaagattttttagaaggtgtttaagaatttggttttttgtagagtgtttagaattaaatttgtaatatttttttaggtaatttcgagggttaaaatggtttagataggtgtttttggaggtgaagtttgattttattatgttttatttttgtattattggagtattgtttttttttttttttttttagaagttagggagtgattttgtagaagttgtttttttgagttttaggttaatagtattttttttattagtttagttttttttttagaatagatggttggttaaatattaatagagaaatagattataaatgttttggttgttttaggaaatgatgaaattttcggagaagggagtttaggcgaacgggggtggagggtatggtagagggagggttatgagttgtatgtaatgtttgtttaagggatgaaggttagtcgttagggattgtagattagagggagtatttgagttcgttaggaaaattatttaatgtataggattttaaagtttagagagataggatattttttaataagtattattatttttttcgtttttgttatgaattttttaagaaaaggggttacgaagaatggtttaaatttaaatatgtaaaagaaaggaaaaaaaagaagggaaagatgaggataggaaatgtatttagggttaaggaatgttggttgaagaaggagttttagatgaagtttggaaagagtaattttaaaagtttggataaggttttttgtaaaatttagtttagttaaatatttcgagattttttttttatgtttagattttttttttatttttgttttaggtaattgtagttttatcgattattgttatgatttagtgtttggtaagtattttttttttaagtttttttattttttttagttaatttaaattttgatagtttttttaaagttaattttattttttttaagaattatttaaggtcgggggcggaggtttatgtttgtaattttagtattttgggaggttaaggcgggtagattacgaggttaggagatcgagattattttggttaatatggtgaaatttcgtttttattaaaaaaaaaatataaaaaattagttgggtttggtggtaggtatttgtagttttagttatttgggaggttgaggtaggagaatggtatgaattcggggggcggagtttgtagtgagttaagatggcgttattgtattttagtttgggcgatagagtaagattttgttttaaaaaaaaaaaaaaaaaaaaaaagaattttttaaatttttttttttgaatttattttgagatagagtagggatggggtttggttttagtttatttttcgttaaagtattttttcgtgtatttttattggttataaaatttatattattattttattgataatatgtttattagttatttttttatttaattttaggaattggttttaggagataaataatgttgtcgggtgttttattttgggaaggaatgttgaataattgatttatagttttgttgttattggttagattattagttggtttattttttaagataattattgtaattaagtaatgttgatttgtatattttatttttcgtatgttttgtttagtagtatattttgtttttgacgttaatttttgtgttttgtttaataaaaaaatttttatcggttttttttaaggagttagtaagttagagaattcgtttttttttttgttgtggtttttatgttagggcgtaagttttagtaaagtatgtttgggaagattattggttttgtgttaatttttatatattgagagttaaaaaatttatggttagtaatattgtggttttagaatttattttatttagttaggtatttgatttttttttttttttttttttttttttttttttttttttcggttgttatttatttttttttttaaaaattttttgtgggtatagagtaggtgtatatatttatgggttatatgagatattttgatagaggtttgtaatataaaataattatattagggtaaatggggtatttattattttaagtatttattttttgtgtgttataaataatttaattatatttgtttagttatttttgaaggtataaataaattattttttattatatttattttgttgtgttagtaaatattaggttttatttaatttttttaattttttttttttttttttttgatgtggagttttattttgttatttaggttggagtgtagtgacgcgattttagtttattgtaatttttattttttgggttttagcgatttttttgttttagttttttaagtagttgggattataggtgtatattattacgtttagttaatttttgtatttttagtagagacggggttttattatattggttaggttggttttgaattttttaggtgtttcgtttatttcggttttttaaagtgttgggattataggcgtgagttattgcgtttggtttttaattattttttatatttattaatgatttttatattttttttatttatttcgttattttttttattttttcgtaattatttttttattttttatttttgtgagtttagttattttagtttttagtttttataaataagtgagaatatgtaaagtttgtttttttgtgtttggtttattttatttaatattatgatttttagttttatttatgttattgtaaatgataggatttaatttttttttatgattgaatagtattttattatgtgtattattatattgtttttatttatttatttgttaatggatatttagagtatttttaaattttggttattgtgaatagtgttataataaatatgggagtgttgatagtttttggatatattgatttttttttttttgggtatatatttggtaataggattgttgtgttatatggtagttttatttttaattttttgaggaatatttaaatcgttttttatagtggttgtattaatttatattttaatagtgtataagggtttttttttttttatatttttgttagtatttttttttttttttttttttttttttttttttgagatggagttttattttgttattaaggttggaatgtagtggtgtaattttagtttattgtaatttttgtttttcgggtttaagtgattgttttgttttagttttttaagtagttgggattataggtgtcgttattatgttcggttaatttttgtatttttagtatagataggtttttattatgttggtcgggttggatttgaatttttgattttaagtgatttgtttgtttcggttttttaaagttttgggattataggtatgagtttttttattcggtttattttgttaaaatcgttaagattttgttttggattttgttttttttttgaggttggaattgggggtggggtgggatgggagggataaagaatttgggagtgtatagttatattttagcgttttatattttaattttttttttatagagttttttagagttgagtagaggatgtaagggaattttgttttaatatagtaattaattggttagttatttcgttattaatattttttcgcgtataggttttagtaaataatgaagtaatgaatagttaaagtgatttaattatcgattagttatttataatagttattgttaatatagttaatgatttatttgttaggttatatttttgataaggggttaaggaaattttagggttttgggaaattttttgggttattatagttgttattaacggatatttaattttttttttgtgggtttaaattgggatacgaaaaacgagttttgataatatatagttttgtttattgttttttttgtttattttttttttttaagggtaacgtatttttttttaagttagtaggatttgtttgaagttatttttttttttttttttggataggatagttgttttttttgattagagggggcgtttttgttttttagtttttattattttttatttttttgtaaattaattttttttataattagtagtgtgttggtggtaaatgttttatgattggttttttaaaaagttttggtttgtagtatttgttgattgttatgatgtgaatatttttatagtggttaattttaagtaattaaggtggtgttattgaatttgaagttgtgaagaaatgtgaaaaattagtttttataagtaagttttaggattttattgtttttaatttgggaaattgtggaagattttttatttgttttgttttttgattttagggaaaatagtggtttatatttttttttttaatataaaaaataatgtggatgggtacggtggtttacgtttgtaattttagtattttggaggtcgaggcgggtgaattatttgaggttaggagttcgagattagtttgattaatatggtaaaattttgtttttattaaaaaaaatataaaattagttgggcgtggtggtatatatttgtaattttaggtaattgggaggttgaggtaggagaatcgtttgaatttaggaggtagagattgtagtgaattgagatcgtgttattgtatttcggtttggttaataagagcgaaatttcgtttaaaaaaaaaaaaatgtgaaggtattttgaagtggtaaaatattatatgtatatagggattattaaatatatttgtttttttaattttagaattaaatataatttaattttataattttttaatttttataataatttaatttaatgtattttaatttttattttaatttttgagtaatatgaaattattttaatttttatttttagttaattggattaatttatttttaatttaggatttatatatagatattattttgtatgttatttttgaattattggtatagttgtttggagggttgatgggggtttattggaaagtgtgttgggattgattagtaatgtttgttttggttttgattgatggtttttaggttattttgattggggtgtggtggtttttaggttattatattagtttttaatagaattttttttattttttgatttagtttgggattatttttatttaggtttttttaggagattatttgttttttattttcgtttaggtttt

SEQ ID NO: 1961 - DNA, 8238 bp, Artificial Sequence
  chemically treated genomic DNA (Homo sapiens)
aatagtaaatatttttaaaagatattttttttttaaagtagttgttttaatatgtattatttttatagcgtgtttttattatagttatttgtgtgtatattttatgttttttagtgagtttttgaggattttttaaattttaaatatttataaatagtgatgaatgtacgaatttggatgtgtgtggaggatgtgttgtagttgatttcggtttttttttagtagtaaaattagttgtttgttaatgatgtatttggtttgaattttagttagaatattgattacgttaaagagatttttgttggtagaattttttttttttttttttaaaggtttgtatttgtgaatggttattttaggaaaagtaaatatttgttaaaatagtaagaataaatttattttttaagttgaatattttaagtggtttttggataattttacgtcgattatttttttagagtaagaaaatagtttttaagagtataggttaaattaattttaaaatgtagttttttgtggaaattttattgtaggtatgttttaatgtagatggatgggttagatggagggagtaatggtagtttgaaggattttgttaattacgtggataaaatttttagtgttagaattttagtttgttaagagtaatttgtttttatttttaggatttgagtatgggcgttaggtagatgtatgatagttgtttggaatatattattttgatttttgaaggttattagatttaatgaagtaaatttttgatgaagagatgagttattttagatgaggttagagagtgaatatttttttttagagttagatttaatttggttagggataggtgattttatggttttgattatttgttattttgatttttttaggagttttaagtaagattgatttttttatttgataaaggtttataggatgtttaatttgggttaggttttaggaatgtaaagtgaattttattgttttttaaaggagtttagagtatagatttataggtataaaaataagtggtttgtagtgttaggattcgttataagtttgtatagtttttgggagtttttaggagggatttaaatagtaaattttataggggagggtgaaaaaaagttaatatggatgttaattatgtatagaaaaaataattaaatgttaatggttattatgtaagtgtaaaattgttggtaatttttttgtttgtgttttttaattttttattaattgaaaaatggtgtgtgtgtgtttttttaaatagttttaaaaataaattatggtattgttgattttgatattttagaaattggttagttttaagggtaaaagggaattgagtggttattttgtgttggatttggtatagtaatattaatttattttatttttagtgatattttaatttttttttataaatggggagattgaagtttagaaagattgatagaattatttagagttattttttagaattatagatagaatttaaaatttcggtttttaaattcgggatttttcgtttgattttttcggttttgaaatttttttggaagaggttgttattgatgttggttatttttaagtttattttaattttgttttaagattttttatatagtgttaagtatagtaatttgaatatagaaggttttttaatagaaatgcgtttataggattttgatatattatggtttatttagtttttgattttttttagttgaattaaatatttagattttattttaaaaattttaagaatagttgatttaggggtgtgtgtttgtagttttatttttttttgaggttgaggtagaaggattttttgagtttaggtgttcgaggttaatttgggtaatatagttgagattttatttgtaagtgaaaagaaataaaaattttaagaatgagtattagtaatgttttgaatgatattattttgtttttagttattttttaataaaattgtttaaatttaataggtaaatgaattttttattttatttttgttggaaattagttgtgtagataatttttatataaaataagaatgttgaatttagataatttttgatatttttttttttttttttttttttttttttttttttttagcgatatagtttcgttttgtagtttaggttggagtgttggtggtatagatcgtggtttattgtagtttagaatttagggtttaagagatttttttattttagttttagttttttaagtattagatattataggtacgtatcgttatatttggttaatatttatattttttatagagatggggtttttttatgttgtttaggttgatttttaatttttgggtttaagtgatttgttttggttttttaaagcgttgggattataggcgtgagttattttgtttggttttagaaagttgttacggtttagagtattattaagtattgtttgagtgttttattgttaatttgataggtaaaaattaatgttttaattttttagttgattaaataatttatttatattgagtaaagtataaagagtttaagaaagaaattatatatgagtgttttagatttagtagtagtattttggggaagttatatatagtatagttagatatttttgttagtagttatttttagttggatgatttttatattatttttgttttgattgttggtatttatttttttgagataaagtttgatgaaagttatggattttttttttggaaaaatatacgtttgtatgtaattttgtattttattttaggagattttggattttttgtagattgtttttggattttgggttaaaaatttgtattttagattgaatcgtgggaagaaaaaatagttagtgagtttttggtaaatcggagtattggattttgtttagtaattgtaaatttttgaatatattggatttattgggtagtgttaagtttaaagggaagtaagttaaattttaagtattatgttttgttaatttggtagttcgaattaagagtggttgtgagattatatatggtttgatttgttattggtagatttttgttgaaatatgaattaattagttttttagaaagtaagtatagatggaataagtatgtttagtttttggtaatttttttttaattatgaatttatttttaagttttttttttttttttttttttagaggtgatttttatgtatatgttttaatttttttttaattattagttttttttatagtttagtttttattttatggtttattaggatgtttaatggtaaattgggtataaagaggtgtgtgaagttttgtggaggggttagttttagggttgggggtgattggggagagtagttatggttttgatttatgtgatggggcggtagggtaaatattagtttgtttagtgatgtttagattttaatatttatataagtaacggattgtagtttgtagtttgattttttttagttttttagttattttttgttaataatagttttttcgtttgtttgtttgttttttgagacggagttttatttttgttgtttaggttggagtgtaatgcgtagttttggtttattgtagtttcgtttttttaagtttaagcgatttttttgttttagttttttgagtcgttgggattataggtatgtattattacgtttggttaattttgtatttttagtagagacggggtttttttatgttggttaggttggtttcgaattttcgatttaggtgatcgtttgtttttgttatttaaagtgttgggattataggtatgagttatcgtatttggttaataatattttttatgttataattttttaggataagttttgtagaaataattattttagtagaatagattgttttgtttgggaattttatatatgtgtgtgtgtgtgtgtgtgtgtgtgtgtgtgtgtgtgtgtgtgtatgtatttatgtatgtatgtatatgttggtttaatttaatttgttgtgaatattttaaagttattataagttaatattttttttttagtttttttgttttttatttttgtttatgataaatttgatttatagaagttttagatatttgtggttaaataaaagattttaggttgggtatagtggtttatatttttaattcgaaaattttgggaggtcgtggtgggtagattgtttgagtttagagggatggatagtttttttgttttttgttttatgtttagtttttggtagttttttttgatttggtttttttgtttttggtttttgttttatagttgtagttgttttatagtattgtgtttgatggtattggattgtggtaggtgtttaataaatatttagtgtttagtaggtatttagttaatatatagtgtattagttttggaaagagttttatttttattgattggttggttgattgattgtttgattgatagggtattattttgttgtttaggttggttttaaatttttgggtttaagtgattttttcgttttagttttttgagtagttgggggttataggtataaattattatatttgatttaagatttttatttttttttttttttttatagagattatgttgtttaggttggtttttaatttttcggtttaagcgatttttttattttggttttttaaggtgttggaattatagatgtgagttattacgtttggttatttttttttttttgagattgggtttttttttgttttttaggttggagtatagtggtataattttagtttattgtagttttaattttcgggtttaagtaatttttttattttagttttttgagtagttgggattgtagatgtatattattatatttagttaattttttaattttttttagtgatggagttttgttttgttgtttaggttggttttaaatttttgggtttacgtgattttttggttttagttttttaaagtgttgagattataggtataagttaaggatttttatttttaatgtatttttttttttttggatagatttgtggtttttttatttgaaggatataatgttttttaaattagtatatttgtagaggtttgttgtatttagtcgcggagtttattttttagtggtttttgttatatttgttgtaattaaaaaaatagtttaaggttttttaatttttgatgatatttttgaaagggaatataagtatggtgtatataattattattttttatttgtagttttggagagaggaaaaggtacgttttaaattaattcgttttttttttttttttgaaattttttataaaaaaaaattgtttttatatttttataatatatatttttttagatgtgtttaatgtgtatattgtagatatggttaatttttttttttttttttttttttttttttgagacggagttttattttgttatttaggttggagtatagtggtataattttagtttattgtaatttttgttttttaggtttaagcgatttttttgttttagttttttgagtagttgggattataggcgtgcgttattatatttagttaatttttgtatttttagtagagatggggttttattatgttggttaggttggttttagatttttgattttgtgatttttttattttggttttttaaagtgttgggattataggtgtgagttattacgtttggttagttaatttatttattgagtgtttagtgttgttgtgttaggtgttatggaggttttaaagaggaattattgtttttgttatgtagattttattaagagggaatgtaagagaaataaggaaagtattattatattgttgttattttttttttttaatttttattttggtatagttttagatttaagaaaagttgtaataaatagtattgatattttttttttatattttttttagattttttaagtgttaattttttgttgttttggttttagtgtgtttatttttttttttttttttttcgtcgtttgtatattttatattgttttttgaattgttttgagaggaagttgtagatatgatatttttttttttttttttttttttttttttttttttgagacggaatgttgttttgttatttaggttggagtgtaatggtgggatttcggtttattgtaatttttatttttcggttttaagtgatttttttgttttagtttttcgaggagttgggattataggtttacgttattacgtttagttaatttttgtatttttagtagagatagggttttattatgttggtcgggttggtttcgaatttttgattttaggtgatttatttattttagttttttaaagtgttggattataggcgtgagttatcgcgtttcgttatatgatatttttttatttataaatatttagtgtgtttttttaaaaacgtaatgattttttgagatagggttttattttgttgtttaggttggagtttagtggtgtgattatggtttattgtagtttggaattttcggttttaggtgatttttttattttagttttttaagtagttgggattataggtgtgttttattatgtttggtttattttttgtagagattagattttgttatgttgtttagggtgattttgaatttttggttttaagtgattttattatttagttttttatagtgttgggattgtaggtgtgagttattgtgtttagttgatttttttttttataattatagagtaattgtaaaaattaagaatttaatattggtatagtattattagtttagagatttaatttagatgttatttgtttttttttataataaaagaaaaattttcgatgagttgtatttagttgttatgtttagttttttttaatttagaatagttttttaatttttggttgttttggttttttttttttttgtattaagtattttgtggggatagagtgtaaaattttgtaaatatttagttatttatgaatttttatttataattttagtatttattaatgatttttgtttgaataaatgattacggtggtagttgttaaatggtgatttaatttataatttggaataaataatagttttaattaaataaaattaaagtttattatttagttttgtattagaaaatgataatataagagtattatatattttggttatttgtttgtattttatttggtattagtattgtagatatatttttttttgaattattgaaaatttgttttatattatatgatatggtaattttgtttttatttttttattagtaatgtatgagagtgttaatttttttagatttttgttaaaagttgtttttttaattataattattttagggagtatgagatggtattttattgtggttttaatttgtatttttttaatgattagtgatgttgaatatttttttatgtgttttttgttatttgtatattttttttgaagaaatagttatttaagtttttttttattttttaaattgggttgtttgtttttttgaaattgagttgtaagaattttggatattagatttttattagatatatgatttataaatattttttttttattttaagggttattatagtttattttttatgatttttgtttgttatgtgtaatttttgtttttttatttttaaattttatttattttattttattttttttataggtaggattttgttttggtgtttaggttggagtgtagtggtataattttaatttattgtattttttattttttaggtttaagtaatttttttattttagtttttgtaacgggattatacgcgcgtattattatgtttagtatttttttgtagcgttagggattttgtcgtgttgtttaggttgatttggaatttttgggtttaagtaatttttgttttggttttttaaagtgttaggattataggcgtgagttacggttttttgtttaatttttgtttttaaattttaattttggattttaaattttagaattaggtaaaggttttattttagagtttataatttttttgtgttatttttgttaaatgtgtgttttgaagttgggtagataaaatataatttttagtaattttttataaattaaagtttattatgtttgagttaaaataagttttaattataaatatgtattaaatagaggtttatatataggtatttagagggtttgttagtatttttaatttttggattttatgtcgtatagtaattgtttaaaattattttttttttttatgtattttagg

SEQ ID NO: 1962 - DNA, 8238 bp, Artificial Sequence
  chemically treated genomic DNA (Homo sapiens)
tttaaaatatataagaaaggaaaataattttagataattattatacggtataaagtttaaaaattaagagtgttagtaagttttttgaatgtttatatatgaatttttatttaatatatatttgtagttaaagtttgttttagtttaggtataataaattttggtttgtaaggaattattaagaattgtattttatttgtttagttttaaaatatatatttaataaaaataatataaaaaggttataaattttggagtaaaatttttatttaattttaagatttaggatttaaaattagaatttaaaagtagaagttaggtagggagtcgtggtttacgtttgtaattttagtattttgggagattaaggtagggattgtttgagtttaggagttttagattagtttggataatacggtaaaatttttgacgttatagaaaaatgttgggtatggtagtgcgcgcgtatggtttcgttatagaggttgaggtgggaggattgtttgagtttgggaggtagaggatgtagtgagttgagattgtgttattgtattttagtttgggtattagagtaaaattttgtttataaaaaaaataaaataaaataaataaaatttaaaaataaaaaagtagaagttatatataatagataaaaattatgagaagtagattgtaataatttttaggatggaaaaaaaatatttgtaaattatgtgtttgataaggatttaatatttagaatttttataatttaattttaaaaggataaataatttaatttaaaaaatggggaaagatttgaatagttatttttttaaagaggatatataaatggtaagaaatatatgaaaagatgtttaatattattaattattaggaaaatgtaagttaaaattataatgagatattattttatattttttgggatggttataattaaaaaaataatttttgataaggatttgaagaaattggtatttttatatattgttagtgggaaagtaaaaataaggttgttatgttatgtaatatgaaatagatttttaatagtttaaaagaagatatgtttatagtattggtattaaataaaatataagtaaatgattaaaatgtgtgatatttttatattgttattttttggtataaagttaagtaataaattttggttttatttggttaaggttgttatttattttaaattatagattaaattattatttggtaattattatcgtaattatttatttaggtaagaattattagtggatgttgaaattgtgagtaaaagtttatgagtaattggatatttatagagttttatattttgtttttataagatatttaatataaagggaaagaagattaagataattaaggattgaggaattgttttgggttaaagaagattaaatatgataattgaatgtaatttatcggaggttttttttttgttataaaagagaataaatgatatttggattaggtttttagattaatggtgttgtattagtgttaagtttttgatttttataattattttatggttataaaagagaaagttagttgggtatagtagtttatatttgtaattttagtattgtgggaggttgagtggtaggattatttgagattaggagtttaagattattttgggtaatatagtaaaatttaatttttataaaaaataagttaggtatggtaaggtatatttgtagttttagttatttgggaagttgaggtgggaaaattatttgaagtcgggagttttaggttgtagtgagttatgattatattattgaattttagtttgggtaatagaatgagattttattttaaaaagttattgcgtttttggaaagatatattaagtatttatgggtaaagagatgttatgtggcggggcgcggtggtttacgtttgtaatttagtattttgggaggttgaggtgggtggattatttgaggttaggagttcgagattagttcggttaatatgatgaaattttgtttttattaaaaatataaaaattagttggacgtggtggcgtgggtttgtagttttagtttttcgggaggttgaggtaagagaattatttgaaatcgagaggtagaggttgtagtgagtcgagattttattattgtattttagtttgggtgataaagtaatatttcgttttaaaaaaaaaaaaaaaaaaaaaaaaaaaagaagagatgttatgtttgtaatttttttttaaaatagtttagaaaataatgtagaatatgtaggcggcggggggagaagagaagggagtgaatatattaagattaaagtagtaaaaagttagtatttggaaaatttgggagaagtataaaaggaaaatgttagtattatttgttataattttttttaagtttaaaattatgttaaaataaaagttaaaagaaaaaaatgatagtaatatgatagtattttttttattttttttgtatttttttttggtaaggtttatatgataaagataatggtttttttttgaagtttttatagtatttaatatagtagtattagatatttaataaatgaattaattggttaggcgtggtggtttatatttgtaattttagtattttgggaggttaaggtgggaggattataaagttaggagtttgagattagtttggttaatatggtgaaattttatttttattaaaaatataaaaattagttgggtgtggtggcgtacgtttgtagttttagttatttaggaggttgaggtagaagaatcgtttgaatttgggaggtagaggttgtagtgagttgggattgtgttattgtattttagtttgggtgatagagtgagatttcgttttaaaaaaaaaaaaaaaaagaagaagaagaattaattatgtttgtaatatatatattaaatatatttagaaaaatgtatattgtgaaaatatggaagtaatttttttttataaaaggttttaagaaaagggaaaagacggattaatttgaaacgtatttttttttttttttagggttataggtaaaggatggtagttgtgtgtattatatttatatttttttttaaaaatgttattagaggttggagggttttggattgtttttttagttgtaatagatgtagtagaagttattgaagaatgaatttcgcgattaagtatagtaaatttttgtaaatgtgttagtttggaaaatattgtgttttttaagtagaaaaattatagatttgtttaaagaaaagagaatgtattaagagtgagaatttttggtttatgtttataattttagtattttgggaggttgaggttaaaggattacgtgagtttaggagtttgagattagtttgggtaatagagtaagattttattattaaaaaaaattgaaaaattagttgggtgtagtggtatgtatttgtagttttagttatttaggagattgaggtgggaggattgtttgagttcggaagttgaggttgtagtgagttgagattgtgttattgtattttaatttgggagataaagaaaggtttagttttaagaaaaaaaaaatggttaggcgtgatagtttatatttgtaattttagtattttgggaggttaagatgggaggatcgtttgagtcgaggagttaaagattagtttaggtaatatagtttttataaaagaaaaaaaaagagtgagaattttgagttaggtgtggtggtttgtgtttgtagtttttagttgtttaggaggttgaggcgggaggattatttgagtttaagagtttgaggttagtttgggtaatagagtgatattttgttaattaggtaattaattaattaattaattaataagagtaagattttttttagagttaatgtattgtgtgttgattgagtatttgttaaatattaagtatttgttaagtatttattatagtttaatattattaggtataatgttatgagatagttataattgtagggtagagattagaggtagggagattaaattagagaagattgttagagattaggtatggggtaggagatagaggaattgtttatttttttgggtttaagtagtttgtttattacggttttttaaagttttcgaattaaaggtgtgagttattgtgtttagtttaaaattttttatttagttataaatatttaaaatttttgtaggttaaatttattataaataaaggtgaaaggtaaaaagattaggaaaaaaatgttaatttataatagttttaaagtgtttatagtaagttgaattagattaatatatatatatatatataaatatatatatatatatatatatatatatatatatatatatatatatatatatatatgagatttttaaataaaataatttattttgttaggatggttgtttttataaaatttattttgaaaaattgtagtataaaagatattgttgattaggtgcggtgatttatgtttataattttagtattttgggtggtagaggtaggcgattatttgaatcgggagttcgagattagtttgattaatatggagaaatttcgtttttattgaaaatataaaattagttaggcgtggtggtgtatgtttgtaattttagcgatttaggaggttaaggtaggagaatcgtttgaatttgggaggacgaggttgtagtgagttaagattgcgtattgtattttagtttgagtaataagagtgaaatttcgttttaaaaaataaataaataaacgaaaaagttattgttagtaaaaggtaattgagaaattagagagagttaaattataaattataattcgttatttgtatgagtgttaaagtttaaatattattgagtaggttggtgtttattttgtcgttttattatataagttagagttatagttattttttttagttatttttagttttaaaattagtttttttataaggttttatatatttttttgtatttaatttattattaagtattttgataagttatgaagtaaaaattaagttatgaaagaaattaataattaaaaggaaattagagtatgtgtataggaattatttttggaaggaaaaaaaaaaaaaaagtttaaagataaatttatgattaggagaaagttgttaaaaattaggtatatttattttatttatatttattttttaaaagattagttaatttatgttttaatagaagtttattaatgataagttaaattatgtataattttatagttatttttgattcgagttgttaaattagtaaaatataatatttggagtttggtttatttttttttaaatttggtattatttagtaaatttagtatgtttaggaatttgtaattgttaaataaaatttagtatttcggtttgttaaagatttattgattattttttttttttacggtttagtttagaatatagatttttaatttaagatttagggatagtttgtagagagtttaaaattttttgaaataaaatgtagaattatatgtagacgtatatttttttaagaagaaggtttataatttttattagattttattttaaaggggtgggtattaataattaaaataaaagtgatgtaagaattatttaattggaggtagttgttagtaaaaatgtttaattgtattatatgtaatttttttaaaatattattgttaagtttaaaatatttatgtatgattttttttttggattttttatgttttatttagtatgaataaattgtttgattaattaaaaaattagaatattaatttttgtttattaaattagtagtaaaatatttaggtaatatttagtggtgttttaaatcgtaataattttttagggttaggtaaggtggtttacgtttataattttagcgttttgggaggttaaggtagattatttgagtttaggagttaaagattaatttgggtaatatagggagattttatttttataaaaaatatgaatattagttaggtgtggcgatgcgtatttgtagtatttggtatttaggagattaagattaaggtggaaagattttttgagttttgagttttgggttgtagtgagttacgatttgtgttattagtattttagtttgggttataaagcgagattgtgtcgttaaaaaaaaaaaaaaaaaaaaaaaaaaaaaaaaaggaatattagagattatttaaatttaatatttttattttatataaaagttatttgtatagttaatttttaatagaaatgggatgaaaaatttatttatttgttaagtttaggtagttttattaaagaataattggggataaaataatattatttaaaatattattaatatttatttttaaggtttttgtttttttttatttatagatggagttttagttatgttgtttaggttggtttcgaatatttgggtttaagggatttttttgttttagttttaggaagaggtgggattataggtatatatttttgagttagttatttttaaggtttttaagatgaagtttggatatttaatttaattgggaaaggttagaaattggatgagttatgatgtattaaaattttgtaaacgtatttttattaaagaattttttgtgtttaagttattgtgtttggtattgtatgagaaattttagagtagaattaagatggatttaaaaatagttaatattaataatagttttttttaaaaaggttttaaaatcgggagaattaagcggaaaatttcgagtttggagatcgggattttaaattttgtttgtggttttgaagagtaattttgggtgattttgttaatttttttgagttttagtttttttatttgtaaaaggaggttgaagtgttattgaggatgaaatgggttaatgttattgtgttaaatttagtataaaatggttatttagtttttttttgtttttaaaattagttagtttttgaaatattagaattaatagtgttatgatttatttttaaaattgtttaaaaagatatatatatattattttttagttgataaaaaattagaaaatatagataagaaaattattagtaattttatatttgtatgataattattaatatttggttattttttttatgtataattagtatttatattagtttttttttatttttttttatagaatttattatttaagttttttttagagatttttagggattgtgtagatttgtaacgggttttaatattgtaggttatttgtttttatgtttataagtttatattttaagtttttttaaaaaatagtaaaatttattttgtatttttagaatttagtttaggttgggtattttgtgggtttttattagataaagaggttagttttatttaggatttttgagggagttaaggtagtaagtgattaagattatgggattatttatttttgattaggttgagtttaattttaagagggggtgtttattttttgattttatttagaataatttatttttttattaagagtttattttattagatttaatggtttttaaaggttaaaataatgtgttttaggtagttattatgtatttatttgacgtttatatttaggttttggaaatgagaataaattgtttttggtaagttagaattttaatattgaaggttttatttacgtaattaatagggttttttaggttattattattttttttatttagtttatttatttatattagaatatatttatagtagaatttttataaaaggttgtattttgaagttaatttagtttatatttttaaaaattatttttttattttaaaagaatagtcggcgtaaagttgtttaaaagttatttaaaatatttaatttgaggagtaaatttgtttttgttattttgataaatatttattttttttgaggtaattatttataaatataggtttttaaaaaaaaaaaaaaaaagttttattaatagaagtttttttgacgtaattagtattttggttaaaatttaagttaagtgtattattggtaaataattagttttattattgagaaaggatcggggttaattatagtatattttttatatatatttaaattcgtgtatttattattatttgtaaatgtttgagatttgaaaggtttttaagaatttattaaagggtataaaatatgtatataaataattgtaataaaggtacgttatggggataatatatattaagatagttgttttgagggaaaaatgttttttaaaaatgtttattatt

SEQ ID NO: 1963 - DNA, 6132 bp, Artificial Sequence
  chemically treated genomic DNA (Homo sapiens)
gtcgggcgtggtggtgtatgtttgtagttttattatttaggaggttgaggtagtagaataatttgatttcgggaggcggaggttgtagtaagttaagattttgttatagtattttaggttgagtgatagagcgagattttgttttaaaaaataaataataatttaaaaaaagatatagaatagttttattattataaggatttttcgtattgtttttttatagtaattttatagtaattttttttttttataatttttttttttatttttagtttttggtaatatagatatattttttatttttaaaattttgttatttgatatatttttttgtaaatatataattatatatatatatttttttattatttatatttttttaaagtgtttttatatttttatagtaattttgtaaggtagttagggaaggtttttttattttaggttagaaaatagatttagaaatattaaatgatttaatgaaggttatatgtttagtagtagaattagaattgggatttaagtttgatgtttagttttagattttttttatttgttcggtttgtttttttataagggaagatttgggttttagaatttagagattttagaaggagtaaattggagaaggtgaggatatgatggtttttattatcggaagtaaaaagtgaatgtttagaggtgaagggatagagaagtaataggatttattagtattttaggtaatttgttttttttattaggagggtttttgtttttttataatttgggaaaaaataagttgtgttttaggttgtaagtttgttttatttaggtttaaaggaattaaagaatggatattagaaattttattttaattgttttgttttataggtatagaataggttttagttttagtatttttattaatgtagtgtttttattaatatttttattaatttgtttgtagtaatgagatggaattatgttttttataaggtttggggtaagatatttgtataggtgtttttttttgtttggatagtagaaatattgttttttttgttatggtgtttaatttagttggtaggtgggttagttttaaagtgtagaaggaattgggtgtggtggtttatttttgtaattttagtattttgggaggtaggcggatcgtttgaatttaggagtttgagattattttgggtaatatagtgaaattttgtttttttaaaaatataaaaaattagttgggtatggtggttgttgtttgtaattttaatattttgggaggttgaggttagtggattttttgagttaaggaggttaagattagtttggttaatatggcgaatttcgtttttataaaaaaatacgaaaattagttgggcgtagtagtttttgtttgtagttttagttatttggaaggttgaggtggggaggatcgtttgagttcgggaggtagaggttgtagtgagcgaagatgatgttattgtattttagtttgggtgatagagtaagattttgttttataaaaaaaaaaaaaaaaaaaaatgtagaaggtttagggtttggttaaggggatgatgttttgtagtattttgttttgtaggaagggaataattgtgttgtgaatattaggatttaggagggagggagggtatatttgtgttttttagttagggataaggtttttttaattttaggtttttatgtttatattagtttttttttaataaagtttgattttgagaagaagttggtatatggttgaaatgtatttacgcggttggggggaagagtgtttttttagtttttttttttataggggtttttgttttttttaagtttttgttattaaaagagatgagaatgaattttttttttagttttaatatttaatgtgagttgtaaaggttttttttttttatttgaataggaagtaggagtagtaggttaggttgtaggttgaggaagttagaagttaatttgagttgagtttgtagttttggagagattgaggagtagattttttttttgttattttggaaggagaggattgtgaggttgtttttttaaatagtattttcgtaggaggtagattatatttattcgttatttattgttaaagtattatttttggtttttattaaatttaaagtttgttggaaaggattgtggggttaggggagtgacgtagagttttttaggggtagggggtagtttagaagttgaaaaggagaggaatgagaaggagtttgggaaaggtgggggatgaggataagaggaaaagatagggagagaatagttgttttttgagttttagagtggaataagtatatttaatttttatttgtttagagacgtagaaaggtagatatgggattgtatgtatataagagtaagaggttgagacgaaatattaggagtgttgattaaagtaagtgaaaggagttatagagtgaagaagtttgatagatttggttttggttgtattatttatattgtgtgagattttataattttagtaggatattggagattcgatgtatagtaatttttattggaattattagattgtgttgtttatgaagtttttttatttattaaatgaagggaattagagtggatgaattttaatgtttttattacgaataattttgtgtgtgtgtgcgtgtgtgtgtgtgtgtgtgtgtgtgtgtgtgaattagttttaaaatgaattaggagtagggggttttgggagagtaggatgtgatattgtgttaataagaaatgttgagagagttttttggatgtatgttttgttttttttttatttattttagtttaaagatttgtttaaatttggaaattttttagttttaattttaatttattaattagagttttttagtattattttaatttgtaatttttttgtagtttttagtttattttatttttagttgataaggaggagattgtttttaaatttttagaaatggattgtgtaggagtgtgattagggttttagatgtagttattttttggttgggtttggggaaaagttaagggatgtgtgttaaaggtagatggatagagggtgggaagttttttattatttttatttttttttttatttttgattttgttatttttttttgtttttgtattttttgggagttggttttgttgatatttttgttgaatttaaatgttgatttaatttggtaatttttttatgttaggagttttagttgtgatagtttattcgttttttcgtttttttattttattttttttttttttttttgattgggagaggaggagtttttatttagtatttagaatagagtaaatatttttttttgattatttttttttttaatttttagaattttttgaaattaaaatttatattttgggattttggattagtggtttgttttggatttagtagttagtgaatatatttttattttttgttgatataggagtttttttaatgttaaagtaggtggttattaagggagagaataatatggagtaagagaggtggtttttgtaagagttttaggtaggattcggttggatggaggaggttttgtttttttataaggttttgagtttaaattttagtttattttttttataaatgtttattaattagttaggttgttttgtgttgggtttttagtttttagatttttttttttgaagatagaatagaaaaaatgagttggaagtgttttaggaggggttttgatattaggaatgtttttttggttgtgtagagttattatttagttaaagaagaagatgttaagttgggtgcggtggtttatatttgtaattttattattttgggaggtcgacgtgggcggattacgaggttaggagttggagattagtttggttaatatagtgaaattttatttttattaaaaaatataaaaattagtcggcgtggtggttcgcgtttgtagttttagttattttaggaggttgaggtaggagaatcgttggaattggggaggtagaggttgtagtgagtcgagatcgcgttattgtattgtagtttgggcgatatagatttttttttaaaaaaaaaaaaaaaaaaaaaaaaaaaaaaaaagatgtttgttttggagagttttgaatttggaagaaatttttatttgttaggcgggtaggtagaagtattatggagaaggttatagttttggagataggtggggaagattaagttgagggattcgaggttaagtgtgggatgttattatagtttagggtatattttgaatttttttaagataggagtataggtggggtttggttcgattgggtttcgagtttagatttagtagggaaagatgtgtgtttattttttatttcgtatttagatatgggatacgtaggtagttaggtatacgtggatatatggaattataattatatatatagaaatttaaaatatacggagagaatttatataattatttatatcgaagtttagttcgtcgttttcgttgtattttgtaaatacgtatttatattcgttagtatagggtatacgtagttattcgttttcggcgtttgtgtgcgtgcgttcgtttttgggcgtttttgtttgtgtgtgttttcggtttttaatcgtttttttgggagggggaggagtggttgtgaggagtgagagattggcgggtaggttgaggagaagggagggagagtagagggaggggggaattcggtcgggggaggaggagagaggcgaggaggcggttttggtagcgcgcggcggcggcggcggtagcggtagtagtagcggcggtgcggagagtttggattgggagtttaaagttcggttgggtagcgggagaggaggagtcgtaggagttgtagttttgttagtttgggtcgagtttagagatatcggtttggttggtttacgttagtcgtaggtgggaagggtttgggatggggggtgagggtttttcggttggggttgaagttgagtcgaggtgttgttttttttttttgtttcgtagatcgtggttgagtatggagttgttttttcgtagtttttcggagatgttggaggagtcggattgttcgttatttttggagttgaagttagtttttagtaagaagatgtggattaagtttcggtttttgtaagttttcggttcgggaatggggggaagggattttagggagtttgagcgggaggaggaggggggataattggagtagggttgtgggttggtagattttttttggtatagatgttggtaggtgcgaggaagtacggttttgatacgcgtggttaggttatatgtgtaaggtatgtgcggagtaagttggttagttggagcgggtttaggagttgtaaaggtaacgatgtgtttgtgtttgtggattttaggttgatatacgtagcgtttagaggtagtatagtatatgtagtgtggtagggttgtaggagggtagtagaggtgttaggttgatttatatatatttatgtgtagagttgtgtagatgtgagttatatgatatgtgtgtgtatgagtgagcgtgggttatagaggtatgtggagtgattgtatatagttgtagatttattgtatgggaatatttgtgttaatttgtgggttatatgtattttagttgggattggtagtttttgttttatgtataggaagtggggtgggggttattttatgtttgagttgtttattttttggggtttggaaatttattttatgtattaatgatgaggggatttacgtggaatttggagggggggttggagtttttatttggaagttgaaggaggtgatgatggtgaagaaatattgattgataaaggtaaggtaattggtttaattagaggttttttgtttatatagggttttttaggatttttaagtatatttgggtatttttttttattgttgtagtattagggtatgtggggaggaataaatgggggaaggaagaatttaggtatttgatattttagttttaggggaggaaaggaattttttttttgttttttagaaaaaaaagaggattgggttaaagataagttatgtattatgtttattttttagttagttgttgttattgggaaattttcgtagtttgttgatttttaattagggaataagagaa

SEQ ID NO: 1964 - DNA, 6132 bp, Artificial Sequence
  chemically treated genomic DNA (Homo sapiens)
tttttttgttttttgattaagaattaatagattgcggagattttttaatggtagtagttgattgggagataaatatggtgtatggtttgtttttgatttaatttttttttttttttaaggagtaggggaaaagtttttttttttttttgggattggagtattagatatttgagttttttttttttttatttatttttttttatatgttttggtattgtaataataggaaaagatgtttaaatgtgtttggagattttggaagattttatataaataaaaagtttttgattaagttagttattttgtttttgttaattaatatttttttattattattattttttttagtttttaggtgggggttttaattttttttttagattttacgtgggtttttttattattaatatatagagtgagtttttaggttttaagagatgagtagtttaggtatggggtaatttttattttattttttgtgtatgaggtagaaattattaattttaattgagatatatatgatttataggttggtataagtatttttatgtagtagatttatagttgtgtgtaattattttatatatttttgtgatttacgtttatttatgtatatatatgttatgtggtttatatttgtataattttgtatatggatatgtgtgagttagtttggtatttttattgtttttttgtagttttgttatattgtatatattgtgttgtttttaggcgttgcgtgtgttagtttggggtttataggtataggtatatcgttatttttgtaatttttaagttcgttttaattggttagtttgtttcgtatatgttttgtatatgtggtttggttacgcgtgttagggtcgtgttttttcgtatttgttaatatttgtgttaaagagaatttattagtttatagttttgttttagttattttttttttttttttcgtttaggttttttaaggttttttttttttattttcgggtcggggatttatagagatcgaagtttaatttatatttttttgttgggggttgattttagttttaggggtgacgggtaattcgatttttttagtattttcggaggattgcggggggatagttttatgtttagttacggtttacggaatagaaggaggagatagtatttcggtttagttttagttttagtcgagagatttttattttttattttaggttttttttatttgcggttggcgtggattagttaggtcggtgtttttaggttcggtttaagttggtagagttgtagtttttgcggttttttttttttcgttgtttagtcgagttttgggtttttagtttaagtttttcgtatcgtcgttgttgttgtcgttatcgtcgtcgtcgtcgcgcgttgttagagtcgttttttcgtttttttttttttttttcggtcgggtttttttttttttttgtttttttttttttttttttagtttgttcgttagttttttattttttatagttattttttttttttttaaaggaacgattggaagtcgggggtatatatagatagaagcgtttaagggcgagcgtacgtatataggcgtcggggacgagtggttgcgtgtgttttgtattggcggatgtgagtgcgtgtttatagagtgtagcggaggcggcgggttggatttcggtgtgggtggttgtgtgggtttttttcgtgtgttttgagtttttgtgtatgtggttgtggttttatgtatttacgtgtgtttagttgtttgcgtgttttatgtttgagtgcggggtaggggatgagtatatatttttttttgttagatttggattcggaatttagtcggattagattttatttgtgtttttgttttggaaaagtttagggtgtgttttgagttgtgatggtattttatatttggtttcgggttttttagtttgattttttttatttgtttttaagattgtggttttttttatggtatttttgtttgttcgtttagtagataggaattttttttaagtttaaagttttttagagtaggtatttttttttttttttttttttttttttttttttttgagaaggagtttgtgtcgtttaggttgtagtgtagtggcgcgatttcggtttattgtaatttttgtttttttagttttagcgatttttttgttttagttttttggagtagttgggattataggcgcgggttattacgtcggttaatttttgtattttttagtagagatggggttttattatattggttaggttggtttttaatttttgatttcgtgattcgtttacgtcggttttttaaagtggtgggattataggtgtgagttatcgtatttagtttaatatttttttttttgattaggtaataattttatatagttaggaaagtatttttgatattaaaattttttttgaagtatttttagtttattttttttgttttgtttttagagaaagaaatttaggagttaaaggtttagtataaaatagtttagttggttaataaatatttgtggaaggagtgaattggaatttgaatttaagattttgtaaaagggtaaagttttttttatttaatcgagttttatttaggatttttgtaggaattattttttttgttttatattgtttttttttttaatgattatttgttttggtattggggaaatttttatgttaatagaaagtggagatatatttattaattattgaatttaaaataggttattaatttaggattttagaatgtgaattttaattttaaaaaattttggaggttggaaggaggagtgattaggagaaggtatttattttgttttaaatattgagtggaggtttttttttttttagttagagaaggagaaaagaagtgaaatggaagggcgaagaagcggatgaattgttatagttaagatttttaatataaaagaattgttaagttaggttagtatttagatttagtagaagtattagtagaattagtttttagaaagtatagaggtagaaagagatggtagagttagagatggagaaaaaagtggaaataataagggattttttattttttgtttatttatttttagtatatattttttggtttttttttagatttagttaagaaatggttgtatttgagattttagttatatttttatatagtttatttttgaaaatttgggagtaattttttttttattaattgaaaatgaaatgggttggaaattataaaagaattgtaaattaggatggtgttaaagagttttaattagtaaattaggattagagttaaggagtttttaaatttaggtaggtttttaaattagaataggtgggaaagaggtaagatatatatttagagggtttttttaatattttttgttaatatagtgttatattttgtttttttaagattttttgtttttgatttattttaaggttaatttatatatatatatatatatatatatatatacgtatatatatataaagttattcgtgatagagatattagagtttatttattttaattttttttatttaataaatgggaaaattttatagataatatagtttgatggttttagtaaaagttattatatatcgagtttttagtattttattgagattatagggttttatatagtataagtgatataattagagttaagtttattagatttttttattttgtggttttttttatttgttttagttagtatttttggtgtttcgttttaattttttatttttgtgtgtatataattttatgtttatttttttgcgtttttaaatagataagaattgggtatatttgttttattttgaggtttaaaagataattattttttttttgttttttttttttgtttttattttttattttttttaggtttttttttattttttttttttttagtttttaaattgttttttatttttaggaggttttgcgttatttttttaattttataattttttttaataagttttgagtttgatagaaattaaaaatgatgttttggtagtaggtgacggatggatgtgatttgttttttacgggaatgttatttaaaggggtagttttataattttttttttttaaagtgataagagaaaagtttgttttttaatttttttagagttgtaaatttagtttaagttaatttttgatttttttaatttgtaatttggtttgttgtttttgttttttatttaagtgggagggagaggtttttgtaatttatattaggtgttggggttaaaaggggaatttatttttattttttttgatgatagggatttaggagaagtagaggtttttgtggggagaaggattggaagaatatttttttttttaatcgcgtgagtgtattttagttatgtgttagtttttttttaaagttaaattttgttggagaagaattaatataagtatgaggatttaaggttaaggaagttttgtttttagttgggggatatagatatatttttttttttttttggattttggtatttatagtatagttgttttttttttgtaaagtaaagtgttatagggtattatttttttggttaggttttggattttttgtatttttttttttttttttttttgtgagataggattttgttttgttatttagattggagtgtaatggtattattttcgtttattgtaatttttgtttttcggatttaagcgattttttttattttagttttttaagtagttaggattataggtaggaattattacgtttagttaattttcgtatttttttgtagagacggagttcgttatgttgattaggttggttttaatttttttagtttaagagatttattggttttagttttttaaagtgttgggattatagataatagttattatgtttagttaattttttgtatttttggagagatagggttttattgtgttgtttagagtggttttaaatttttgagtttaagcgattcgtttgttttttaaagtgttgggattataggggtgagttattatatttagttttttttgtattttgaagttggtttatttgttaattggattgaatattatggtaggggaggtagtgtttttattgtttaaataaaagggggtatttatgtaagtattttgttttaggttttgtgggaggtataattttattttattgttgtaagtaagttaatggagatgttaataaaaatattatattaatgaaaatgttgaggttagaatttattttgtgtttgtaagataaaataattggggtgagatttttgatatttattttttagtttttttgggtttaagtaaagtaaatttataatttgggatataatttatttttttttaggttgtaagaggatagagatttttttggtaaaggaagtaaattgtttgaaatgttgatgggttttgttatttttttgtttttttatttttggatatttattttttgttttcggtagtaaaggttattatgtttttattttttttaatttgttttttttaaggtttttggattttaaaatttaagtttttttttgtgaagaggtagatcgggtaagtagaaaaggtttaggattgaatattagatttgggttttagttttagttttattgttaaatatgtgatttttattaagttatttaatatttttaaatttgttttttgatttgaaataggaaagttttttttggttattttgtagaattgttataaggatgtgaaagtattttgaaaaagtataagtggtagagaaatatgtgtgtataattatatgtttataaaaagatatattaaatgataaaattttagaaatagagaatatatttgtgttattaggagttagagatggggaagggggttgtgggaggagaaaattgttataaaattgttataaaagagtaatgcgagggatttttgtggtgatggaattgttttgtatttttttttaaattattatttattttttgagatagagtttcgttttgttatttagtttggaatgttgtggtaggattttagtttattgtaattttcgtttttcgggattaagttattttgttgttttagttttttgagtagtgggattataggtatgtattattacgttcggt

SEQ ID NO: 1965 - DNA, 6029 bp, Artificial Sequence
  chemically treated genomic DNA (Homo sapiens)
ttttttaaagtgttgggattataggcgtgagatacggagtttagttttatttttttatttattttaagtttttatttttatataataaattattttttaaattgtaggtttaaaatagtagtttattatttttttttttacgattttgtgaattgtttgaatttagtggatagttttttattgtggtattttatgtagttgttattagataagggatgggattatagttatttgaaggtttaaatgggatgaatatttataatgatttaatttaatggttgatatagggaggattttttttttttttattgattggaatagttttagaaggaatggtattagtttttttttgtaattttggtagaattcggttgtgatttcgtttggttttggattttttttggttggtaggttattaattattgttttaattttagagtttgttagtggtatatttagggatttaaattttttttggtttagttttgggagggtgtatgtgtcgaggaatgtatttattttttttagattttttagtttatttgtatagaggtgtttatagttttttttgatggtagtttgtatttttgtggaattagtggtgatattttttttattattttttggggggtttatttgatttttttttttttttttttttattagttttgttattggtttattaattttgttgatttttttaaaaaaattaatttttggatttatggattttttgaagggtgttttgtgtttttattttttttaattttgttttgattttagttgttttttgttgtttgttagtttttgaatgtgttggagagtagttttttataaaagtttgtggatttaattgtaaaagtggtaatttattttgatttttttttttattgtagagagttttttttttttatttattaaatttttgttttaattttatttttttgtgtttatattttttaatttttttggttatgagattatgagtttagataatattttagtaataatattaatgattcggatttgttttggtaatattagttttggggttaggatataggggtatttttaggtagaagattgaaatttgtgtaagtggtatataaatttatttttttatatataaattttaggttagttttttttttggatttttaaaattttatatttattgtgatgagaattaatatttttggtttattttaaaggataggtttaagttttgttaatgttaatatggtttagtagaaaaatgtatgtggtttgtattaagaaagtatataaaggatttatattgattgggtttttataattataaaaaacgaataaatttgtatgagtatttttatatgaaggtaaggaggaaaataggtgaatggaagtttacgtaaatgtgtttatgatttaaaataaatttatttttttaggaaaaatatattttttattttatttgttaaagttttaggaaagtttaattttgataattttttaataatagaatttatgttttttttttgaattttatttttttttatattgtaataatgaaatgaataaatgaatagtaagtgagtagtggtgtatattaaattttgagtattgattgttttttattttatttaatatttttataagaatattgttatgtatttaagttatgttatttataaaattaaggtaatgataataattatatgtttttaatataatggttttgatgattaagtggaatatagtaaatgtttaaaaatgttttttattataattaatttggttaggataggtggaaagaatagaaatatgataattaattgtgaaatgtataatatatattaataggttattaatattaaattaaaaaatatagatgattattatgatagtgaaattaaagtttttagataagttaaagtaaagttgaagttttagagattattgtgtttatttgttaattgtattattagattgtttagttgatatagtgaatataataatttttttaatgtatataaattgttagataagtaatttaatgtaatttatttattttcggagaagtttattttttttgttaatgtttattttttttggtaaattattttttagtattttaggtaaattagagtaaggtgaagttgaagaagattttattttatattttatttagagagttttcgggtttttaaaaaagatttagttatgtgggtgtgaaagagttgagttatgaaatttggattttattgtaagtttagaaggaaaaataaggggtttgaagtataagggtgatatgatttaatttttatttttaaatgattattttgattgtcgtgagggaattgatatgggatgtattgggggaagaatgttattaggattaggtcgaggttgttaaagatttttaggagagagtattgtgggtcgaataataagtttttagtaaagattatgtaagtggatatatttgagatgtattttgaaggtggaagaaattagataagttaatgggtagtgtttggagggagtgaggatttttgaattattaggtaaatatttgtgagtaatagagaaaaagttgggatgtgttatgaaagatgaattttaaaattttatatgttgaagattgatgttttaggattttagaatgtgaatatttatagtagaagggaattgtgttgttgacggttgttatttattttaggtgtttaagtttttgtagtagttttattttttttttttatttatatttatttttagatagtgttttttttagtttttttattatttttttttttgatttggttggtgagagtatagttggtatttatatttttttgatatgttagttttttttgttgattgttgatattggagaaggttatggaagggatttgagttgagcgatttttaggagtattttttgttttttttttgtattttgttgttaaggagaaatttgttttttattaggtttgtagtttttttcgttatttatattattaggtaatatttgtttggtatttttttttgttttttttttttggtttttttttttgatatgatggttgatttgaaattattaaggtaggattgtttatttttaggtttaatggaaaatagtatttggtgaaattaaagaaaataattttagtaatttattgggagttgtttggtttaagtatttattttgtgtttaagatataatttattaagtttagttaaaattgatttagtttttatagggttagagaagaattgttaattaagaatgtatttttattttaaatatgtttatatttattttagggaaaatattagtttgtttgggttttttatgagaatattgttgtttgtagaaaaatttaatttattaggaagtttttttgttttgttatttgtaattttttagaagggttagattagattttcgtatgtatagtataggatttatttatgtatatttgtttagggttttgtttttatgattttttgttatatggttttttagttatgtttttaattaagttatttttaaataaatattagtcgtgtataaaaagtgaaaaattatataaggtttatataaggtttgaaatggaaagtgtagttggtgatatcgagtagtatattttatgaattgaggaatagggaatttttaggtattatagagtaattagtagttgagaagaggagtattaatttaggattttggaaggattttttagaaatttaatagtttattgtttaattgtagagataaaaatgaaaataaagatagtgaggagtattatatattattgtttagaagattaaataaatgttattttttataagttatgtggggagaaaaaaattatataggaagaaaattataaacgataaggtagttttagtatataaaatattaataaatgaatgtaagaaagagaatgagaaagaattagtattagaatattatagaaaaaattatttttgtgaaagaaaattttgatgaaattggtgatataaatattgagtaaaaaatagaagattaattaaggtatttgaggtttgaataggtattataaattattaagttgaatatataagtatggttatttagttattagtggtgaagattacggtatttgttagaagaaataaagtagatgatgaattttatagaatattttggagaaagtggaggttttagttatatgatatcgtgtggtttattttgggaattatgttttagtttgtttaggtttagaaattttttggtggtttttgtgtttagttttgttttaataatttttaaagatattttttaaaatataaattttttagtttttttgtattgtatagtattaacgtttgtttgagtgtagtgagatttatagagtttggaaattttttgtagtatgaggaggttgcggggtagttttttgttatttatgtgtatttagtagtgtgttgtttttatataatttacggataagtagaaagtatttttattatatgaaaaatttagttaaatatataaatatttatgtatatatattatgagagatggaaataggttattaaaagagttagatatattgatcgtttttattgttagttgtaggattgttgtttaattttttgatatatttatataaatttatatatatataaatgaaaagtatagtggaaagtagaatagtagtttttttaaatagattgaaaaataaatgatgtttaaagtttaattttgatattgtgttgattgtttggatatagtttcgttaaaatatttgtttaagttatagttgtattttttagaaattagttataaataatattttttttaattttttttgttaggttagagttttagaagaaatgagggatatatttgatttgaagtaagtaaagtagaatttagtttttgaggcgaggaggtttatttggtagggagtttaaatgcgttattgttttgtttgtttttataaagggagttgatacgttttttttagtataaagttgggagtgatattagagttttttgtaagatgtttttgattttgttgttagtggttttgttggtttttagtttagtttaggatttagatgaaggtaagtcgaattgggggaagatattgtgattttgattggggtttacgggcgaatgttatagagggggaaagtggagggaagagaggaggatgagaaaatagataggattgaagagtttttatgttaaggattagaagatttgttgtgtttttattttttattaagattttataatttattgattgtataaatagaatttaataaagaatttgtatcgggggagtgagagagtgagatttgtatttatagagatatgggattgttgggaaggatatggagaatgtaagatagatttagggaagtgtagttgtgaagattttatattgattttagtagatagggatgatggtggttttgttggatagtggatgagtatttatgaaggagataaatatatgttagagttattgttgaggtagagaattgggtaaatatttgtttttgtttatatagagttagagaattattagagtgaaatattgttattttttttttttttgtatgtagtattttaatgtgttgggacgggtatttgtaagattgtatttaagtggttatgtttggtggtttttgttgagaaagtttgtaaatataaataatatatttatagatgaaagagggtagaaggatttttaaatattttattgaaatatttaagagttttttaattaaataagtattaaggtttaaggaattatgagaggataaataggggtttttttatgttgagtttttggttgacgtttagtgtagtaataattttgtttttttttatatttttttttattttcggtagtattagagagtggttgatgagattttaaaggggatgtatagggtgtgattagaggttttttattttcgtagaatattatgagttttgaatgatttatgtagtaattttttttattattttgtattttttttttaga

SEQ ID NO: 1966 - DNA, 6029 bp, Artificial Sequence
  chemically treated genomic DNA (Homo sapiens)
tttagaaaagaagtataggatgatgggaaaagttattgtatgaattatttagagtttatagtgttttacgaggataaaggatttttgattatattttgtgtattttttttgagattttattagttattttttgatgttatcggaagtggaagaagatgtaagggaaagtaggattgttattatattgagcgttaattaggaatttaatatagaagggtttttgtttgtttttttatgattttttaagttttagtgtttatttagttaaagggtttttgagtattttaatgaaatatttggggatttttttgtttttttttatttgtaaatatgttgtttatgtttgtaagtttttttaataggagttattagatatagttatttagatataattttataaatgttcgttttagtatattaaaatattatatgtaggagagaaaaaaatgataatattttattttggtgattttttaattttatgtagatagaggtaagtgtttatttaattttttgttttagtaatagttttgatatgtgtttattttttttatggatatttatttattgtttagtaaggttattattatttttgtttattgggattagtataggatttttatagttgtatttttttgaatttgttttgtattttttatattttttttagtagttttatgtttttataaatgtaaattttatttttttattttttcggtataaattttttattgggttttatttgtgtaattaataaattatgaggttttgatgaggaatgaaggtataataggttttttgatttttggtatgagaattttttagttttatttgtttttttattttttttttttttttttattttttttttttatagtattcgttcgtaaattttaattagagttataatatttttttttaattcggtttatttttatttaagttttgagttgagttgaaggttagtagggttattgatagtagaattagaagtattttgtagaaggttttggtgttatttttaattttatgttgggagaaacgtgttagttttttttataaagataagtaggataatggcgtatttgagttttttattaggtgggttttttcgttttagagattgggttttgttttgtttattttaggttaagtgtattttttattttttttgggattttagtttagtaggaagggttggggaggatgttgtttgtggttaatttttaaaaggtataattatgatttggataaatgttttgacggaattgtgtttaagtaattagtatagtgttaggattgaattttagatattatttgttttttaatttgtttggaaagattgttattttgttttttattgtgttttttatttgtgtgtatgtgagtttgtgtgggtgtgttagggggttgggtagtaattttatagttaatagtgaagacggttaatatgtttgatttttttgatagtttatttttattttttatgatgtgtgtgtatggatatttgtatatttagttaaattttttatgtaatagagatgttttttgtttattcgtgagttgtgtgaggatagtatattgttgggtatatatagatgatagaaggttgtttcgtagtttttttatgttataggaaatttttaaattttgtgaattttattatatttaggtaagcgttggtgttgtataatataggaaagttaaaaaatttgtattttaaaaaatatttttagggattattaaagtaaaattgaatatagaaattattaaggaatttttagatttaaataaattgaaatatggtttttaaagtgagttatacgatgttatgtagttaagatttttattttttttagaatattttatagaatttattatttattttattttttttaataaatatcgtagtttttattattaataattaagtggttatatttatatatttaatttgatgatttgtaatgtttgtttaagttttaaatgttttgattggttttttgttttttatttagtatttatgttattagttttattagagtttttttttataaagatgattttttttatgatattttaatattaatttttttttatttttttttttatatttatttgttgatattttatatgttgagattattttgtcgtttgtaattttttttttatatagtttttttttttttatatgatttgtgggagatgatatttatttaattttttaagtaatggtgtatggtattttttattatttttatttttatttttgtttttataattggataataaattattaagtttttgaaaaatttttttagggttttggattggtatttttttttttagttgttgattgttttgtgatatttagaaattttttgttttttaatttataaaatatattattcggtattattagttgtattttttattttagattttgtgtaggttttgtgtaattttttattttttgtgtacggttagtgtttatttgaggatagtttggttggaggtatggttgagaggttatgtgatagaaaattataaagataaggttttagatagatgtgtatgggtggattttgtattgtgtatacgagggtttggtttggtttttttgaagagttgtagataataaaataagaaggttttttaatagattagatttttttatagataataatgtttttataagggatttaggtagattgatattttttttgaaataaatatagatatatttgaagtgggaatgtatttttaattggtaatttttttttggttttgtggaaattggattagttttagttgggtttgatgggttgtattttaggtatagggtaggtgtttaagttaagtagtttttagtgggttattgggattattttttttggttttattagatattgttttttattagatttggagatgagtagttttgttttggtgattttaggttaattattatgttaaaaaggaaggttagagaaagggaataaagaggggtgttagatagatattgtttgatgatgtgggtaacggagaaagttgtaagtttggtgaaagatagatttttttttggtagtagagtataggaaaagaataggaaatgtttttaaaggtcgtttagtttaggttttttttatgattttttttaatgttaataattagtaaaagagattagtatattaagaaagtataaatattagttatgtttttattagttaaattaaaagaaggggtgatggaagagttgaaagggatattgtttgggagtgagtgtgggtgaaagggagaagtaggattgttgtaggagtttgggtatttagagtgggtggtagtcgttaataatataatttttttttattatggatgtttatattttgaggttttgaagtattagtttttaatatatgaaattttaggatttattttttataatatattttaattttttttttgttatttataggtgtttatttagtggtttaaaaatttttattttttttaggtattatttattagtttatttaattttttttatttttaaaatatattttaaatgtgtttatttgtatgatttttattagaagtttgttgttcggtttataatgtttttttttggaggtttttaatagtttcgatttggttttggtaatattttttttttagtatattttatattagtttttttacgataattagagtgattatttaaaagtagaaattagattatattatttttgtgttttaaattttttgtttttttttttggatttataataaggtttaaattttatgatttagtttttttatatttatatgattaaattttttttgaagattcggaagttttttgaatggaatataaagtaggattttttttaattttattttgttttagtttgtttggaatattgaaggatggtttgttaggaaagatgaatattggtagaggggataaattttttcgagagtgagtgaattgtattgagttgtttgtttggtagtttatgtatattggaagaattattgtatttattgtattaattaagtagtttgataatatagttagtaaataaatataatggtttttgagattttaattttgttttgatttgtttaaaaattttggttttattattatggtaattatttatattttttaatttgatgttgatgatttattaatatatattatatattttataattaattattatatttttattttttttatttattttagttaaattggttataatagaaaatatttttaaatatttattatgttttatttaattattaaaattattatattagggatatatgattgttattattattttagttttatagatgatatgatttaggtatataataatgtttttataaaggtattaagtggaatagaaggtagttagtatttagagtttagtgtgtattattatttatttgttatttatttatttattttattattataatatgagaaggaatgaggtttagaaaagaaatataagttttgttattaggagattattaaggttaagtttttttaagattttaataggtgaggtgaaaaatatattttttttgaggaaataagtttgttttaaattataagtatatttacgtaggtttttatttatttgtttttttttttgtttttatataaagatatttatataaatttattcgttttttgtgattatgaaaatttagttaatgtagattttttatgtgtttttttaatataagttatatgtatttttttgttgagttatattagtattggtaaaatttgagtttgttttttgaaatgaattaaaaatgttgatttttattataatgaatgtaaaattttagaagtttaagagagagattggtttgagatttgtgtatgaagggataaatttgtatattatttgtatagattttagttttttgtttgagagtgtttttgtgttttggttttagagttggtgttattaaaataggttcgggttattgatattattattaaggtgttatttgagtttatggttttatgattaagaaaattaaggagtgtggatataaaagggtgaggttggagtaaaagtttaataagtgaaagaagaaagttttttgtagtggagaggggagttagagtggattgttatttttatagttgaatttataagtttttatgagaaattgttttttaatatatttaaaagttagtagatagtaagaaataattaagattagagtagaattgaaggagatagagatataaaatattttttaagaaatttatgaatttaggagttggtttttttgaaaagattaataaaattgatagattagtagtaagattaataaagaagaaaagagagaaaaattaaatagattttttaaaaaatgataaaggggatattattattgattttatagaaatataaattattattagagaaaattataaatatttttatgtaaataaattagaaaatttagaagaaatggatatatttttcgatatatatatttttttaagattaaattaggaagaatttgaatttttgagtatattattaataggttttgaaattgaggtaataattaatagtttattaattaaaaaaagtttaggattagacggaattatagtcgaattttattagagttataaggaggagttggtattattttttttgaaattattttaattagtagaaaaagagggaattttttttatgttagttattgagttggattattgtagatgtttattttatttgagtttttagatgattgtggttttattttttatttgatggtaattatatgaaatattataatgagagattatttattaagtttaggtaatttatagaatcgtgaggaaaaaagtaataaattgttgttttaagtttgtaatttggggaatgatttgttatataaaaatagaaatttagaatagatggagaaatgaggttgggtttcgtgttttacgtttgtaattttagtattttgggagg

SEQ ID NO: 1967 - DNA, 6483 bp, Artificial Sequence
  chemically treated genomic DNA (Homo sapiens)
ttttgtgattttgaataaggtagtgttttttggtaggatataaaagtacgaattataaaagaaaatgttgataattggattttattaaaattataaatatttgtttattaaaagatattgttaagtataaaagataagttatagattgagaggaaatttttgtaaaatatttagttgataaagggtttgttattaggatatatataaattttaaaaatttaatttaaaaaatttttaaaaataaagaaataaataaaaaatagtttaaagatttaaattggtattttattaaagaagatataaatagtaaattagtataggaaaagatgtttaaaattattagagaagagggaaatgaaaattaaagttataatgagatattattatatatttattaagaaggttaaaaattgaaaattaaaattaaaaaataatcgataatattaaatgttggtgaggatgtagagtaataggaatatttagatattgtttggtgggaatgtaaaatgttattattattttggaaaagtttgattttattttttttttttaaaagtaaatacgtatttattatatgatttagtaattttatttttagatattatttaagagaaatgaaaatatatgtttatataaggatttatatataaatgttttagtagtttaatttaatgatagttaagaattggtaaatggataatagattgtggtatatttatataatggagtttagttagtaataaaaagaaataaagtattgatatagaattttatatgaataaattttaaaagttttatgttgagtgaaagaaggtagttttaaaaagttatgtattggttgggtacggtggtttacgtttataattttagtattttgggaggttgaggtgggcggattatttgcggttaggaatttaagattagtttggttaatatggtgaaattaaaaaatataaaaattaggtaggtgtggtggcgtgtgtttgtaattttagttatttaggaggttgaggtaggagaattatttgaatttaggaggtggagattgtagcgagttgagattatattattgtattttagtttgggtaagagagtaagatattaatttaaaaaaatatatatatgtgttgtaggattttttttatatgttattttagaaaatgtagattatagagatagaaatttaattagtggttgttaagagttggggtggaatatagaatttttgagggtgatgaaaatgtgtatattatgatgtggtggtggatgtattataatatatatttgttaaaataagtagaattgtatatttttaaagtgtgagtttttttgtgtgtaaattatattataataatttgataataataaaagagagagacgttggattgtatttattttattttattttttattagggagttttcgggagtttttttagtgtttgttttttttgttttgtttggggtgggttgagtagtatagcgtttttgtagagagaatggagaatgggtaatgttatataggggagtggtatggggtgagaaggaattttagtttcgttagttttgattattagtttattttttattattgtttagtagagtgagtttaagttgggtttttggtatttattggtagagtagggttaaaacgtaaggggtggggagtgttgtataggttagggttgattgaatgattagttttaatttgtataacggatttgtgtagtttgagtttttatatagtagtagttgtttttgattttttttttttttagtcggtttttttttgatttttttaggtttgtgggaagttttgttaagttttaggttatgtttattttgtataaaatatttaaaaataaggttaggtatagtggttttcgtttgtaattttagtattttggtaggttgaggagggaggattatttgaggttaggagttttagagtaatatagtaagatttttttttttttaaaaatttttaaaaattagttgggcgtggtggtacgggtttgtgattttagttattgaggtggttgaaatagaagaatcgtttgagtttaggagatttaggtcgtagagagttgtgatttcgttattgtattttagtttgggtgatagagttagagagattttgttttaaaatttttttaattaaaaaattaataaaagatttaacgtgatttttataatagttatttgagacggacgttgattttattttataaatgtggatattgagatatagggaagttaaatttttttgttagaaaaaggttagcggaggtttaaggtcgtgggaacgtgattttagagttgagggttttggaatttcgtttgtttcggtagttgtggttggttttgttttatatatatttggttttagtttttttgtttgggtttttatttatgtagcgaattttttagttataggtgtttttttgttttttaatttatagcgagttcgttgtttaaagttttgtttcggttttttgggtggatttgatcgcgttcgggtgtacgtggggcgatttatatttgataagtaaagcgggtgaggtcgcgtttgtgaagggcgtttggttttttcgtaggacggtgcggcgcggcgttttcggttggaattaggtgtaattgtagagattttgggatcgtaggaacggttggcggtaggattgtttttatttcgagaaggtgacggggttttttgcgttgttagtcgatgaggcggtcgtgacgtagttcgtcgtgtagagttttcgtcggtcgataggcgtgtagagttttgtagaggattttttcgttttttgggtagtttgttaagtcgtggtatttttaatttttagtattgggtatttgggagtattgtagtcgttttggttcgtatcggtgtcggtgttttgggtatttgggttggtttggatatgggtgtttcgggtagagtttatttatgtaggttagaattagtgtgtggagtttgtatagatttgttttggagcggttgtttgtgttggggtggggaggagtagagggcgagaagttggtggggaagggaagcggcgttaaaagaatatttataatattttgtatttggaaggtaaagtagagggtagtgatttttgtagatttgcgggggcgacgtttgaagtaaatagggatatataagttggtgttttttgtggttgtgtatggggtttttatgttttttgtttgagtttttagaagtttgtttttgtttttttaggtagttgttatagtttgttataaatagtttttggttttttattttttatagtttcgattttaaaatttattgttttattttttattttttttttatttttattttttttagtattttttgattgtttgtgttttgtgtttttttattgttttttaatttggggtggggttgggggggatgtttttttttttgtttgttttttgatgtttagttgaagtgttattttttataggtagttttttttggttatgttagtttgtattgattgtttttttttttgaattttgtaagtattttttatgtgtatttgtttttgggtaaggtgggtttgatttgttagagtgttagagttttattttgtttttttaggagggtttggtattattatagtttagtatggtgtggtgttttagtaggaggtatttggttataattaatataagttgttttagttaatttaaagaaattttaggaggaatagggttttaggagggtatggggatttttttgtattcgaagttaggatgtgttattaattataaggaggtaggggttttttttcgttgttttttgggattttttaggtgttcgtggttttagtttttttttgtatatttgtatttttttttttattagttttttttgttttaagcgtaaatatggatgtttaggatttggttttaatttttcgagtttggtatttatggtgtattgatagtgtgagattttatttttttgattaattttttgggttggtgatttttttgtgtaattaatggaagttagcgaggtagggttatatgtttcgtttagaggtgtagatttggagaaggaacgtgggtaagtttttttaggaataggtagggtagggaggaaaggggggtatttttggtgtagttcggttcggagtaggaagacgtttaataaatgttgatagattgtaggatataggtaaaggtgttgagttggattttttatttttgttttttttttttttggtatttcggttaggaaattgttgtagtttttttggaatttcgtttattttttttattggtttataaaaggggttaaatggaagtagtaagatttgagtttaaattaaatttgttaattattagtttagtgaatttgggcgagtaatataaaatttgagtgtttttatttgaaaaatagaggttagagggatgttatgtgttattgtgtgtgtgtgttgggggtggggattgggggtgatttgtgagtaattggaggtgagggtggagtttagtgtttagtatttatgtattggggatttaaaaaggagtatttttttatgattttatgtattagaaattgggatggtatgttattgggatagcgtttttttttttgtatggtggtatataaatatatgtgttttataattaatggtattttagatttgacgaaatatggaatattatttgttgtgttgattttgggtaaattataatatttttgggtaaaaatgtttttatttgaaaaatagggataacgttttttttttagttagttattatggggttaaaatgagattatatttgttaagggttttgtttttatttttttttttgttggacggtatttttggtgggtagaggtgggtttcgggtagaataagtcgtgttgagttaggattaggagtgttagtgttattgtttgtttatggagagggaggttttagtgttgagggttaagtaaatatttgtggttatggattaattcgaattttaggttgttatggcggtaggacggcgaatttgtagtatttttacgattcgtttttgtgagtttttttttaggtaggtttatgaggggtgtggagggagggttgttttcgggagaagagagttaggtggtgatgagggttgaattttttagttagggtgtttaataagtttgagtttggggtgaaaggatataaggttttttataggttaggtttggtagttatagttttaggtttttttgttatgcgtttttttttttttaggttaagggtttttagggtttagggttattttaatagatagtttggagtttaggattttttattttttttattttatttttatttttgggggtgtcggatttgaataaattttagaagtggttttagagggagtcggtaagaatggagagtagggttcggtagggtgtgtagagggttacgtggtttatttattggggagggttttttgatttttggttattagggttatttttgtggttttttggagtatttggtggtttggggtaggggttgaatttttaggtttaaaattatataggtttggttttgagttttggttttgcgagtaatgtatggatgtaaatatggagatttaggattttgttttagtttttcgagtttggtgtttgtagtgtattgatggtgtgagattttatttttggaggatgggggatagaatttgatcgattttttgggttggtgatttttttgtgtaattaacggagattagtaagggttggatttttaataaattatttaattttttcgagttttagtttttttttttatgaaatggggttgatagtattaataattattttttgggtggttgtgagttttaattgaagttataatattttatgtttattgagtatgagttatgtgtaaagtttgttttgagagttttatgtggattaatttttttaatttttataatattttttaaggtatagatatattacgttattttatttattttataaatgaggaaattgaggtatggagtagttaagtattttgtttaatattgttttttagtaagtgttggagttggaatttgtatcgtgtagtttggttttatggtttgttttgtgaattttgtaaaaattgtttgaaagatattatgagtgtttaattaacgttagttaatatttttagtttagttattagatcggtagaggtagttattttattgtttttagggaggatataaatattttggtattttttttattgtattttggagttgttttttaggtaggtagtgtgagtttagttttacgtagagcgggtagtcgaggttttttgaggttatgtttttagcgaataaggatttttaattttagttttcgttttgacggttagtatatagggatagtttttttatttcgtttttatttgggggtgtaggtagagtagtagcgggggtaggtattgttcggagtttagaagttttttttaga

SEQ ID NO: 1968 - DNA, 6483 bp, Artificial Sequence
  chemically treated genomic DNA (Homo sapiens)
tttgaggaggatttttgagtttcgggtagtgtttattttcgttgttgttttgtttgtatttttaggtggaagcggaatgaaagggttgtttttgtgtgttggtcgttagggcggaagttgggattgagggtttttgttcgttagagatatagttttagaaggtttcggttgttcgttttacgtggggttgagtttatattgtttgtttagaaagtagttttagaatgtagtggagagggtgttaggatgtttgtgttttttttggggatagtggggtggttgtttttgtcggtttgatgattgggttgagaatattagttaacgttgattggatatttatggtgttttttaaataatttttataggatttatagggtaggttatgaagttagattgtacggtgtaaattttagttttagtatttattggagggtaatgttgggtaagatgtttaattgttttatgttttagtttttttatttgtaaaatggatggaataacgtggtgtatttgtgttttaaagggtgttgtgagaattaaaggagttagtttatataaagtttttaaaataggttttgtatatagtttatgtttagtaaatatgagatattatgattttagttaaggtttataattatttaagaggtagttattaatgttgttaattttattttatagagggggaaattgagattcggaggagttaagtggtttattaaaaatttaatttttgttggttttcgttgattgtatagggaagttattaatttaggggatcgattagattttgttttttattttttaggagtagggttttatattattagtatattgtaggtattagattcggaagattgaggtaaggttttgggtttttatgtttatatttatgtattattcgtagagttaggatttaaggttaggtttgtgtggttttaggtttggaaatttaatttttgttttaaattattaggtgttttaaaaggttatagagatagttttggtggttagagattaaggaattttttttagtggataggttacgtggttttttgtatattttatcggattttgttttttatttttgtcgattttttttgaggttatttttgagatttgtttaaattcgatatttttaaaggtggaagtggggtggggagaatggagggttttgggttttaaattgtttgttggaatggttttgggttttggggatttttggtttggaaagagggaggcgtatggtaaagggatttgagattgtggttgttaggtttggtttgtggagggttttgtgtttttttattttaagtttaggtttgttgagtattttggttggaggatttagtttttattattatttagtttttttttttcgggggtagttttttttttatattttttatagatttgtttggagggggatttataggggcgggtcgtggagatattgtaagttcgtcgttttgtcgttatgatagtttggagttcgagttaatttataattataaatatttgtttggtttttagtattgaggtttttttttttatagataaatagtggtattagtatttttggttttagtttagtacggtttgttttgttcgaagtttatttttgtttattaaggatgtcgtttagtagggagggaggtgagggtaaaatttttgatagatgtggttttattttagttttatagtggttggttgagggaggaacgttgtttttgttttttagatggggatatttttgtttagagatattatagtttgtttaagattagtataataggtaatattttatatttcgttaaatttaaaatattattaattataagatatatgtatttatgtgttattatataagaaaaaagacgttgttttaatgatatgttattttaatttttgatatataaaattatgagaagatgtttttttttgggtttttagtgtataggtgttgggtattgggttttatttttatttttaattgtttataaattatttttaatttttatttttaatatatatatataatggtatatagtatttttttaatttttattttttaggtaaggatatttaagttttgtgttattcgtttagatttattgagttggtagttggtagatttaatttgaatttaggttttgttgtttttatttggttttttttgtggattagtaagaaaaatgaacgggattttagaaaggttgtagtaattttttggtcggggtgttagaagggagaagggtagaaataaagggtttagtttagtatttttgtttgtgttttgtagtttattagtatttattaagcgtttttttgtttcgaatcgggttgtattagagatgttttttttttttttttgttttatttgtttttgggaagatttgtttacgttttttttttaagtttgtatttttaaacggggtatgtgattttgtttcgttggtttttattgattgtatagggaagttattaatttaggggattgattagaggagtagggttttatattgttagtatattataagtattagattcggaagattgaggttaggttttgggtatttatgtttacgtttaaagtagaggaagttgatgagaaggaagatgtaggtgtgtagagggggattgaggttacggatatttagagagttttagggagtagcggaaggaggtttttgtttttttatgattggtggtatattttggtttcgggtgtaggagggtttttatgtttttttaaaattttattttttttgaagtttttttaaattggttggaatagtttgtgttgattgtaattagatgttttttgttgaggtattatattatgttgggttgtggtggtattaggtttttttagaggaatagggtaaaattttaatattttaataagttaggtttattttgtttaggggtaggtatatataggaaatgtttatagaatttagaggagagggtaattagtataagttggtatagttaggggaggttgtttgtaggaggtgatattttagttggatattaaagagtagataggaggaaagatattttttttaattttattttaggttgggagatagtggggagatatagaatataagtagttaggaggtgttaggaggggtggaggtggagaggaggtggagggtgaggtaatggattttgaaatcgagattatgagaagtggagaattaggagttgtttgtgataggttgtggtagttgtttagaaaagtagagataagtttttgggaatttagataggaagtatgaagattttatgtataattatagaaggtattagtttgtatgtttttgtttgttttaggcgtcgttttcgtaagtttgtagagattattgttttttgttttgttttttaggtgtaagatgttgtgggtatttttttggcgtcgttttttttttttattaatttttcgttttttatttttttttattttagtataggtagtcgttttagggtaagtttatgtaggttttatatattgattttgatttgtataaatggattttgttcggggtatttatgtttaaattagtttaggtgtttaaagtatcggtatcggtacgagttagggcggttgtaatgtttttaagtgtttagtgttgggggttgggggtgttacggtttggtaggttgtttagagggcggaagggttttttgtagagttttgtacgtttgtcggtcgacggggattttgtacggcgggttgcgttacggtcgttttatcggttggtagcgtaggaaatttcgttattttttcgaggtagggatagttttgtcgttagtcgtttttgcgattttagggtttttgtagttatatttggttttagtcgggggcgtcgcgtcgtatcgttttgcggaggagttaggcgttttttataggcgcggttttattcgttttatttgttaggtgtgagtcgttttacgtgtattcgaacgcggttaggtttatttaggaagtcggagtaggattttgggtagcgagttcgttgtgagttagagagtagagggatatttgtggttaaggaattcgttgtatggatgaagatttaagtaaaggagttagaattaaatgtgtgtggggtaaggttagttataattatcggagtaggcggggttttaaagtttttagttttggagttacgtttttacggttttaaattttcgttagtttttttttgatagggggatttaatttttttgtgttttaatgtttatatttgtaaaatggggttagcgttcgttttaggtgattgttataagggttacgttaaattttttattaattttttaattaaaaaagttttgaaatagggtttttttggttttgttatttaggttggagtgtagtggcgggattatagttttttgcggtttagattttttgggtttaagcgatttttttgttttagttattttagtagttgggattataggttcgtgttattacgtttagttgatttttaaaaatttttaggagagaggaggttttgttgtgttgttttagaatttttgattttaagtgattttttttttttagtttgttaaagtgttgagattataggcgggagttattgtgtttggttttatttttaagtattttatataaagtggatatggtttgggatttaataggattttttataggtttgggaaggttagggaggggtcgattaggaggggaaggggttaaggatagttgttgttgtgtggaagtttagattgtatagattcgttgtatagattagggttgattatttagttagttttaatttgtataatattttttattttttgcgttttggttttgttttgttaatagatgttagaaatttaatttgagtttattttgttgaatagtgatgagagatgggttggtggttagggttgacgggattaaggtttttttttattttatgttatttttttgtgtggtattgtttattttttattttttttgtagggacgttgtgttgtttagtttattttaggtagggtagggaggatagatattagagaggttttcgggagttttttggtaagaagtggagtgggatggatgtagtttaacgttttttttttttgttgttgttaggttattgtggtataatttatatatagggaaatttatattttaaaaatgtatagttttgtttgttttgataaatgtatgttatagtgtatttattattatattatgatatatatatttttattatttttagaaattttgtgttttattttaatttttggtaattattgattggatttttatttttataatttgtattttttagaatagtatataaagggaattttatagtatatatatatatttttttgagttggtgttttgtttttttgtttaggttggagtgtagtggtgtgattttagttcgttgtaatttttattttttgggtttaagtgatttttttgttttagttttttgagtagttggaattataggtatacgttattatatttgtttaatttttgtattttttagttttattatgttggttaggttagttttgaatttttgatcgtaagtgattcgtttattttagttttttaaagtgttgggattataggcgtgagttatcgtgtttaattagtatatagttttttaagattatttttttttatttagtataaagtttttgagatttatttatgtggaattttatattagtattttatttttttttattgttgattgggttttattatatagatgtgttataatttgttatttatttgttagtttttggttattattaaattaagttgttagaatatttatgtataggtttttgtgtgggtatatgtttttattttttttgggtaatatttaggaataagattgttgagttatgtggtgagtacgtgtttatttttgggaaaaaaaaataaagttaaatttttttagagtggtggtggtattttgtatttttattaagtaatgtttgagtgtttttgttgttttgtatttttattagtatttggtgttgtcggttgttttttaattttaatttttaatttttagtttttttaatagatgtgtagtggtattttattgtagttttaatttttattttttttttttttggtgattttgagtatttttttttgtgttaatttgttatttatattttttttggtgaagtgttagtttaagtttttgggttgttttttgtttgtttttttgtttttgagggttttttaaattgagtttttagaatttgtatgtattttagtaataagttttttgttagttaagtattttgtaaaaatttttttttagtttgtgatttgttttttatatttaatagtgttttttaatgaatagatgtttgtaattttgatgaagtttaattattaatatttttttttatgattcgtgtttttgtgttttattaaagaatattgttttatttaaggttataaag

SEQ ID NO: 1969 - DNA, 5179 bp, Artificial Sequence
  chemically treated genomic DNA (Homo sapiens)
gttgtagtgagttaagtgtagtggagttattgtattatagtttggatgatagagtgagattttgtttaaaaaggaaaaaaaaaaaaagttgtaacgtaaagagtttaggtgtagattttggttttatagtttattaaattatgatgtaattttgggtaaattattaattttttaatgtttgtttttttatttgtaaaatggggataattatagtatttatttgaggtcgtacgcggtagtttacgtttgtaattttagtattttgggaggtcgaggcgggcggattacgaggttaggagatagagattattttggttaatatggtgaaatttcgtttttattaaaaatataaaaaaattagttcggtgtggtggtaggcgtttgtagttttagttatttgtgaggttgaggtaggagaattatttgaatttgggaggtagagtttgtagtgagtcgagattgcgttattgttttttagtttgggtgatagagtaagaattcgtttcgaaaaaaaaaagaacgggttttaatatatattaggttttgtataaatatttgttgttatatgatgtttattcggataatttttattgttattgtttaaggtaaggattatattttatttagttttgtatttttagtttttaatataatgtttggtataaattaatagtttttttttttttatttttagtttttttttttatttaattttattttttatagtgttgttaaaattattttttttattaggtattatgtattatgatattttttttttttttattaaagtttttagtttttttttgttatttgtaaatttttaagttagataatttatttaaaattttgtttgtaattaaagtgttttaggtttttttttatattaaatagtggtgttagggttatttttttattagtttatatttatatttggtttgttatttatttatttatttatttagagatggagtttcgtttttgttgtttaggttggagtgtaatggtatgatttcggtttatttaattttcgttttttaggtttaagtaatttttttgttttagtttgttaagtagttgggattataggtatgtattattacgattggttaattttgttttgttttttgttttgttttttgttttttgtttttagtagagacggggtttttttatgttggttaggttggttttaaattgattttaggtgatttgtttattttagttttttaaagtgttgggattataggtatgagttattatattagtcggttttttttttgttttttgtttgtttgtttgttttgagatagggttttattttgttatttaggttgtacgatagagtggtgtaattatagtttattgtagtttcgaatttatgggtaatagtgatttttttgttttagttttttaagttgttggaattataggtatgtattattatatttggttgtgtgtggtgtgtgtgtgtgtgtttgtgtgtgtgtgtgtgtgtgtgtgtgtgtgtgtttagagagagatagagttttattttgttgtttaggttggttttaaatttttggttttaagtaatttttttgtttttgttttttaaagtattgagattataggtatgagttattatgtttagttcgttatatttatatttatttatgagtatttgtaaatatgtatatatgtagtttaaggtagtgtttaaaataattagttttgaggtagattgtttgtttttggattttgattttagtattttttatatatatgattaaggataagtttttttatttttttatattggtttttttatttgtaaaatggagatagtaatagtatttattttagagagttgttgtgagtattatacgaggtgtttagtatttggtatggtgtttgatatttaataaatattaaataaatttttgtttgtttttgtttgagacggagtttcgtttttgttgttaggttgtagtgtaatggtataatttttcgtttttttagtttaagtgatttttttgttttagtttttcgagtagttgggattataggtatgcgttattacgttcggttaattttgtatttttagtagagacggggtttttttatgttggttaagttggtttcgaatttttaattttaggtgattcgtttattttagttttttaaagttttgggattataggcgtgagttatcgcgtaaatatatagtttagttagaataatataagcgtatcgaagatatattttaatatagaatataataaagaataaaggtaaataaaattatttgagtaaagaaaaaaatataaaaaattaatatgaaaggagaattaataataaattaattattttttaaacgagagatatagaagagtagttgagatgaaattgtaaggatagagagagagtaagaggatagaaatgagtgaggaagatgggtagtatatagataaggatgagagttatagagcgtattaaattggatcgcgcgatttagttgaagaataaaataagaaagatgggggtggatttttttatttaaggagaataggaggcgtgtttgattgtatttattattatagggtatggtaggtggggagaatgggcgtttttagtggggggaggtggttattaggattaagtagggtagtcgggggtggttttatgattattatgaatattttttttgcgttttaatgttattatttatagttattatatgaatataagacgtagtttttttttaggttaatttaaggggcgggtatttgtaattttagtattttgggaggttaaggtaggtggattatttgaagttaggagtttgagattagtttgattaatatggtgaaatttcgtttttattaaaaatataaaaattatttgggcgtggtgatgtacgtttgtaaatttagttattcgggagggtgaggtaggagaatcgtttgaatttaggaggcggaggttgtagtgagttaagatcgtgttattgtattttagtttgggtaatagagcgagatttcgttttaaagaaaaaaaaaaaagaaagaaagaaagaaaaaagaaaattttttgttaatatatttttattgttttaattttataattttttgggtttttttagtatttatagaagttgataatagggaaaggtaggttgtaaagggtaatggtgatgagtttaggtagtattattgttttttttataaaagtatattaatgatgagtttggagaatatattagatgttaggatggtaaatatagttttggttgtaatatgatcgttgcgtaaaataaaatatatttatgtaagaggtttttaatttggagtttatgatttttttgaaattagatgtaaaatttggtttttgtgtgtattttttatggtagagggtttattgtttttgtttgatttataattttaaaatgttttaagtaagagggttaagaatttatgatttatttagtataatgttttttgagtgtaaaaagtttttgtggtatttagtattttcgtgggagtttattaaaattttagggtttatcgattgtagaattatggggatgtaaatgtatttgtaattttttggaagtaaagtatatacgggaaattaagaaatattaagagggaaaaagtattttagtttaatgggtataattgttgaggttttgaggtttttattaagaaggaaaagagagtttagattgtaggtttgttgcgagtaagtgtgtttgtaggttgtattaggtatgtggtgatggtgatggggggttataggagtttatagtgaatttttattatttttatttattattgtttagttattttattatttattgatttttttttttcggtagttttgaggatcgtagattaaattgaaatataaaaggggagggtaaaagaaaagatagttttaaagggagtcgagcgttcgtttttttattttgcggtttttttaagagaagaattttttgggatttgtagttttaatcgattttagttttaatcgaaatttaattcggattttttttttttgatttaaataagattaattttggatttttttttttttattgattaattagattttgttattaggtagattttagcggtcgtcggtacgagttcggcgttttttgttttcgggtggtagtagtgattaatgatagagtaggtcgttcgtgtatttaggtagatcgcggttgttataattatttagaaaaaggaaaataaagtaacgtacgagtcggttgggttaggattttggggttgggttggagtgaaggtggttacgaggtagttttttttttttttttatttttattgttgtttgtgttggaaggcgattgtttagaggtagggaggggtaagatgagttgggaggagagtagaaaaagattgtagttgtatttttaatagtttttttatttatgtgtacgtgttcggaatttgggattttatttttttgtcgggtttttgacgtttagcgtatgagtttcgttatttcgttttattttcgttttattttgtagaaatcggggattgaatggagggggaagggaaggaggtgggggcgcgttttaggatgggttgttgtgggagatgacgtaggggtcggcgacgtggggagggggagtagcgggggaagtcgtggcgagattaagtaatgagaatttgggtttagttttttttttaagtttagaagggtagaatatgttcgtattttttttgattttttaggtatatgtaatggtgaggagtatttttgagaattagagaattttgttttgtggttgttattgttgtttttgagggggaggagggtagtatggggttagaggtagaaatgaaaattttttgttaatatggatttttaatttttttatttttttttttatagttttttagatttaggagattttagaaaggtggggtagatagaatggagatggtaaagatttttttgggtatatatgggtttggcgaagtaatggaataatttttaattttcggagaaggtaagtggtgagaaaaagattatcggggaaattcggaggttttgtttttgtttttttgtttttttgggtaaagagatgaggagtgttttggggttttttggggaagggaaggttagtgtgagttatatttttatgtttgttttttttaattttagt

SEQ ID NO: 1970 - DNA, 5179 bp, Artificial Sequence
  chemically treated genomic DNA (Homo sapiens)
gttagaattgagagggataggtataaagatgtaatttatattggtttttttttttttagaaggttttagggtattttttatttttttatttagaaaggtagagaaatagaaataaagttttcgaattttttcggtggttttttttttattatttgtttttttcgaaaattagaaattattttattatttcgttaggtttatatatgtttaaagagatttttgttatttttattttatttgttttatttttttgaagttttttaaatttggaaaattgtaaaggaagagatagggggattgggaatttatgttagtaagaaatttttatttttgtttttgattttatattgttttttttttttttaaaaataataataatagttataaaataaagttttttaatttttaaaaatattttttattattgtatatgtttgggaggttagaaaggatacgaatatattttgtttttttaggtttggaaaaaaaattgggtttaagtttttattatttaatttcgttacgatttttttcgttgttttttttttttacgtcgtcggtttttacgttattttttataatagtttattttgaggcgcgtttttattttttttttttttttttttatttaattttcggtttttgtaaagtggagcgggggtggggcggggtagcggaatttatgcgttgggcgttagaaattcggtaggggaatggggttttagatttcgggtacgtgtatatgggtgaagaagttgttgaaaatatagttataatttttttttgttttttttttaatttattttgtttttttttatttttgaatagtcgttttttaatataagtaataataaaggtaagggagaaagagaaattatttcgtagttatttttattttagtttagttttaaggttttggtttagtcggttcgtgcgttgttttatttttttttttttgaatggttgtaatagtcgcgatttgtttagatatacgggcggtttgttttgttattggttattgttgttattcggagatagaaggcgtcgggttcgtatcggcggtcgttgaagtttgtttggtaatagaatttgattggttaataggggagggaaaatttaaagttggttttatttgagttaagagggggaagttcgggttgggtttcggttaaaattggggtcggttgggattgtaggttttaagaggttttttttttaaagggatcgtaggatgaaagaacgggcgttcggttttttttggaattgtttttttttttgttttttttttttgtgttttagtttagtttacggtttttagagttgtcggaagagaagaattaatggatgataaaataattagataatgatgggtaggagtgatggaagtttattgtaagtttttataattttttattattattattatatgtttaatataatttgtagatatatttattcgtaatagatttgtaatttgggttttttttttttttttgatggaggttttaaaattttagtagttgtatttattaaattaaaatgtttttttttttttagtattttttggtttttcgtgtgtattttatttttaaagagttgtaaatgtatttgtatttttatagttttgtagtcggtgaattttggaattttgatggatttttacgggggtgttggatgttataggaattttttatatttagggaatattgtattgaataggttatgggtttttaatttttttatttaagatattttaaggttatgaattagataaaagtaatggattttttattatgaaaaatgtatatagagattaagttttgtatttaattttagagaggttatggattttaggttgaaagttttttatatggatgtattttgttttgcgtagcggttatgttataattaaaattgtatttgttattttgatatttaatatgttttttaggtttattattaatgtgtttttgtaaagaagatagtagtgttgtttgagtttattattattgttttttatagtttatttttttttattattagtttttatgagtgttgggggaatttaggagattgtggagttggggtaataaggatatattggtaagaggttttttttttttttttttttttttttttttttttttttttgagacggagtttcgttttgttgtttaggttggagtgtaatggtacgattttggtttattgtaattttcgttttttgggtttaagcgatttttttgttttattttttcgagtaattgggtttatagacgtgtattattacgtttagataatttttgtgtttttagtagagacggagttttattatgttggttaggttggttttaaatttttgattttaggtgatttatttgttttggttttttaaagtgttgggattataggtgttcgttttttgaattggtttgaaaagaaattgcgttttatatttatatagtagttgtgagtgataatattgggacgtaagagaagtgtttatggtgattatgaggttattttcgattgttttatttgattttagtgattatttttttttattgaaaacgtttattttttttatttattatattttataataataggtatagttaggtacgttttttattttttttgaatgaaaaaatttatttttattttttttattttattttttagttgaatcgcgcggtttagtttaatacgttttataatttttatttttatttgtgtattatttattttttttatttatttttatttttttgttttttttttgtttttgtaattttattttagttatttttttatatttttcgtttggaagataattaatttattattaattttttttttatgttaattttttatgtttttttttttgtttaaataattttatttatttttattttttgttgtattttgtgttgaaatatgttttcggtgcgtttgtgttgttttagttagattgtatgtttgcgcggtggtttacgtttgtaattttaaaattttgggaggttgaggtgggcggattatttaaggttgggagttcgagattagtttgattaatatgaagaaatttcgtttttattaaaaatataagattagtcgggcgtggtggcgtatgtttgtaattttagttattcgggaggttgaggtaggagaattatttgaattggggaggcggaggattgtgttattatattatagtttggtaataagagcgaaatttcgttttaaataaaaataaataaaaatttatttggtgtttattaggtattagatattatattaaatgttaaatatttcgtgtaatgtttatagtaattttttgaagtaggtattgttattgtttttattttatagatgaggaaattaatgtggagaggtgaagggatttgtttttagttatatatgtagaaagtgttagaattaggatttaaaggtaggtagtttgttttaaagttgattgttttgagtattgttttagattgtatgtatatatatttgtagatatttataaataaatatgggtataacgggttggatatgatggtttatgtttataattttaatattttgggaggtaaaggtaagaggattgtttggggttaggagtttgagattagtttgggtaataaagtgagattttgtttttttttaaatatatatatatatatatatatatatatatatagatatatatatatatattatatatagttaggtgtggtggtatatgtttgtggttttagtaatttgggaggttgaagtaggaggattattattatttatgagttcgaggttgtagtgagttatgattgtattattttgtcgtgtagtttgggtgatagagtaagattttgttttaaaataaataaataaataaaaaataaaaaaaaagtcggttggtgtggtggtttatgtttataattttagtattttgggaggttgaggtgggtagattatttgaggttagtttgagattagtttgattaatatggagaaatttcgtttttattaaaagtaaaaaataaaaaataaaataaaaaataaaataaaattagttagtcgtggtggtgtatgtttgtaattttagttatttggtaggttgaggtaggagaattgtttgaatttgggaggcggaggttgggtgagtcgagattatgttattgtattttagtttgggtaataagagcgaaattttatttttaaataaataaataaataaatagtaagttaaatatggatatagattgatggaaagatagttttaatattattgtttggtatgaaggagaatttagagtattttggttgtaaatagagttttgggtaagttatttagtttaaaaatttgtagataatagggaaaaattggaagttttagtaaggggggagaaagtattatagtatatagtatttagtaaaagagatgattttgatagtattatagaaggtagagttgagtgaaagaaaaggttagagataggaaagaggaaattattaatttatgttaggtattgtgttaagagttagggatataaagttgaataaggtatggtttttgttttgggtagtaataataaaaattgttcggataagtattatataatagtaagtatttatatagagtttaatatgtgttggggttcgtttttttttttttcgagacggatttttgttttgttatttaggttggagagtagtggcgtaatttcggtttattgtaagttttgttttttaggtttaagtgatttttttgttttagttttataagtagttgggattataggcgtttgttattatatcgggttaatttttttgtatttttaatagaaacggggttttattatgttagttaggatggtttttattttttgatttcgtgattcgttcgtttcggttttttaaagtgttgggattataggcgtgagttatcgcgtgcggttttagatagatattatgattatttttattttataggtgaggagataggtattgaaaggttaataatttgtttaagattatattataatttagtaagttatggagttaggatttgtatttaggttttttgcgttgtagtttttttttttttttttttttagatagagttttattttgttatttaggttgtagtgtagtggttttattgtatttggtttattgtaat

SEQ ID NO: 1971 - DNA, 21537 bp, Artificial Sequence
  chemically treated genomic DNA (Homo sapiens)
atggaatatttatttttggagttttgagtatgatgtatggagtttaaatattttaaagttattttgtaggagagattgggtggagaggttttgagattttatgtagaatgatttttggttagtattttagttatttgagttattttagttgaggttttagatgtattgtggaatagaattgagttgtttttattaaggtttatgagtaaaagaaatattaagttattattgttttaagcgattacgttttaggtggtttgttatttagtaatagatgattgaaatattttttttttatttgatgtgaagtatttttttaggtgagtgtagagtgagtaaggatgtgttaggttaatttaaatatagggaattttttagttatcgttgttggggtaattgatttatttatgttgtagagatatattgttttaggattgtttttttgttgttgttgtttttgagatgggattttattttgttgtttaggttggagtgtagtggtgcgattttggtttattatagtttttgtttttcgggtttaagtaatttttttattttagttttttgagtagtcgggattataggggcgtattattacgtttggttaatttttgtatttttagtatgtttagtatttttattatgttgattaagttggttttaaatttttgattttaagtgatttatttgtttcggttttttaaagtgttgggattataggtgtgagttatcgtgttcggttaggattgttttttgagaagtaattatattatttttgtggttaagatttaggggatttagagttatttttggagtttgtggttaggtgtaaatttataatttaatattttaatatagatgaatagatatattaagttgaataggaagggtagttttttatagaaaagaaattattagaatataaatagtaggaggagtataagtagaataagtaattaatttttgtttgaattttttagagttagcgttttttttttaggatttgttttttatttatatttgtaatatttatgtttggaattcgtttttgtagttgtagtaatgggattaggggtgtatattaatttagagttaatttgttattgattggttagtaatgtatatgattattttttttgagagtttgagattgtagtatgtttttggatagaaaggttatgaggaattagggtgggatagttgttgttaattatgtaaatgttgatgagtaagtagagagttggtttgtaaaaataagtagtgatgagaatttatggggataggtgaaaaagagatggggtagaaaagaaagaaagaataagagagaaagaaaaaggatgagatagtattagtattagttttgtttattagttttttagtttttagtttttaatatttgatttaattttttttttgtaattttgtttttggttaagagtgatggtaggatgggaatgaatagaaaagggattttatttttatttttaagggtttttgaaaagattatttttggatataggttttattgtagatttgagttttttttattaatgaatattttaaaatagtgagagttttagaggttgtttttttagaattagttttgttatattgtttgtttattaagaggaatagtattattgtgggatagagtttttataggtattagaaggtcgaggtagatatttattttagatgaattagagaggaataaatttaaggtaggaggaggtattgggaaatataggatgtggatttttttagtttttgtttagttatttttatcgtgattatagatttatttttttatttttttggatttttgttttttttgttatattaagtagtggttatagttatatatttatatttggttatagatgttttataattatagattatagattataaatataataatagattataaaatatcgaatgagggttttatttaaaaatatttttatataaaatttttattttattttgaaggagaaaaagtgtgtattgggtaaagattttattgtttaagatttggaatttaaatttgtagtaatttttaatatttaagtatatgtattttttttttcgattgtgtaataaaggacgggaagtaaaaaggggaatattttttatgtttaaattaagtcggtcgggtattgtagtttacgtttgtaattttaatattttgggaggtcgaggtgggtggattatttgaggttaggagatcgagattagtttggttaatatggtgaaatttcgtttttattaaaaatataaaaattagttaggtgtggttttgtgcgtttgtagttttagttattcgggaggttgaggtaggagaattgtttgaatttgggaggtggaggttgtagtgagttgagattatgttattgtattttagtttgggtgataaagcgagattttgttttaaaaaaaaaaaaaaaaaaaaaagttagaggtttatttaggatataaattagatgtgaataagtatgggaaatttaaaagataattaaatttgaatttgaagtgattagtatttgatattttattgagatgttaaaatattgttttttagagaaattgatttattttttttttttattatataggtaatgtatgtgtattgtagtaaaattcgatttaagtataataaatgtttatatttagtgtatatatttttaaatatattttgacgaattttatgttatttgtttagaatagatttgatcgtttatatgtaatgtttatgtttttaacgaggttataaattttatgaggagaatttttttattataaatttatatgttttttatttttatagtttggttattttttttgggaagggatgggggaagtttataaatgttttttttattagtatttatgtatgtatttatttatttgataaacgttgtattgagtatttagtatggatttgggttaggtgtaggagatttaaaggtatatttttttttttagtttttttttttattgtttttttttttttttttttttgagacggagttttgttttgtcgtttaggttggagtggagtggcgttatttcggtttattgtaattttcgttttttgggtttaagttatttttttgttttagtttttcgagtaggtgggattataggcgttcgttattatgttcggttaatttttgtatttttagtagagatgaggttttattatattggttaggttggtttcgaatttttgattttgtgattcgttcgttttggttttttaaagtgttgggattataggcgtgagttatcgtgttcgtttttttcggttttggtttttttttttttttttttttttagatagagtttttttttgtcgtttaggttggagtgtagcggcgttattttggtttattgtaatttttattttttgggtttaagtaatttttttgttttagtttttcgagtagttgggattataggtatacgttattacgttcggttaatttttgtatttttagtagagacggggttttattagacggggttttattgtgttgagtaggatggtttcgattttttgattttatgattttatcgtttcggttttttaaagtgttgggatgatagtcgtgagttatcgcgttcggttttgtatgttttttatgatatattttttaggttaggcgcggtggtttatgtttgttattttagtattttgggaggtcgaggcgggtagattatttgaggttaggagatcgagattagtttgtttaatatggtgaaatttcgtttttattaaaaatataaaaattagtcgggcgtagtggtaggcgtttgtagttttagttattttggaggttgaggtaggataattatttgaattcgggaggcggaggttgtagtgagtcgagatggtattgttgtattttagtttgggcgataagagtaaaaattttattaaaaaaaaaaaaaaaaaaaaaagatatatttttttgattttaagaaagttatagtttaaatagggaaataatatataattaattattttattaagtatttgtgtaattttagagttatatgtgaaagttttaagaaaatatagaagtagtttggggtgcggtgggttttgtttgtaattttagtattttgagaggttgaggtaggatgatcgtttgggtttaggagtttaagattagtttgggcgatatagtaagattttatttttataaaagtaaaaaaaaaaaaaaataggtgggtatggtggtgtttgtttgtagttttagttatttaggaaggaggttgaggtaggaggatcgtttgagtttaggaagttaaggttgtaaagttgtaaggttgtagtgagttatgattgtgttattgtagtttgagtgatatagcgagattttgtgaaagaaaaagaaagaaagaaagaaagaaagaaagaaagaaagaaagaaagaaagaaagaaagaaagaaagagtatagaagaggattgggaggttatggggtataatttttgagggggtgattttggttaggcgatgagagggcggtaggaagggtgatgaggggagaagaggatttagaaatataaattttagggtttttttgtgttagcgggaatttttgttttttataatttttattataagataaatttaatgtttaattagagatttttttcgcgttttgaatttgtaaatttatgaattaggggtaaaaaaaattcggatatcgagtttggttttttattagttagagaatttattaagttttaggaggggcggggtcgagggcggttcgtgttatagttgtgggcggggttgttcgtgtttgcgttagagtcggttcgtttcgtcgttaggggttgtcgtaggagttaggcgtggattggtatgtgggtatgtcggtttttttttataggtcgcgtaggattgttcgagaggttttgattggtttaataggcgttgagcgtttattggttgcgttgggtcgttagggcgacgaaaaaggggaaggggtgttgggtttggcgggtaaattaaggttgcggatcgttgggcggtttcgcggggcgttgttcggagagttgcgaggtcggggtttttagggtttacgttatattttaggaagtgtttgagttagtgagttggttaacgagtttcgcgggttgggattatgggttgttttttttttaagagacggaaggttgataaggagtcgcggttcgagaacgaggaggagcggttaaagtagtatagttgggattagcgcgagaaggtaatgaaagtcgtgtagtcgtcgttttagtttttttgagtcgtttcgttaggttttttacggttcgggatcgttgagggggtcgatttaattgttgtcgtatttttttgaacgcggatagttgaagtcggggtgtacgatttttttggggagcggggacgtgaagtatagcgttagagaggtcgtttagagggttgtggagtttcggaaggagttttaggagtttgttgtcgtggtagatagattttttcgggagttttttttgatttcgaattttgttttgttttgattttttgttggagatgatcgattcgagagagggaaagagtcgagaacgttttgaattttaaattatttcgttttatttatcggtagcgttaagcggggttttgtttagtcgtcgagttacgtatatgggatcgatttttatttttttcggggtttaatgttttgtggttgtttttttttttgtttgtttttttcggtaaatttttttggtgttttatgatatattttattgttgaatttttttaattattaagtggattgtttaatgtatagttttattttttttttttttttagttattcgaaagaaataatgaatatcgtattagttttggaatgtgtattaagattgtaaggtgaaaataagcggtataaattaggtagtattttattgttggtttaaatgaatgaaaacgtttttatttttatttttgtatatagttagaaacgaaaaatttttgaaaatttttattagttttatataaaatatattcggttatatattttataatagtttttttttttatatagttttttatttgtgtttattaaattattttgatggatttattaattattttttttaaataaaatgagagattttttaaatgggtattatgaatagttaattttttgtttaaggtaatatatttttatttaagattattttataataaatgtattaacgttttggaattatagatttttttgtatgatttttaatttttagtagaatgtatttaggtaagttttggtttttaagagttagagttaggaaattgaaagttttttgtagttttttttagtttcgtttttttgtttttattttttatatatattttttttgggttatatggtatttttattttttgttagttatattcgatagtagtattttataatgtaggggaagaaagtattatgttttttattttataagaagattgtatttgttatttaaagttatttgatgggcggtttttaaaagatattgttttttttagtttttggttttttaataatgtttttttagtttgaattgtttgttttagagaaagttgtatattttatttttattttagtttttttttttgaatttaggttaaatttaaattaaataaaatgttttttttatttatagtagttttggttgtttatgatttatcgttttataataaattgttttatagttaatgtttattaatataatatttaggttagttaggattttttatgttaattttttttttagataagtgtgtgtgttttgtgattttttttttttttttgtttattggttaagtaaatgtattgagaaatataatattggatattaatatttaagttttttttttataaatgagtgtgtaataaatttttaattgtagaaattgttttgagtttatagagaatttttttttttgagaatattattaagttttgtagttgtagagttgtaagagatgttattggatatataaaataagtttatgtttttgagtgtgtgtataataaaagttaaaattttgattaatttagttaattaaaatgagaatttttaattaaatgagtattttgaaaaaaattttagttttaaaatattttggattgttgaagagaattattagtttatattttgagataatgtagatattatattttttaatatagttttttttttttagttttttttttttttggaattattaggaattttttttaagttgttttattttgatagtttgttaaattttatataatttaaaatatttttttttagggttaggtatggtgatttatgtttgtaattttaggattttgggaggttaaggttggtggtttttttgagtttaggagttttagattagtttgggtaatatggcgaaattttatttttattaaaaatataaaaattagtggggtatggtggtgtatatttgtagttttagttatttagtaggttgaggtgggaggattatttgagtttgggatttagaggttgtaatgagttatgatcgggttattgttttttagtttgggtaatagagtgagattttgtttttaaaaaaaaaaaataaataaataaaatatttttttttagttttttgtttttcgtgaggttaatttgggttagtgtgtaaatgttttgtattagtttaatgatacgtttattgagtatggttttgtttgtttttagaagattttagttgtattttaaaaggaatagattgtaaatatagtttagagaatataaatgagatatgatgtatgtatattaatagaaatgatttatattaaaagtttaggtttttggaatgtggttatggattatagtatatatagttttaaagttatattagataattattatttaatttgtaagatttttatatgtaaaaataaaatgggttgtttgaaaaatttttttgtagtttagaaaagggtgtttatatttttttttaggttgtgtaattagagtatttttttttgatgttttttttttgagatggagtttggttttgttatcgtttaggttggaatgtagtggcgcgatttcggtttattgtaatttttgttttttgggtttaagcgattttttagttttagttttttgagtagttggaattataggcgtgtattattacgtttggttaatttttgtatatttttagtagagatagggttttattttgttggttaggttagttttgaatttttgattttaggtgatttatttgttttagttttttaaagtgttgggattataggcgtgagttatcgtttttagtttagagtatttttattgaagggtattttttgggttttggggtttgagttgtgtaattgggttagttttaggggattgaagttgggagaaattgttttatttagaaggaatgtttggggattaagtattgttatagtaattgatatattgtagttaatagtgtaagaagtttattttttattgttattgattttgaaaaagaaaaaagattataatttttatattgatgtgatgagaaatatttttggattgtaagatttgtgtttaaattattttaaaagaaatgtttttatttttatttgtatgttgttatttataggtaggtaaattatttagtatgtatgtatttaaatattaagtaagttttaaaattataagatttatttttgttttaaaagagtttattggttttttggagttaaaataggaaatatttaagtatatatgaggtgaggaagagtgatacggaaaagtagtttttattttttagtatttatgtttatatttttttttttagataatagaaatgaggattaattttaaataattatggtttaagtgtgaaaattgtgatttgagtaaggataatatatgtgtttgttatatttgttttatatttaatagaaataatattaaataaaaattttatattagaaattcgagtatttattgtgtaattttgggtaaagtagttaatttgtgtattttaggttttttagttatatagtaggataatgttaaagatttttttattgtttagtaaggtaaaggtttgttttgaagaagaggtttagatagtaatggttatttttgaggaaagaatttaaattagaggttgggtatgatagaattggttttaatataaggtagattataatttttaggattggttattagtggaaggggtggtttcgttgaggatttgatttttatgttagttaaaattgttagatagttagggtggtaatttgttagaaagaagtgtttgtattaagtaggaggaggttagatattgtttttagtttttttttaagtatgaaaagtattttagttatttattgttgtgtattaaattattttaaaatttaatggtttaaaataatggtagatattttgtttataattttttaatttgtataaggttaagtagggttgattttgtttaatgtggtattaatcgtgatagtttttaagatggtttgattatatagttggttggtaagttgatgttggttttgggttgggagtttagttggggtttttttatgtatttttggtttttttatagtgtgatggtagggttttaagggtaagtattttaagagagattggtagaagttgtatggtttttttttaattagtttattaagtgaatttttaagttatttaattagatttaatttggatgtggtaggagtaatgttgaggtagttataaatgtttatttagttttaagaggaggtgattttttaatgggaggagtgttaaagaatttgttagtaggttttaaattttttatataaagttgtttaaaggatataattagttttttgtttattaattttaaaaatagttttttagagatataatttatatgttatataatttatttatttaaagtatataatttattttatttaattgtatatatatttttgagatggagttttattttgttgtttaggttggaatgtagtggtatgattttcgtttattgtttcgttttttggatttaagcgatttttttattttagttttttaagtagttgggattataggcgcgtgttattatatttagttagtttttgtattttttagtagagatgaggttttattatgttggttaggttggtttcgaaatttttggtcgtaggtaatttgtttgtttcgattttttaaagtgttgggattataggtatgagttatagtgtttagtcgtttaattgtgtttttgtatttattaattaattattttttatttttttttttttattatttattatagttaattattgttgataataatttattgtatattttaaaatagttagaagagaaaatgtggaatgtttttaatataaagatatgataagtgtttgaggtaatggatattttagttatttatatttgattattatattgttgtatgtttgtatgaaaatattatatgtattttataaatgtatattattattattatatatttataaaaatttaaaataaatttagtttaaaaataaagtatataatttagtattttttagtaagtttataggtttattattatggtttaattttagaatatttttatttttggaaaaagaaattttgtatttattagtagttattttttattttcgttttttcgagtttttggaaattataaatttattttttgtttttataagtgtttttattttggatattttattttattggagttataatatttagttttttgtgattggtattttttatttagtatgtttttgaagtttgtttatatcgtaatatgtattaagattttattttattgtatggatatattatattttatttatttatttattagttgatggatatttgggttgtttttattttttgtttattatggataatggtgttatgaatatttgtatataagtttttgtttggatatgtttttatttttgttgtgtatatatttaggtttggaattgttgggttatatggtaattttatgtttaatttttttttttttttttttttgagacgtagttttattttgtcgtttaggttggagtgtagtggtgtgattttagtttattgtaagtttcgtttttcgggtttacgttatttttttgtttcggtttttttagtagttgagattataggcgttcgtcgttacgttcggttaattttttgtatttttagtagagacggggttttattatgttagttaggatggtttcgattttttgattgcgtgatttgtttattttggttttttaaagtgttgggattataggcgtgagttatcgcgattggtttatgtttaattttttgaggaattgttaaatagttttttagagtgtttgtattatttatatttttattagtaatgtgtgagtgttgtttttttatttatataaaattttgataaaggtaaaaagtatagagagtgaaaagtatatggggttggaattttaatttgtattttgtatttaattatattttattggtaaattaatttagtttttagtttttagttttttaagattttttttagtttttgaattttttgagtagtttatgaggggaggtaagtattgttagaaatatttaggtaaatttggatgaataaagggaatgtgataggatgtaaaaatagatttagattagattagatgatatggggaatttttttaattttaaaattttataattttattttgttgttatatattttataaaatggtaagttaatataaatgtagtattttagtttttcgaattattaatagtatataagtttaagatattggttttgagtttatattatataagtttaagatatagggtaatttttgtatttttaatagagatagggttttgttatattggttaggttggtttcgaatttttggttttatttgatttttttatttcggttttttaaagtgttgggattaaaagtaagagttattgtatttagttttagaaatttttatagaagttttaagaatgaagtattaaaaaagaaaaggtattagaaagttgaaatagtaaggtcgtggttaagattattagatatataggatatgagttgaattttttatagttttttttattaaaataattatttaaaaaatatatttttgattttggtattttataaagtttagtatattttttttatttaaaaaaatttttttattatattttaagttgtagggtatatatgtataacgtgtaggtttgttatatatgtatgtatgtgttatgttggtgtgttgtatttattaatttgttatttatattaggtatattttttaatgttatttttttttttttttttaattttacgataggtttcggtgtgtgatgtttttttttttgtgtttaagtgtttttattgtttaatttttatttatgagtgagaatatgtagtgtttggttttttgtttttgttatagtttgttgagaattatggtttttagttttatttatgtttttataaaggatatgaatttatttttttttatggttgtatagtattttatggtgtttatgtgttatatttttttaatttagtttattattgatggatatttgggttggttttaagttttttttattgtgaatagtgtcgtaataaatatatatgtgtatgtgtttttatagtagtatgatttataattttttgggtatatatttagtaatgggatggttgggttaaatggtatttttagttttagatttttgaggaatcgttatatcgttttttataatggttgaattagtttatagttttattaatagtgtaaaagtgtttttatttttttattttttttttagtatttgttgttttttgattttttaatgatcgttattttaattggtgtgagatggttattttattgtggttttgatttgtatttttttgatggttagggatgatgaatatttttttatgtgtttgttggtttgtataaatgtttttttttgagaagtgtttgtttataaaagtttagtatattttttatttgtataaattttaaataggttaaaagtttattgatagtattgatagtagtaatgatgatgtaggtgttatttgggttaagttataggaaaatttaaattatagtgttatagaggttattttttagttttgtatgtttagaatataatttaatagtaaagatagtggatttgttttttgggaggtgtgtatattgattaagattataagttttatattattattgagagaaattatttgttttgtttatttttttattatgttttaaagttattgagattaagaatttatattttagtattattagttttataattatgtggtattaatgtttttatttgtgaaataattttttagttatatagttatttagttttgaagttgatttaataatgtttaaattttaagtatttgttttaattgaagtgtaatttatatatagtaaaatttatttttgttaagtgtacggttttatgagttttgataaataaatatagttgtggagttattattaattaagatataaaatggttttatcgtttttaaaagttttttttttgtatagttagtttgtttttttgtagttagttttatttttagtttttgataagttttttatttttatagttttgtttttttgagaatgttatatatatggaattatataatacgtaattttttgagtttggttttttttatttaattataatgtatttaagatttatttatgttgttgtatgtattaagagtttttttttttgagatggggttttattgtgttatttaggttggaatgtagtggtataattttggcgtattgtagttttagttttcggggtttaagtgattttttattttagttttttaagtagtggagataataggcgagtgttattatatttagttaattttttgtatttttttggtagagatggggttttaatacgttgtttaggttggttttgtatttttgagtttaggtgattcgtttattttggttttttaaagtgttggaattataggtatgaattattatatttagtcgggagtttttttttaattgttgagtggtatttcgttgtatggatatattatagtttgtttatttatttattagttaaaggatatttgggttgtttttaattttggtaattatgaataaagttattataaatatttgtgtataggtttttgagtgaatataagtttttattttatttgggtaaatatttatgagtgggattgttgattatatggaaattgtttattaaattttataaaaaattgttaggttagtggtttatatttgtaattatagtattttgggaggtgaaggtagaaggatcgtttgaggttaggagtttaagattcgtttgggtaatatagtgagattttatttttataaaatggataaatatagttaggtagagtggtatatgtttgtagttttagttatttgggaggttgagataggaggattgtttgagtttaggagtttgaagttgtagtgagttttgattgtattattgtattttagtgtgggtaatagagtaagattttgtttttataaaaaaaaaattaattaaaaatttaaaaaagaaattgttaaattattttttaaagtggttatgttattttgtttattagtagtatatgagagatatagttgttttgtatttttatattatttgtttggtattgttaggttaatttgtttttaagagatagggtttgtttagttttttaggttggagtatagtggtatgattatggtttattgtagtttggattgtttgggttttagtaatttttttattttagttttttaagtagttaggattatattatatgtgtttgttattatattcggttaatatttttattttttgtagagataaggtttggttgtgttgtttaggttggtttgaaatttttggttttaagcgatcgttttattttggttttttaaagtgttggtattatagttgtgagttattgtatttcgtttagttttaaaaaaaaatgtttagttattttaataggtgtgtagtgatgttttattgtagtttaatttgtattttttaaatgatttgtatttatttaaatgttgagtattttttatgtatttatttgttatttatatatttttggtaaaatgtttatttaaattatttgtttatttttttattgggttatttgtttttttattattgagttttttagagttttttatatgttttggatataagttttttgttatatatatgttttgtaaatattttttttttagttaataatttgtttttttttaagagtgttttttgaagagtaaatatttttaatttgagtaaaagtttaatttttatttatttttttttttgtggattgtgtttttggttttatatttaggaattttttttttttttttgagacggagttttgttgtgtcgttaggttggagtatagtggcgcgatttcggtttattgtattatatgtatatgtatgtatgtatgtatgtatatatatatatattatatatatgtgtgtatatatatatatatatatataaaataattgtttattagatgtataaattaatggaatagagagtttataaataggtatatttttttttatatatatatatttatatcgattatattatatatatgtgtgtgtgtatatatatatatatatatgtgtgtgtgtatatatatatatatgtgtgtgtgtatatatatatatgtgtgtgtgtatatatatatatgtgtgtgtgtatatatatatatatatatatgtgtatatgtgtatatatgtgtgtatatatgtgtatatatgtgtgtgtatatatatatacgtatatatatgcgtatatatatatatatggatttatatatgtgtatatatatatatatatatatatatatatatatatggatttatagtgtgtttttggataagttatatagtttttgtgtgttttaatttttttaagtataaaatagagataattatagtatataatttttatggggtttttatggattgagtgaatgattatagagtatttagtatggtgtttggtatatatatagtgttttttatatttttgaatttttttatttttatttagattggatttttattggaattaataaattttattattttattttatattattattatggaaatttaattgtggagatgaattttaatgaaaaatttgtattgtcgtttagtaagataataagatgtttatttttgttttttgttaggaaaataatgtttaatttggtttaatagttgtaggatattaaattgatattagacgaattataatttttgaaatttttttttgatttttttttttttttttgagatagaatttggtttttgttttttacgttgtagtgtagtggtgcgatttcggtttattgtaattttgttttttgggtttaagcgatttttttgttttagttttttaagtagttggaattataggcgtttattattatgtttagttaagttttgtatttttagtagagacggggttttattatgttggttaggttggtttggaatttttgattttaggtgatttattcgtttcggttttttaatgtgttgggattataggcgtgagttattacgtttggttattttttttgattttttaaagtatatttattattttttaaggattgtagtaagaaatagtttaggttagatacggtggcgtatgtttgtaattttagtattttgggaggttgaggtgggtggatcgtttgagtttaggagttcgagattagtttggataatatggcgaaattttatttttatagaaaatataaaaattagttgtgtatggtggtgtgtatttgtagttttagttatttaggagattgaggcggggaggattgtttgaacggtggaggtcgaggttgtagtgagttgtgagtgtgttattgtattttaatttgggtaatagagtgagattttgtgttagaaaaaaaaaatatagtttaaattaaatttattttataagtggtttttaggaaaaaataatttaaaatatgatttttttatgtttgtgattttagatattttattttagaattagtaatttgtaaaattacgaaggattttagttttagttgtttattattatttttttttttttaaagtgttagggttttgttttgttatttaggttggagtgtagtggtatgattatggtttattgtagttttgaatttttaggtataagtagtttttttgttttagttttttgagtagttaggattataggcgtatattattatgtttagttaagggtttttgtgtttttttattttttttttattaatttattttaaataatttgttaagttttaaaaaatttttttagagttaggggagtgttattgtgttatttaggttagttttaaatttttagttttattaggttattggtttatttttaagtagttgggattatagatgtgagttattgtgtttagtttttaatgttttttgttttgaaaaatttttaggaattgttgagaaagtatagtaatataaattttaaatttttttttggaaggtcgtgttgataatttaattaattttatattatagaattatttagttataaaatttttagttattagattaatttttttttatgagttaggaaaagtggagcgtttagagaaaatatttagggtagtaaattatatttaattttttagtattggtagttgttatggattgaatgtttgttaaatttatatgttgaagttttatttttttatatatggttgtatttggagatgggatttttaaggaagtaattaaggttaagtgaggttataaaggtagagtgttgatttgataggattagtgtttttataagaagatttagttagtttgtatttgtttttttttttttttttatatagaggataggtttggtgatgatatagtaagaggttggtttttgtagtttgagtagattaaaataggttgttataataaaatattatagattggtggtttaaataatagaagtttattttttatagttttagagtttgggaagtttaagattaaggtgttagtagatttagtgtttggtgagggttttttttttggtttatagatagttgtttttttgttgtgtttttatatggttttttttttgtgatttatttttttgttttattttttatagttattgaattattagtttgttgattttgtttttttagtattttttaaatttattttattttttttttttttattaattatagttttggttttagttttttttgtatgattataatagttttttcgattaatttatgttgtatgtgtttttattttattagagtaattattttgatatgtaaattttgtttatttaaatttttttgtggtttttttttgtttgtggataatttttaagttttatataatacggtttttgtttatttttgtagttttatttattagtattttgatagtatgtgtaatattaaattatttttagttttttttttattttttgaagaattttattttgtttcgtttgttatttttgtttggtatgggaagggagggttttttatttttattttttttatttaatgagttttagtttatttatttttatgttttgtagaattttcgttttatttttttttttcgttttagatgttttttttttgttttttttaaaatatttttagtattttttattatatggttaagttgtttttagtttagatgaatgtttatttttatggaaagagttggttttatttattttagtgtttaaaataatgtttggtttatattgggtatttaaatattggtagagtgattgaatatttagaaagttaaggggatttttttaagattcggttgtttataggggataaaattgggattggaaaatgagtattttttttattgttttatattgtagattagtgttttttttagtatagtatgtaaaattggttaagtataatatttattgtgtaattattaagttaatttaagtttatttgttaattattaagatgattaaattttgttttgtaaattaaatttttatatattgtatatatgggagtttatggtgtatgaatggttttgtatgaagtttatatagttataaatagttaaaatagttgaagtagataagaaagttatatggaagaaataaaaataggtttttagtgattatattttgataggttaggtaaaataaaaaaaattaatgtgatattttttaggtatattgtttaaaagattatgtgggtcgggttcggtggtttatatttgtaattttagtattttgggaggttaaggtaggtagattatttaaggttaggagtttaagattagttcggttaatatggtgaaattttatttttattaaaaatataatattagttgggtatggttgtatacgtttgtaattttagttatttaggaggttgaggtaggagaattatttgaattcgggaggtggaggttgtagtgagttaagattgcgttattgtattttagtttgggtgataagagtgaaattttattttaaaaaaagaaaaaggtcgggtacggtggtttacgtttgtaattttagtattttgggaggtcgaggtaggtggattataaagttaggagatcgagattattttggttaatatggtgaaattttatttgtattaaaaatataaaaataggggttaggcgtggtggtttacgtttgtaattttagtattttgggaggttgaggcgggtagattacgaggttaggagattaagattattttgggtaatatagtgaaattttatttttattaaaaaatataaaaaattagttaggtatggtggcgggtgtttgtagttttagtaattcgggaggttgagataggagagagtcgagtttatgttattgtattttagtttgggtaatagggcgagattttattttagaaaaaaaaatataaaaataaaattagtcgggtgtggtggtaggtatttgtggttttagttatttgggaggttgaggcggagaatggtttgaatttaggaggtggagtttgtagtgagttgagattgcgttattgtattttagtttgggcgatagagcgagatttcgtttcgaaagagagagagagaaaggagggagggaaggaagggaaggaagagaggaagggagggagggaggaaggaaggaaggaagtagcgaaggaagaaaggagcgaaagaaggagtgaaggaaggagcgagttatagtttggaagatttaagaatagaaatggttaaatttgaaaaattgcgttgtagtttaataaatgtttgaattaaatttgtttgtatttatatattgtgatttttgtgtttttaggtttttttgttttttgtagtatattgtagaaattagttggggtttagaaattgagattatatattgatttgaaaaaggatagagaaatatattttagtttgggtatatttttaattttagaattttattttattattattattatttttgggatagagttttattgtgttttttaggttggagtgtagtggtgcgatttcggtttattgtaatttttattttcgaggtttaagttatttttgtgttttagtttttcgagtagttgggattatagatatgcgttattacgtttgggtaatttttgtatttttaatagagacggggtttcgttatgttggttaggttggtttcgaatttttggttttatttgatttttttatttcggttttttaaagtgttgggattaaaagtaagagttattgtatttagttttagatttttttagaaattagaagttttaaaaatgaagtattaaaaaagaaaaagtattagaaagttgaaatagtaaggttatggttaagattattagatatataggatatgagttgaattttttatagcgtttttattaaaataattatttaaaaatatatttttgattttggtattttataaagtttagtatattttttatttttataaattttaaataggttaaaagtttattgataatattgatagtagtaatgatgatgtaggtgttatttgggttaagttatgggaaaatttaaattatagtgttatagaggttattttttagttttgtatgtttagaatataatttaatagtaaagagaggggatttgttttttgggaggtgtgtatgttgattaagattataggttttatattattattgagagaaataatttgttttgtttattttgttattgtgttttaaagttattgagattaagaatttatattttagtattaagaattgtgtttggtagttaatagttttttagttgatatttgttgaataatgttaataatatttaaggtttgtgttttgtttttgtagg

SEQ ID NO: 1972 - DNA, 21537 bp, Artificial Sequence
  chemically treated genomic DNA (Homo sapiens)
tttgtaggaataaaatatagattttgagtattattaatattatttaataagtattaattaaaggattattggttgttaggtatagtttttagtgttgaaatataaatttttaattttaatgattttgaaatatagtaataaaatgaataggataaattgttttttttaataataatataaaatttatgattttagttaatatatatattttttagaagatagattttttttttttgttattaaattgtgttttgggtatgtaaagttaaagggtagtttttgtgatattatggtttgagtttttttatgatttaatttaagtgatatttatattattattgttattgttaatattgttagtaggtttttagtttatttggaatttataaaagtaaaaaatgtattaagttttgtagagtattagggttaaaaatatatttttaaatgattgttttaataaaagcgttatgaaaaatttaatttatattttatgtatttaatgattttaattatgattttgttattttagttttttgatatttttttttttttgatgttttatttttaaaatttttaatttttaaaaaaatttgaggttgggtgtagtggtttttgtttttaattttagtattttgggaggtcgaggtgggaggattagatgagattaggagttcgagattagtttggttaatatggcgaaatttcgtttttattaaaaatataaaaattatttaggcgtggtggcgtatgtttgtaattttagttattcgggaggttgaggtataagaatagtttgagtttcggaggtggaggttgtagtgagtcgagatcgtattattgtattttagtttgggggatatagtgagattttgttttaaaaataataataataataaaataaaattttgaaattgggaatgtatttagattgaaatatatttttttatttttttttaaattaatgtatggttttagtttttaaattttaattgatttttgtaatatgttatagaaaatagaagaatttgaaggtataagaattataatatgtaaatgtaagtaaatttgatttaagtatttattaagttataacgtaattttttaaatttggttatttttatttttagattttttaaattatagttcgtttttttttttattttttttttcgttttttttttttttcgttatttttttttttttttttttttttttttttttttttttttttttttttttttttttttttttttttttttttttttttttcgagacggagtttcgttttgtcgtttaggttggaatgtaatggcgtaattttagtttattgtaagttttattttttgggtttaggttatttttcgttttagttttttaagtagttgggattataggtgtttgttattatattcggttaattttgtttttgtatttttttttttgagatggagtttcgttttgttgtttaggttggagtgtagtggtatgaattcggtttttttttgttttagtttttcgagttgttgggattataggtattcgttattatgtttggttaattttttgtattttttagtagagatggggttttattgtgttatttaggatggttttgattttttgatttcgtgatttgttcgttttagttttttaaaatgttgggattataggcgtgagttattacgtttggtttttgtttttgtatttttagtatagatggggttttattatgttagttaggatggtttcgattttttggttttgtgatttatttgtttcggttttttaaagtgttgggattataggcgtgagttatcgtgttcggtttttttttttttttgagatggagttttatttttgttatttaggttggagtgtaatggcgtaattttggtttattgtaatttttatttttcgggtttaagtgatttttttgttttagttttttgagtagttgggattataggcgtgtgtaattatgtttagttaatgttgtatttttagtagagatggggttttattatgttagtcgggttggttttaaatttttgattttggatgatttgtttgttttggttttttaaagtgttgggattataggtgtgagttatcgagttcggtttatataattttttaaatagtatgtttggaaaatgttatattaattttttttattttatttgatttattaaaatatggttattaaaagtttatttttgttttttttatgtgatttttttatttattttaattgttttaattgtttgtgattatataaattttatgtaaaattatttatgtattataggtttttatatatataatatgtaaaaatttgatttataaagtaaaatttaattattttaatgattagtaaatgagtttaaattgatttagtaattgtataatagatattgtatttagttagttttatatgttgtattaggaggaatattggtttgtagtatgaggtaataaaagaagtatttattttttagttttaattttgttttttataagtaatcggattttgaaaaaatttttttaattttttggatgtttagttattttattaatatttgaatatttagtatgagttagatattgttttaggtattaaaatgaataggattagttttttttataaaagtaaatatttatttaaattaaaaataatttgattatgtaatgagagatgttgagaatattttggaggggatagagaagggatatttggggcggggaagagaagtggggcggaagttttgtaaaatatgagaatggataagttagagtttattaggtaaaaggggtaggaataaaggattttttttttttatgttaggtaaaagtaatagacggaataaagtaaaattttttagggagtaggaggaaaattgaaagtagtttggtgttatatatgttattagaatgttagtagatgaagttatagaggtaggtagaaatcgtattatataaagtttagaagttatttatagataagagggaattatagaaagatttaaataagtaaaatttatatgttaggataattattttgatgagataaggatatatgtaatatggattgatcggagagattattgtagttatatagaaagggttggaattagagttgtaattagtagggaagaagaagatgggatgaatttgagaaatattgaggaaatagaattagtagattggtaatttaatggttgtaggaggtaaggtagaaggatgaattatagaggaaaggttatgtgaggatatagtaagaaggtagttgtttgtaagttaggaagagagtttttattagatattgaatttgttagtattttgattttggattttttaggttttagagttgtgagaaataaatttttgttatttaagttattagtttgtggtattttgttatggtagtttgttttagtttgtttagattgtaaaagttaattttttgttatgttattattagatttgttttttgtgtgaaggagagggagggagtaagtgtaagttaattgaatttttttataaggatattaattttattagattagtattttatttttatgattttatttaattttaattatttttttagaggttttatttttaaatatagttatgtgtaggggggtagggttttaatatatgaatttgataaatatttagtttataatagttgttaatgttgaggagttaaatgtaatttattattttaagtattttttttggacgttttattttttttagtttatagggagaaattaatttgatagttaaagattttatagttaaatagttttgtagtataaaattagttggattgttagtacggttttttaaggagaaatttaagatttatgttgttgtatttttttaataatttttgaaagttttttaaaataaaaagtattaggagttagatatagtggtttatatttgtaattttagttatttgagagtgggttagtggtttagtgagattaggagtttgagattggtttgggtgatatagtgatatttttttagttttaaaaaagttttttaaaatttagtagattatttgaagtgagttggtggaaggggggtaaaaaaatataaaaatttttagttgggtatggtggtgtgcgtttgtagttttagttatttagaaggttgaggtaggaggattgtttgtgtttgggagtttaaggttgtagtgagttatgattatgttattgtattttagtttgggtgataaagtaagattttgatattttaaaaaaaaaaaagtaataataaataattgaaattgaaatttttcgtaattttgtaggttattagttttgaaataaagtgtttagaattataaatatggaaaggttatgttttaaattatttttttttaagagttatttatgaagtgagtttagtttagattgtattttttttttttgatatagggttttattttgttgtttaggttggagtgtagtggtatatttatagtttattgtagtttcgatttttatcgtttaagtaatttttttcgttttagttttttgagtagttgggattataagtgtatattattatgtataattaatttttgtattttttgtagagatggggtttcgttatgttgtttaggttggtttcgaatttttggatttaagcgatttatttattttagttttttaaagtgttggaattataggtatgcgttatcgtgtttggtttagattattttttattataatttttaaaaggtaatggatatattttaaaaaattaaggaaagtggttaggcgtggtggtttacgtttgtaattttagtatattgggaggtcgaggcgggtggattatttgaggttaggagttttagattagtttggttaatatggtgaaatttcgtttttattaaaaatataaaatttagttgggtatggtggtgggcgtttgtaattttagttatttgggaggttgaggtaggagaatcgtttgaatttaggaggtagagttgtagtgagtcgagatcgtattattgtattgtagcgtggaagataagagttaaattttgttttaaaaaaaaaaaaaaaaattaaagaaaaattttaagagttgtaattcgtttgatattaatttaatgttttatagttattaaattaagttaagtattatttttttaatagaaaataaaaatgaatattttattattttattaagcggtaatataaattttttattaaaatttatttttatagttaaatttttataatgataatgtgagataaaataatgggatttgttaattttaatgaaaatttagtttgaatagaagtaaaaagatttaggagtataagaagtattatatatgtattaggtattatattaagtgttttataattatttatttaatttataaaaattttataagggttgtgtattataattatttttgttttatatttgagaaaattgaggtatatagagattatataatttgtttaaggatatattgtgagtttatatatatatatatatatatatatatatgtatatatatatatatgagtttatatatatgtatatacgtatatatatgcgtgtatatatatatatatatatatatatatatatatatatatatatatatatatatatatatatatgtgtgtatatatatatatatatatatgtgtgtatgtatatatatatatgtgtgtatatatatatatatatatgtgtgtatatatatatatatatatatgtgtgtatatatatatatatatatatatatagtgtgatcgatatagatatatatatgtaaagagagatatgtttgtttatgaattttttattttattgatttgtgtatttagtaagtaattgttttgtatatgtatgtatatatatatatatatatatatggtgtatgtgtatatatatatatatatatatatatatatatatagtgtagtgaatcgagatcgcgttattgtattttaatttggcgatatagtaagatttcgttttagaaaaagaaaaaaaatttttagatgtgaaattaaaaatataatttataaaagaaaaagtgagtggaaattggatttttatttaaattgaaaatgtttgttttttaaaagatatttttaagagaaggtaagttattaattgggaaaaaagtatttgtaaaatatatatataataggggatttgtatttaggatatataaagagttttgaaaaatttaataataagaaaataaataatttaataaaaaaatgggtaaatgatttgaataaatattttattaaagatatatggatggtaaataagtatatgaaaaatgtttaatatttaggtaaatataagttatttgggaaatgtaagttaaattataatgaaatattattatatatttattagaatggttaaatatttttttttaaagttaggcgaggtgtagtagtttatagttgtaatgttagtattttgggaggttaaggtgggacgatcgtttgaagttaggagttttagattagtttgagtaatatagttagattttgtttttataaaaaataaaaatattagtcgagtgtggtggtagatatatgtagtgtagttttagttatttgggaggttgaagtgggaagattgttggagtttaggtagtttaggttgtagtgagttatgattatgttattgtattttaatttgggagattgagtagattttgttttttaaaaataaattaatttgataatattaagtaagtgatgtgaggatgtagagtaattgtattttttatatattgttggtaggtaaaatggtatagttattttgaaaaatagtttggtagttttttttttaaatttttaattaattttttttttatagagatagggttttgttttgttgtttatattggagtgtagtggtgtaattagagtttattgtagttttaaatttttgggtttaagtaatttttttgttttagttttttaagtagttgggattataggtatatgttattttgtttggttatgtttatttattttgtagaggtggggttttattatgttgtttaagcgggttttgaatttttggttttaagcgatttttttgtttttattttttaaagtgttgtgattataggtgtgagttattgatttggtagttttttgtaaagtttaataaataatttttatatgattagtaattttatttatgagtatttatttaagtgaaatgaaaatttatgtttatttaaaaatttgtatataaatatttatggtagttttatttataattattaaaattggaaataatttaaatgttttttaattgatgaatggataaataaattgtgatatatttatataacggaatattatttagtaattaaaaaggaattttcggttgggtgtggtggtttatgtttgtaattttagtattttgggaggttaaggtgggcggattatttgagtttaggagtgtaagattagtttgggtaacgtgttgaaattttatttttattaaaaagatataaaaaattagttgagtatggtggtattcgtttgttgtttttattatttgggaggttgagatgggagattatttgagtttcggaggttgaggttgtagtgcgttaagattgtgttattgtattttagtttgggtgatatagtgagattttattttaaaaaaaaaaatttttgatatatgtaataatatggataaattttaaatgtattatggttaagtgaaagaagttagatttaaaaggttacgtattgtatgattttatgtatatgatatttttaaaaagataaaattatagggatagaaaatttattaggagttgggagtggggttgattataaaggagtaaattgattatataaaggaagaatttttgggggcgatggaattattttatattttgattggtgatagttttataattgtatttatttgttaaaatttatagaatcgtatatttaataagggtaaattttattgtatataaattatattttaattaaaataaatatttaaagtttaaatattgttaagttagttttagggttagatagttatgtagttgagaggttattttataaatgaaaatattagtgttatataattatagaattaatagtgttgaaatataaatttttaattttaatgattttgaaatataataagaaaatgaataggataaatagttttttttaataataatataaaatttatgattttagttaatatatatattttttagaagatagatttattatttttgttattaaattgtgttttgggtatgtaaagttaaagggtagtttttgtgatattatggtttgagtttttttgtgatttaatttaagtgatatttatattattattgttattgttaatattgttagtaggtttttagtttatttggaatttatataagtaaaaaatgtattaagtttttatgaatagatattttttaaaagaagatatttatgtaagttaatagatatatgaaaaaatatttattatttttggttattagagaaatgtaaattaaaattatagtgagataattattttatattagttagaatggcgattattaaaaagttaggaaataataggtgttggagaggaggtggagaaataggaatatttttatattgttggtgagattgtaaattagtttaattattgtggaagacggtgtggcgattttttaaggatttagaattagaaatattatttgatttagttattttattattgggtatatatttaaaggattataaattatgttgttataaagatatatgtatatgtatgtttattgcggtattatttataataggaaagatttggaattaatttaaatgtttattaatgatagattggattaagaaaatgtggtatataaatattatggaatattatgtagttataaaaaagaatgagtttatgttttttgtagggatatggatgaagttggaaattataatttttagtaaattatagtaaggataaaaaattaaatattgtatgtttttatttataggtgggaattgaataatgagaatatttggatataggaaggggaatattatatatcggggtttgtcgtggggttgggggaggggggagggatagtattaggagatatatttaatgtaaatgataagttaatgggtatagtatattaatatggtatatgtatatatatgtaataaatttgtacgttgtgtatatgtattttataatttaaagtataataaaaaaatttttttaaataaaaaaaatgtattaagttttgtagagtattagggttaaaaatatattttttaaatgattgttttaataaaaggggttatgaaaaatttaatttatattttatgtatttaatgattttaattacgattttgttattttagttttttgatatttttttttttttgatgttttatttttaaaatttttataaaaatttttgaggttgggtgtagtggtttttgtttttaattttagtattttgggaggtcgaggtgggaggattagatgagattaggagttcgagattagtttggttaatatggtaaaattttgtttttattaaaaatataaaaattattttgtattttgagtttatatagtataagtttaagattagtattttgagtttatatattattgatgattcgagaaattgaagtattatatttatattagtttattattttgtgaaatatataataataaaatagaattatgaaattttaggattgaaaagattttttatattatttaatttaatttgaatttatttttatattttattatattttttttgtttatttagatttgtttgaatgtttttagtaatgtttatttttttttatgggttgtttaaagaatttaagaattggaagggattttaggaaattgagggttaaaagttaaattagtttattagtgaggtgtagttaggtgtagaatataaattaaaattttagttttatatattttttattttttatgttttttatttttattaaaattttatatgggtgaagaaataatatttatatattgttggtggaaatataaatggtgtaggtattttaaaaaattgtttagtagttttttaaaaagttaaatataggttagtcgcggtggtttacgtttgtaattttagtattttgggaggttaaggtgggtagattacgtagttaggagatcgagattattttggttaatatggtgaaatttcgtttttattaaaaatataaaaaattagtcgggcgtggcggcgggcgtttgtaattttagttgttggggaggtcgagataggagaatggcgtgaattcgggaggcggagtttgtagtgagttgagattatattattgtattttagtttgggcgatagagtgagattacgttttaaaaaaaaaaaaaaaaaaaagttaaatatagagttattatatgatttagtaattttaaatttagatgtgtatataatagaaatgaaaatatgtttagataaaaatttgtatataaatgtttatagtattattatttataatagataaaaagtagaaataatttaaatgtttattagttgatgaatagataaataaaatgtggtatatttatataatagaataaagttttgatatatgttacgatatggataaattttaaaaatatgttaagtgaaagatgttagttataaaaggttaaatattgtggttttaatgaagtgaaatgtttaaaataggaatatttatagagatagaaaataagtttgtggtttttaggggttcggagagacgagaatggggaatgattattaatgggtatagggtttttttttttagggatgaaaatgttttaaaattagattatggtgataagtttgtgaatttattaaaaaatattgaattatatattttatttttaaattaaatttattttaaatttttatggatatataataatagtagtatgtatttatggggtatatgtgatatttttatataagtatataataatgtaatgattaaatatgggtaattgggatatttattattttaaatatttattatgtttttgtgttgggaatattttatatttttttttttagttattttgaaatatataataaattattattaataatagttggttgtggtgggtagtggggaggagaggatgaagagtggttggttaatgagtataaaaatatagttagacggttaggtattgtggtttatgtttgtaattttagtattttgagaggtcgaggtaggtagattgtttgcggttaggagtttcgagattagtttggttaatatggtgaaattttatttttattaaaaaatataaaaattagttgggtgtggtggtacgcgtttataattttagttatttgggaggttgaggtgagagaatcgtttgaatttaggaggcggagtagtgagcggagattatattattgtattttagtttgggtaatagagtgagattttattttaaaaatatatatatagttagatagaatgaattatatattttaaatgggtgaattgtatggtatatgaattatatttttaaaaagttatttttaaaattaataaataaagaattagttatattttttaaataattttatatagaggatttaaaatttattggtaaattttttgatattttttttattgagaggttatttttttttggaattgggtgggtatttgtgattgttttagtattatttttgttatatttaaattaagtttaattaagtgatttaagaatttatttaataagttagttagaaaaaaattatgtagtttttgttagttttttttaggatgtttgtttttggaattttgttattatattgtaaggaagttaggaatatatggagaggttttagttgagtttttagtttaaagttagtattaatttgttagttagttatgtggttaagttattttgaaagttgttacggttgatgttatattgagtagagttaattttgtttaattttatgtaaattaaagagttatgaataaaatatttgttattattttaaattattaagttttagggtggtttggtatatagtaatgggtaattagaatattttttatatttaaaagaaggttaaaaatagtatttagtttttttttatttagtgtagatatttttttttagtagattattattttaattgtttgataattttgattaatatggagattaggtttttaacgaagttattttttttattgatgattaattttgggaattatgatttgttttatgttaaaattagttttgttatgtttaatttttggtttaagttttttttttagaggtgattattattgtttaaattttttttttaggataggtttttattttattaaatagtagagaaatttttagtattgttttattatatagttgaggaatttgaagtgtataaattggttgttttatttaaagttatataatagatattcgaatttttggtataagatttttgtttagtattatttttattgaatatgagataaatataatagatatatgtgttgtttttatttaaattataatttttatatttaagttataattgtttagagttaatttttatttttattatttaggaggaaaagtatgggtatgaatattggaagatgaaaattattttttcgtattatttttttttattttatatgtatttaaatgttttttgttttaattttagaaagttagtaaatttttttagggtagggataagttttataattttgagatttatttggtgtttgagtatatatatattgaataatttgtttatttatgggtggtagtatatagataaggataaaaatattttttttgaaataatttaaatataagttttataatttaaaaatattttttattatattagtgtaagaattgtaatttttttttttttttaaagttagtagtaatagaaaatgagttttttatattgttgattatagtatgttagttgttatgataatgtttagtttttagatattttttttaaatgagataattttttttagttttagttttttaagattgatttaattatataatttaaattttaaaatttaaggggtgttttttaataaagatattttgggttgggagcggtggtttacgtttgtaattttagtattttgggaggttgaggtaggtggattatttgaggttaggagtttaggattagtttggttaataaggtgaaattttgtttttattaaaaatatataaaaattagttaggcgtggtggtgtacgtttgtaattttagttatttaggaggttgaggttggagaatcgtttgaatttaggaggtagaggttgtagtgagtcgagatcgcgttattgtattttagtttgggcgatgatagagttagattttattttaaaaagaaaatattaaaaaaagatattttgattatataatttaaggaaaaatgtaaatatttttttttaagttgtaaggaaattttttaggtaatttattttgtttttatatgtaaaagttttataagttgaatggtaattgtttgatataattttaaaattgtatatgttataatttataattatattttagaagtttaaatttttaatataaattatttttattaatatgtatgtattatattttatttatgttttttgggttgtatttgtaatttgttttttttaaggtataattgaaattttttaggagtaagtaaggttatgtttagtaaacgtattattggattaatatagaatatttgtatattagtttaaattaattttacgggaggtaaggaattaggaaaaaatattttatttatttattttttttttttggaaatagggttttattttgttgtttaagttggagggtagtggttcgattatgatttattgtagtttttaagttttaggtttaggtgatttttttattttagtttattgagtagttgggattataggtgtgtattattatgttttattaatttttgtatttttagtaggaatgaggtttcgttatattgtttaggttggtttggaatttttgggtttaagagagttattagttttggttttttaaagttttgggattataggtatgagttattatgtttggttttagaaaaaaatattttaaattgtataaaatttaataagttattaaaatgaggtaatttagaaagaatttttagtaattttaaaagaaaaaaaaattaaaaagaaaaagttatgttgggaaatgtggtatttgtattgttttaaaatgtaagttggtaattttttttaatagtttaaaatattttaaaattggggttttttttagaatgtttatttggttagaaatttttattttgattggttgagttgattaagattttaatttttattatatatatatttagaagtatgagtttattttatatatttaataatattttttataattttataattatagaatttagtagtgtttttaaaaaaaaaggttttttgtaagtttaaaatagtttttataattgaaagtttattatatatttatttgtggggaaaaagtttagatgttggtgtttaatgttatattttttaatgtatttatttagttaatgggtaaaagaagaaaaaaaattataggatatatatatttatttaaaagaaggattaatatgagaagttttaattaatttgaatattatgttaataaatattaattgtaaaataatttattgtgaaacgatgagttataggtagttaagattattataaataaaaaaggtattttatttagtttagatttagtttgagtttaaaagaaaaaattaaaataaaaatgaaatatgtaattttttttaaggtagataatttaagttaaaagaatattgttagaaagttaaaggttgaggaaaataatattttttaaaaatcgtttattagataattttaaatggtaggtgtaatttttttgtgaaatagaaagtatagtattttttttttttatattataaaatgttattatcgagtatgattaatagagaataaaggtattatgtgatttaagaagggtgtgtatgagaagtaggggtagaaagacggggttgagaaaagttgtaaaaagtttttaattttttaattttgatttttagagattagagtttatttgaatatattttgttggggattggaaattatgtagaaaggtttgtgattttaaaacgttaatatatttattataaagtaattttgggtaaagatatgttgttttaagtaaagagttaattgtttataatatttatttgaaaaattttttattttgtttgggagaaataattgataagtttattaaagtagtttagtaagtataaatggagaattatgtagaaagaggaattattatgaaatgtatgatcgagtgtgttttgtgtaagattaatggaggtttttaaaggtttttcgtttttggttatatataaaaataaaaataagggcgtttttatttatttaaattagtagtaaaatattgtttggtttatgtcgtttatttttattttatagttttaatatatattttaagattgatgcgatatttattatttttttcggataattggaagaggagggggagtaaagttgtatattaaatagtttatttggtaattgagaaaatttagtagtgaaatatattatgaggtattaaagagatttgtcggggagggtagataaaagagaaaatagttatagaatattaagtttcggaagagatgagaatcggttttatatacgtaattcgacgattggataaaatttcgtttgacgttgtcggtgggtgaaacgaggtgatttgagatttagggcgttttcggttttttttttttttcgaatcgattatttttaataggaagttagagtaaggtagggttcggagttagagaaagttttcgggggagtttgtttattacgataataaatttttaaggtttttttcggagttttatagttttttgggcggtttttttagcgttgtattttacgttttcgttttttaaaaaagtcgtgtatttcgattttagttattcgcgtttaagagagtgcggtagtagttgggtcggtttttttagcggtttcgggtcgtaagggatttggcggagcggtttagggaggttgagacggcggttatacgatttttattattttttcgcgttgattttagttgtattgttttggtcgttttttttcgttttcgggtcgcgattttttgttagtttttcgttttttggagaagaagtagtttatggttttagttcgcggagttcgttggttagtttattagtttaggtattttttagagtgtggcgtgaattttgggaatttcggtttcgtagtttttcggataacgtttcgcggaatcgtttaacggttcgtagttttagtttgttcgttaggtttagtatttttttttttttttcgtcgttttgacgatttagcgtagttaatgaacgtttagcgtttgttgagttaattaaagtttttcgagtaattttgcgcggtttatgaagagaggtcgatatatttatatattaatttacgtttggtttttgcgatagtttttggcggcggggcgggtcggttttggcgtaagtacggataatttcgtttatagttgtggtacggatcgttttcggtttcgttttttttggaatttggtgggttttttagttggtgggaggttaggttcggtattcgggttttttttgtttttgatttataaatttgtaagtttaaggcgcgggagagatttttagttgaatattagatttattttatgatgaaagttgtgagggatagaaattttcgttgatataagaagattttgaaatttgtatttttaaatttttttttttttttattattttttttatcgtttttttatcgtttggttagggttatttttttaagaattgtattttataattttttaatttttttttgtgtttttttttttttttttttttttttttttttttttttttttttttttttttttttttttttttttttttttttatagggtttcgttatgttatttaggttgtagtggtataattataatttattgtaattttgtaattttgtaattttgattttttgggtttaagcgatttttttgttttagttttttttttgagtagttggaattataagtaagtattattatgtttatttatttttttttttttttatttttgtagaaatggggttttgttatgtcgtttaggttggttttgaatttttgggtttaagcgattattttgttttagttttttaaggtgttgggattataggtaggatttatcgtattttaggttgtttttgtgtttttttaagatttttatatatggttttaaaattgtataagtatttagtaaaatagttaattgtgtattgtttttttatttgaattgtgatttttttgagattaaaaaggtatattttttttttttttttttttttttgatggagtttttgtttttgtcgtttaggttggagtgtagtagtgttatttcggtttattgtaattttcgtttttcgggtttaagtgattattttgttttagtttttagagtagttgggattgtaggcgtttgttattacgttcggttaatttttgtatttttagtagagacggggttttattatgttgggtaggttggtttcgattttttgattttaggtgatttgttcgtttcggttttttaaagtgttgggatgataggtatgagttatcgcgtttggtttaaaaggtatgttataaagggtatgtagggtcgggcgcggtggtttacggttgttattttagtattttgggaggtcgaggcggtaggattatgaggttaggagatcgagattattttgtttaatatagtgaaatttcgtttggtgaaatttcgtttttattaaaaatataaaaattagtcgggcgtagtggcgtgtgtttgtagttttagttattcgggaggttgaggtaggagaattgtttgaatttaggaggtggaggttgtagtgagttaagatggcgtcgttgtattttagtttgggcgatagagggagattttgtttaaaaaaaaaaaaaaaaaaaaaaattagagtcggggggggcgggtacggtggtttacgtttgtaattttagtattttgggaagttaaggcgggcggattataaggttaggagttcgagattagtttggttaatatggtgaaattttatttttattaaaaatataaaaattaatcgggtatggtggcgggcgtttgtagttttatttattcgggaggttgaggtaggagaatagtttgaatttagaaggcggaggttgtagtgagtcgagatggcgttattttattttagtttgggcgatagagtaagatttcgttttaaaaaaaaaaaaaaaaaaaggtagtggggaggaaagttgaggggagggatgtatttttgaattttttatatttggtttaagtttatattaggtgtttaatataacgtttgttaaatgaatgaatgtatgtatgggtgttagtgaaggaagtatttataaattttttttatttttttttaaagaaagtgattaaattgtgggggtgggaggtatgtggatttatggtaaaggggttttttttatggagtttatagtttcgttgaggatataagtattgtatatgaacgattagatttgttttaagtaaatggtatagggttcgttagaatatatttaaagatatatatattaaatataaatatttgttatatttgggtcgaattttattgtaatatatatgtattgtttatgtaatagaaaagaaaggtaagttagtttttttgagaaatagtattttgatattttagtaggatattaaatgttgattattttaggtttaaatttggttattttttaaattttttatatttatttatatttagtttgtattttaaatgagtttttgatttttttttttttttttttttttgagatagagtttcgttttattatttaggttggagtgtaatgatatgattttagtttattgtaatttttattttttaggtttaagtaatttttttgttttagtttttcgagtagttggggttataggcgtataaaattatatttggttaatttttgtatttttagtagagacggggttttattatgttggttaggttggtttcgattttttgattttaggtgatttatttatttcggttttttaaaatgttgggattataggcgtgagttatagtgttcggtcgatttaatttgaatataaagaatgtttttttttttatttttcgttttttattgtataatcgggaagaaaagtatatgtgtttaagtattagaaattattgtaaatttaagttttagattttaggtaatagagtttttatttagtgtatatttttttttttttagagtgagatgaaagttttatgtgaagatgtttttggataagatttttattcgatattttataatttattattatatttataatttatggtttatgattataaaatatttgtgattagatataaatatataattatgattattatttagtgtagtagaggaggtagagatttagagaggtgaagggatgaatttgtggttacgatgagagtggttgagtagggattggaaaaatttatattttgtgttttttagtgtttttttttgttttaagtttgtttttttttaatttatttgaaataagtatttgtttcggttttttgatgtttatgggagttttgttttatagtgatgttattttttttaatgaataaataatataataaaattaattttagagaaataatttttgaaatttttattgttttgaagtatttattaatgagaaaagtttaaatttataataaaatttatatttaagagtgatttttttagggatttttaaaagtgaagataaagttttttttttgtttatttttattttattattatttttgattaaaaataaaattataaaaagaaaattaaattaaatgttaagaattggggattagaaagttaatgaatagagttaatattagtgttgttttatttttttttttttttttttatttttttttttttttttgttttattttttttttatttgtttttatgaatttttattattatttatttttgtaaattagttttttatttatttattagtatttatatggttgataatagttattttattttgattttttatggtttttttgtttaagggtatgttatagttttagatttttaagggagataattatatatattgttggttagttaataatagattggttttaggttggtatgtatttttggttttattgttgtagttgtaggggcgaattttaaatatgggtgttatagatatgggtgggaagtaggttttgaaaagggaacgttaattttgaagagtttaggtagaagttggttgtttgttttgtttgtgttttttttgttatttatattttagtgattttttttttatagaaggttgttttttttgtttagtttgatgtatttatttatttatattaaaatgttgagttgtgggtttatatttggttataagttttagagatggttttgggttttttgagttttgattatagaagtgatatagttattttttagaagatagttttggtcgggtacggtggtttatatttgtaattttagtattttgggaggtcgaggtaggtggattatttgaggttaggagtttgagattagtttggttaatatggtgaaaatattaaatatattaaaaatgtaaaaattagttaggcgtggtggtgcgtttttgtaatttcggttatttagaaggttgaggtgggagaattgtttgaattcgggaggtagaggttgtagtgagttaagatcgtattattgtattttagtttgggtaatagagtgagattttattttaaaaataataataataaaaagatagttttgaagtagtgtatttttatagtatgaataagttaattattttagtaacgatggttggaaaattttttatgtttgagttgatttgatatatttttgtttattttgtatttatttaaggaaatattttatattaagtgaaagaggagtgttttagttatttattgttgagtaataaattatttgaaacgtaatcgtttaaagtaataataatttaatattttttttatttatgaattttggtggggataatttaattttgttttatagtatatttggagttttagttgggatgatttaaatggttggggtgttggttaagaattattttatatgaaattttagagtttttttatttagttttttttgtaaggtggttttagggtatttgaattttatatattatgtttagggttttaagagtgagtgttttat

SEQ ID NO: 1973 - DNA, 5511 bp, Artificial Sequence
  chemically treated genomic DNA (Homo sapiens)
aataaattttgtttaggtgtagtttttttgggaaagtttagttgaggttgttagttttggaaatttaggggattgggatataggttatgggagttatttggggttatgtataaatgggatggaattttttataaagtgtagtggtaattgttttagcgatttttttggtgtgttttgaaacgtataatgtattttatatttatttaggttttttttgggagtaattttttgtgtagggatttttttgtgggtagtttttggggggtttttaaatttggttttttggtttgaataaaagatggtagagagagagggagagagagagagaattttggattagagggtgggtatttatttaattttattaaaaagtttttgattgttttttagaaaggttgtattagtttttatgtattttaaggaaagtatttttatttagttatatttttattaataaatggttttatttaattttttattgttgttagtgttttaggtgtagggttgtgttttaattttattttaataggtatttttttgattattagcgtatgagtgtttttttatgagtttggtagttatttgggtttttttttttgtgatttatttgttttaattttgtgttagttcgttggtttttgtttggttattttatttttttttttttttttgtttgtgataattagtacgttaggttgggttaggttaggaattattgagttttttgggatggttttgttcgtttttgttttgatttattatttgaatgttatagtttaatgtttaggaggtgagggtattgtttttgtttttaagttttttggtgggggagtatttgaggattttttttttaggaaatatttatattttttttgtatttagtagtttttattttttagtaatagagaatatttaatgttaggtattaggtaaggtttattttattttttttttataattatgttggagggagggattgttattttgttggagagatagataagaaataggtatgtaaaggttaagtagaatgattaaggttatgtaatttgtaagagattttattaggatgttgtttatagtttaaattgttagtgtaatttttagtaatgtttattttaaataattgttatgttttaggtggttattttttaaatagaatttagaaattattatttttaattattgaaatgtaatgaaaaagtaaattcgggtattatttttgtatttttttagtttttagtgtttaaaaaaggtgtaagtgagtggagggagaggagggagagttatttttttttagagaggaagtaattttagaggaagtaatgtttttttgagggttatttaaaggaggaagtgaagtaaaaaggagaagtaatatttttatgagggtttataagggaggggtttgtttgatgttggatagtatgtttttttttatgaggaaataattagaaaagaagaggaagcggaaagaaaatgtgtaaaggttttggggtagagaaatgttgagaggaattattgtggttagagggggaaggcgagggttaagatgtttgagaagtggtcgtggaggttttttaggttggaatggtaggatattgagtgtatatgaagatgtttcgagtcgtttgagatttttaatttttatgttttttattttaaagtttatttggttgatatggatttgggtggggatatgtatatgtttttgtatggttttttttttttatagttttttatttttttttgggtaaagaaaggttttttttttatttaatttgagtttgattttttttttgtatatagtgttttgaggtataaaaatattttcggtattaaatagagatatttttggtgttttttttagtaagattttaaaaattttttttttatttattttttaagtaatgtatttttaagataatttttttttttatgtttaataattatttattagaatatatatttgtgtatgatgttttgattatttaaatattattaattattgttataattatataattttaaagagaattttagagttttattaattaattattaattaatttttgaggtagggttttgttttgttgtttaggttagagtgtagtggtgtgattatggtttattgtagttttgattttttgggtttaagtgatttttttattttagttttttaagtaattgggattttaggtgtgtattacgatgtttaattaaattttaaatttttttgtagagggttttattattttgtttaggttggttttaaatttttggttttaagagatttttttattttagtttattaaaatgttgggattataggtatgagttattgtgtttaaatttttttttatatttttaatttttgttttggatttagggggtatatgtgtagggttgttatattggtatattgagtgatgttgaggtgtggggtatgattgattttgtttttttggtagtgagtatagtatttaagagttagttttttaattttttttttttttttttttttttttttttagtagtttttattagggtttgttgttgttatttttatgtttacgtgtagaaaattttaaaaagttaatgtatatttatatatttattgtggtttatataatagataggtgatgaatatagaatttaaataataaaagtattagggtaggatataattttgttggaaaacggaatggaaatatatttaaaaggggtaaagaatataatgtaaatattttgattgttaaagggatatttgtttatatttttaagtataatatggtagttttgtatttttatataaatttttttgggtatatttaaaagagagagataattttatatataaaggttaataaatataatatattttatttaaatatatgattaaaaaatttattttagatgttaatttgaaaatgtgtaaggtaaatatattgttaaatattttttagggggttttaataaaaagtttgttataggttatagtgttttaggggtggtgatagtgattcggaggcgggaacgtcgggttggtattgtttttggagttatttatatttagttggttgggttggagtttggtgtggtttttagtgtttattgttatgatgttgttattaggttagaatgttagtagggatttgtttaggttttattgtttttttagtattaattatagtgtttggtacgtagtaagagtttaatatatatttagcgtatgaatgaggggtcggtatttacggagtttttattttgtgttaggtattgtgttaagagttgtttatgtatttttttggaatttttataattacgttgtagtaggtttagtgagtatttttattttagagatggcgaaattaagttataaagaggatatataattagtttaaggttattagttaaggaagtagtagattgggatttgggtattttggtaggtattttttattataatgtttttttgtttttatgtggtttttggggtagagtttgtatttttgggttttgaaattttagagtaagtattttggggtattttttgagtgatatttttttgttattttaaacggttttttgttatttgttttttttttttaagtggttttttttttgttttttttgtttaatgtttaagttgtgtatattttgtgatattttggagatttatgtttttgatttatttatttatttaattatttttttttatatatggggtagtaatgagaagtatagggggtttttgtaagggagtagggaggtggagagagcgggggtagttatatattatattgttgtttttagtggttttttgttgttaataagttaatattaataaaataaggttatttttttgttaagagattgtgatagggtaatatttattttaggtagttttttaagaaaatagtttttgtttttacggttttttcggagggtttgtagagttttagcgatgttagagggtatttgtttgttttttttttgtttataaaagggatttggaaattaaaggtaggtttttagtttttagtagtgaggatgatagttttgtattagttatacgtaggtttttggttttaggaattattttttatttagacgtttaggtatagtatggtggggagagagtataggatatagggtttaggtttgttgtttcgtttatagttcgttttttagttttttttttgaggttaggtgtatttatttagtttttagggttttttgtttaggtggttttagaggtttaaatttattgtttttattttttgagatttgggatttttatttttttaatttttattatagggcgatattgaaaagtgtttttttttttttttcgtttttaagttattagtttgaggatgtttaaggtttaaaggttttttcgagtggtatttcgtatcgggttgtagaggtcggagaggggaggggatggtgggtgtaaagggtggtttttttaggaaagggaagtttgtttttggtttttagtatttgttatttttggcgattttatttcgcggttattattttcgtttttacggtttattttagggatattgaggtttaaagagttacgtgatttatttaaagtagttcgagttattatttggagttataagaaagttttggttcgtgttttttcgttttggtttttggttttttatttttcgtttaggttttttgatttttttttttttgcgtttttgttttttttttaggtttgggtttttaaggtattcggttacgcgttgggttcggggaagaggcgcggtcgcggtcgaggcggggatagggaggcggtagttttttttgcgtagcgacggcgcgggcgggaggaggtcggggcgttttagtttttcgttttcgtttttttcggtcgtgacgttagagtcggacggggtaaattgagcggcggcggcggggcgttggggcggagattgcgattcggagtcgttcggattgacggagtttattgcggtgcgggcgttggcgcgggtacggaggattcgggtaggtatcgtaagcgatttcgaggtaatacggtttcggttttttgttcgtagggcgcggtgtcggaggggagcgggttcgggggaggtagggaggtagggaggtttttagagttacgcgggcggggttgcggggatttcggggtagtcggggcgtagggcgtagggcgtaaggtgtacggggtcgagcgtgtagtttgggaggtggtatagttgggggcggcggggattagggtagcgttttgggggttttaggttgggtttttagattgggttttcgacggcgttcgcgggcgttttttttagggagcgcgggttttcgtggggacgcgttcgaggtaggtgagtcgaggttggggcgttcgggggtgttttcggatgtcggtgcgcgcggttttttgattcgttttttcgcggtttgggggacgggagaatggggggttttcggtcgttttgggtttttatcgcgtatcgcgttcgtagt

SEQ ID NO: 1974 - DNA, 5511 bp, Artificial Sequence
  chemically treated genomic DNA (Homo sapiens)
gttgcgggcgcggtgcgcggtgaggatttaaggcggtcggggattttttattttttcgttttttaggtcgcggaagggcgggttagggagtcgcgcgtatcggtattcggggatattttcgggcgttttagtttcggtttatttgtttcgagcgcgtttttacgagagttcgcgttttttggaaagagcgttcgcgagcgtcgtcggggatttaatttggagatttaatttagaatttttaggacgttgttttgattttcgtcgtttttaattgtgttattttttaaattgtacgttcggtttcgtgtattttgcgttttgcgttttgcgtttcggttgtttcggggttttcgtagtttcgttcgcgtagttttgggggtttttttgtttttttgtttttttcgggttcgttttttttcggtatcgcgttttgcgagtagggaatcggggtcgtgttatttcggggtcgtttgcgatgtttgttcgggtttttcgtgttcgcgttaacgttcgtatcgtagtgggtttcgttagttcgggcggtttcgggtcgtagttttcgttttagcgtttcgtcgtcgtcgtttagtttatttcgttcggttttgacgttacggtcggagggagcgggggcggggggttggggcgtttcggttttttttcgttcgcgtcgtcgttgcgtaggaggggttgtcgtttttttgttttcgtttcggtcgcggtcgcgtttttttttcggatttagcgcgtggtcgagtgttttggggatttaggtttggggaagaggtaggggcgtagagggaaagaggttagagagtttggacgaagagtgaagggttagggattaaggcgaggaggtacggattagggtttttttgtggttttaagtggtggttcgagttgttttgaataaattacgtggttttttgagttttagtgtttttgaaatgggtcgtgaggacgggaatgatggtcgcggggtgagatcgttaggggtgataggtgttgggagttagggataggttttttttttttgaagaagttattttttgtatttattattttttttttttttcgatttttgtagttcgatgcggggtgttattcggaggagtttttgagttttgggtatttttaagttggtgatttggaaacgggggggggaaggggatattttttagtgtcgttttatggtgggagttggggaggtgagggttttaggttttagaaagtgggagtagtgggtttgggtttttggggttatttgagtaggggattttggaggttaggtgagtatatttggttttagagaaagggttagggggcgggttgtgggcggggtagtaagtttaggttttgtgttttgtattttttttttattatgttgtgtttgggcgtttgggtgagaggtggtttttagagttaggggtttgcgtgtggttggtgtagagttgttatttttattgttaagggttaagagtttgtttttgatttttaggttttttttataagtaaaggagaaataaatagatgttttttgatatcgttggagttttgtaggtttttcgaggggatcgtgggagtaagagttgtttttttgaaaagttatttagaataaatgttattttgttatagttttttagtagaagagtggttttgttttattaatgttagtttgttgatagtaggaggttattgagaatagtagtgtgatgtgtggttgttttcgttttttttatttttttatttttttgtagagattttttgtgttttttattgttattttatgtgtgagaagagatggttgaataggtaagtaggttaggaatatgggtttttaggatgttataggatgtgtataatttaaatattaaatagggaggatagaaggaaaattatttaggaggaggaagtagatggtagagagtcgtttaagatggtaggagggtattatttagggagtgttttagagtgtttgttttggagttttagaatttaaggatgtagattttattttagggattatatggggatagagaggtattatggtaaagggtgtttgttaggatgtttaggttttagtttgttatttttttgattggtggttttgggttggttatgtattttttttgtggtttagtttcgttatttttggaatggggatatttattggatttattgtagcgtggttgtgagaattttaggggaatgtataggtagtttttagtatagtgtttggtataaagtgagagtttcgtaagtgtcggttttttatttatgcgttgaatatgtgttgagtttttattacgtgttaggtattatggttaatgttggggagatagtaaagtttagataaatttttgttgatattttgatttgatagtagtattatagtagtgaatattggaagttatattaaattttagtttagttagttggatgtagatggttttagggataatgttagttcggcgttttcgttttcggattattgttattatttttagagtattatggtttataatagattttttgttgaaattttttaaaaaatgtttaataatatgtttgttttatatatttttaagttggtatttaaaatgagttttttaattatatatttaaatagggtatattgtatttattgatttttatgtataaaattattttttttttttaaatatatttaaaggaatttgtataagaatataaaattgttatgttatatttaagaatataaataagtatttttttaatagttaaaatatttatattgtgttttttattttttttaagtatgtttttatttcgttttttaatagaattgtattttattttaatgtttttattgtttaaattttgtatttattatttatttattatgtgaattataataaatatgtgaatatgtattagttttttaaaattttttatacgtggatataaagatggtaataatagattttggtggggattattaaaggggaaagggagggaggggggaaaaggttgaaaaattaatttttgggtattatgtttattattagggggataggattaattatattttatattttaatattatttaatatattagtgtaataattttgtatatgtattttttgaatttaaaataaaagttgaaagtataaaaaaaagtttaggtatagtgatttatgtttgtaattttagtattttggtaggttgaggtgggaggattttttgaggttaggagtttgagattagtttgggtaagatagtgagattttttataaaaaagtttaaaatttagttgagtatcgtggtatatatttggggttttagttatttggaaggttggggtgggaggattatttgagtttaggaagttaaggttgtagtgagttatgattatattattgtattttagtttgggtaatagagtaagattttgttttaaaaattaattaatgattaattaataaggttttaaaattttttttaggattatgtgattataataatgattaatggtatttaagtgattaagatattatatataaatatgtattttgataaataattattaaatataaaaaggaaaattgttttaaaagtgtattatttaagggatggatagagaggggatttttggagttttgttgaaagagatattaaaagtgtttttgtttggtgtcgaggatgtttttgtgttttaggatattgtatataggaagggggttagatttaggttagataggaagggagtttttttttgtttaggggaagatgggagattgtggagaggggaggttatgtaggagtatgtgtatgtttttatttaggtttatattagttagataagttttagaatggaagatatgaaaattgagggttttaaacggttcgggatatttttatatatatttagtgttttgttattttagtttgaagagtttttacggttattttttaaatattttagttttcgttttttttttttggttatagtggttttttttagtatttttttgttttagggtttttgtatatttttttttcgttttttttttttttttagttatttttttatggaggaaagtatgttgtttagtattagataggttttttttttataaatttttatgaaggtgttattttttttttttattttatttttttttttgagtaatttttaaagaaatattattttttttagagttattttttttttagaggaaagtaatttttttttttttttttttatttatttgtattttttttagatattggggattgaggaggtataaaggtggtattcgagtttatttttttattatattttaataattgagaatgataatttttaaattttatttaggaagtagttatttgggatatagtagttatttgaaatagatattattggagattgtattaatagtttaagttgtagatagtattttagtggggttttttataagttatatgattttggttattttatttgatttttatatatttgttttttatttgtttttttagtaggataatagtttttttttttagtatagttatagagagaaagtgggatgggttttgtttagtgtttgatattaggtgttttttgttattggaaaatggaaattgttggatatagggaaggtgtaggtgttttttgggggaaaaatttttaggtgtttttttattagagaatttggaaataaggatagtatttttattttttgggtattaagttgtgatatttaaataatgggttagagtagaaacgaataaaattattttaagagatttagtggtttttagtttagtttaatttggcgtattagttattatagatagggaaggaagggagagtagagtagttaggtaggagttagcgagttggtataggattggaatagataggttatagaagggggagtttaaatagttattaagtttatgaagagatatttatacgttagtaattagagaaatgtttattaaaatgaggttgagatatagttttatatttggagtattggtaataataggaagttgggtgagattatttgttggtgaaaatatagttaaatgagagtattttttttggggtgtatggggattggtgtagtttttttggagagtaattaggaattttttggtggaattaagtaagtgtttattttttgatttagagttttttttttttttttttttttttttgttattttttgtttaaattaagaagttagatttaaaagttttttagaggttatttatagaagagtttttgtataaagagttgtttttaggaagagtttgggtaaatgtaggatatattgtacgttttaggatatattagggaagtcgttgagatagttattattgtattttgtgggaaattttattttatttgtatatagttttaggtggtttttatggtttgtattttagttttttgaatttttagggttggtagttttagttgaatttttttaggagggttatatttagataggatttgtt

SEQ ID NO: 1975 - DNA, 6204 bp, Artificial Sequence
  chemically treated genomic DNA (Homo sapiens)
ggttttattacgttggttaggttggttttaaatttttgattttaagtgattcgtttgttttagttttttaaagtgttaggattataggatgagttattacgttaggttttaagatttatttattaatatttaattaatttagttttaggtgagttttaggttagatgatagatgttgagattatgaagatagggtttaaggggtttaagtttttaggaatttatagtttaggggaagatgtttgttagtacgtggttagagagttagttagatttgatttttattttgagtttttatttagtttttagttgtgagattagttttgagttagttttttatttttttagttttcgtttttttaattgtaaaataagaattataatattatttttattgggttttggtgaggattaaatgagataatttatgtaaaatgtttagtatagtttttggaatatagtagtaattatttaattaatgttaattattgtttttttttaggaagtaggttaatatgtggatttattagaatttaaggtagagaatgtattttagatggggaaataatttgtcgaaggagtttggtaggagattaattttgttagtaagaatagaaggaagtttagaggaggtgatgttgtaatagggttttgaagaatgagtaagagtttttaggtagggattgaggaaagagattttaggtagaaggaagattatttatagaggtatgaagttgtagaaggtgtagatatgtttggaggaaggtaatatatttagtagggtttgtgggattaggttagaaaaggggggatttaggttagtttttgtggaatttattttttttttgagatagagttttattgtattatttaggttggattgtaatggtgtaattttagtttattgtaatttttgttttttgggtttaagcgatttttttgttttattttattgagtatttgggattataggtgttcgttaatacgtttggttaatttttgtatttttagtagagatagatttttattatgttggttaggttggttttgaatttttgattttaggtgatttattcgtttcggttttttaaagtgttgagattataggcgtgagttattgtgttgggtttgtaggattttatgatttaaataaagagggagaaagaaggaatattaattgagtttttattatatgtatggtattgaattatggtgttttttttttttttttttttttttttgagatagagttttattttgttgtttgggttggagtgtagtggtatgatttcggtttattgtaatttttgtttttcgggtttaaacgatttttttgttttagttttttaagtagttgggattataggtattcgttattatgtttagttaatttttttgtatttttagtagagacggggttttattatgttggttaggttggtttcgaatttttgattttaggattcgttcgtttcggttttttaaaatgttgggattataggtatgagttattgcgtttagttatggtattgaattaaatggttagttttttgtttattgtttgtttttgagataaggttggttttgttttgttgtttagattatagtatagtagaatagttatagtttattgtaatttcgaatttttttttaagtttaagtgatttttttgttttagtttttagaatagttgggattataggtatgttattattacgttcggttaattttttgtaaagttggtgttttgttatgttgtttaggttgatttcgaatttttggttttaaatgatttttttgtttcggttttttaaagttttaggattataggtatgagttattgtgtttggttagtatttttaaaatttaatttggattggtcggatacggtggtttttagtattttgggaggttgaggtgggcggattatttgaggttaggagtttaagattagtttagttaatatagtaaaatttcgtttttattaaaaatgtaaaaattagttgggtatggtggtgggtatttgtagttttagttatttgggaagttgaggtaggagaattgtttgaatttgggaggcggaggttgtagtgatttaggattatattatcgtattttagtttaggcgataagaggaaattttgttttaaaaaaaaaaaaaaaaaaaaattaatttggattttattttgtcggtagtagggaattatagagatttttaagtcgattgtgatatgattgaatttttttttttttttttttttgagttagggttttgttttatcgtttaggttggagtgtagtggagggatttgggtttattgtaatttttattttttgggtttaagtaatttttttgttttagttttttgagtagttgggattataggtacgtgttattatggttagttaatttttatttttgttttgagatggagtttcgtttttgttgtttaggttagaatgtaatggcgcgatttcggtttattgtaatttttatttttcgggtttaagagattttttttttttagtttttcgagtagtagggattataggtgtaagttattatgattggttgatttttgtatttttagtagagatagggttttattatattagttaggttggtttcgaatttttgattttaggtgatttgttcgttttagttttttaaagtgttgggattataggcgtgagttatagtgtttagtttaatttttgtatttttagtagagacggggttttattgtgttggttaggttggttttgaattgattttgtgatttattcgttttggtttgaatgtttatttatttaatttttaggatgatgtttttggtagttagtggaagaataggatagagtaaggagagaataattaggtggttaaggtagtggtttaagggatagaaattgtagtatttagttaagaggaatttggcggggttgtggagaaaggttagtgtttgggttgaagagaatttttgtaggttaaatttatagtcgtagaggtagattttatgtgttattggtggggaggttaatgagggaaatagaggttagtttttgagaagttagaagtagggtagggtttgaatgaatggaataaagttatgggacgtaaagtttttaaatttgattttgaatttggtatatttttgagtttttttgtgattttgaaaatgttatattatgttgtttttagttttttattagcggataatatggttttttttatttgttatttatgattgtgagaaagaaattaggtagggagtgtataaggtgtgtaagtgttttgtaagtagtaaattattaaataaattttagattttatgttattagggaggtagttggtcgtacgggatagcgtagttataagagattataggcggagatgggggatatttgttttgtggtgtagataaatagtttaattaatatatatatattttataggtaaatatagtaatttttatattgagttgtgtttattagagggtaataggaggtttttaatttttattattagtgattttatgaattgttttgtagatgtttttgttttttattggatatgaggtggtacgagcggtttgaatttgtagatttagataggttttaggtatttggggaattatgtgagtaaaattttgtattgtttttggggttagaatttagttttttttaaatatttagaaggatttgtgattgtttttaaaggttaagagttattgattttttttattagaaattaataagaatagttatttttggggagaaggaatgatgggggtagggaaagatttttatttaatatttttgatttttttgaacggtttgtattttttaaataggaatatgtattaggtttattgaaaaaaaatatgttagggttagttgagtagtgagataatgggttttttttagatttttgtttttatatttgttcgtattaaataaatataaatattaataatatatttttaaagatttaaaaaaataaaaattaaaaattttgatagtattagtatatatatagaaattattttattatgtaaagtttattttttattatgaaaggtaaaatgtttatattttttattaattattggttttaatttagtaaaatttgtatattaagtaggtaaggtggaaaagaaaaaggtagaatattttatgtattttaatttagacgtataaaaatgttaagttttatacgttattagttttcgtatatatcgttttttgtattcgtttgtacgggttaatgggttagttggtcggcgtttgatgtttgaagtgatggaacggagtacggggttaaatttattattttttttttacgtattttagtaattattttatttttacgttatgttttcgggtgtgtgtgtttttgtttacgtagaaattgaagtttaaagtaggcggagttatttatgttttttttgttgtttttagaatttaatttaggagttgggtttttagaggatttggagatatttggggattatttaattagttgattttcgcgtggtaagaggtttttaatttcgttattacgtggtgttaagggtcgggaaaagggagagcgggtaggagggagttgtattaggggtatttaaagtgttttgacgttacgtattgttaggaatttagttgagtttttagtaggatatttcggttatttttttttttttttttcgggtttttgtgtttaagttttcggtttttttttcgttgtggcggagggaggagtatcgaattgtcggaatagttagtataggggcgtattagtttttttttggtttcgtttttttttttagttgttttttttattggttagtgggcggggtttcggttgtatcgtatacgtattgggatttttgggtggtcgaacgagttggttttttatgaattatgtatgacggcgtgtttcggttaggttggggttgggcgaggattggttgaaggggttgtaatttagcggttttcggagttgcggcggcgtagattgggagggggagtcgggggtttcgacgtcgtagtcgagggaataagttttaatcggattttggataggtatttcggtttggcgttgtttttttttttcggttcggagaggtttttcggtttgagggagtttcgtcgttcgttttcggtatacgcgtacgttcggtttttcggtttttgtcggagaaataggtgaagggggtgtagggtggggtcgttggggaggtttggggattcgggggtttcgtagcggtagggggtttttgggattttggggatgttgtgatggacgttgtagtggggtcgggagagatgaagagacgcggagggtcgttttgagggaagatttttcgggatgataggagcgggtttcggaagggattcggggcgttggagggaagtttcgtttttcggagaaatagaacgcgttcgagggggtatcgtggggcgagggcgtattcggttgcggcggtaggagtgagggatagtttttcgattttttgttttttggggttttggggacgtttcggttatcggagcgattgttacgtcgacggggattatcggcgcgagtggggggtcggaaagcgtttttttttcgttcggtcggcggttttcgttgagttatttttttcgtttgttttgttttcgtttttttaggagttagttgtgtttttttggaggtaggaataggtgtgtttgtcgtttgtagttttacgggttggttggtcgtgggtaggttttattgtataagaattaagttttttgtagggaaattgatagatcggtattttttttaaattttttcgtatttttttttaggttaaattatgttttttttacgttttcgttttgtaaaaaagagaaaaaaagataaaataaaatttttattaattcgttaagttagttttagagagagaaataaattttttgatattgtttttttttaaatatttggtaaagtcggttagaagataaataattgagttattgtatttattggattgtggtgttgtttaattgtataggacggaatgaattaattgagagtgggagttttttgttttagagttaagattttgggtaaatgtagaggagagggaaataaagataggttggttttgaaaaaattatgtgtgtaaattttatatgtatttggggggtgtggttgtattgaagttaataagattta

SEQ ID NO: 1976 - DNA, 6204 bp, Artificial Sequence
  chemically treated genomic DNA (Homo sapiens)
tgaattttgttaattttagtgtaattatattttttaaatgtatgtaaagtttgtatatatggtttttttaaggttagtttgtttttgttttttttttttttgtatttatttaagattttggttttgagatagaaaatttttatttttaattggtttatttcgttttatgtaattaagtaatattataatttagtaaatgtaatggtttaattatttattttttggtcgattttattaggtatttggaaaaggataatgttaagaggtttatttttttttttagagttggtttgacgggttgatggggattttattttgttttttttttttttttttataaggcggggacgtggggggagtataatttaatttagaaaaagatgcgagggaatttagaaagagtatcggtttgttaatttttttataggaaatttgatttttatgtaataaagtttatttacgattagttagttcgtaaggttgtaggcgatagatatatttatttttgtttttaaaagggtatagttggtttttgaaggagcgggaatagggtaagcggaggaagtggtttagcgggagtcgtcgatcgggcggggaggaggcgtttttcgattttttattcgcgtcggtgattttcgtcggcgtgatagtcgtttcggtggtcggaacgtttttagggttttagggagtaggaaatcgggggattgttttttatttttgtcgtcgtaatcgagtgcgttttcgttttacggtgttttttcgagcgcgttttgttttttcgaagaacgaaatttttttttagcgtttcgagtttttttcgaggttcgtttttgttatttcgaagagtttttttttagggcgatttttcgcgtttttttatttttttcggttttattgtagcgtttattataatatttttaaggttttagaggttttttgtcgttgcggagttttcgggtttttaggtttttttaacggttttattttgtattttttttatttgttttttcggtagaggtcgagaggtcgggcgtgcgcgtgtgtcggggacgggcggcgaggtttttttaggtcgaagggttttttcgagtcgagggggagagatagcgttaagtcggggtgtttgtttaggattcggttggggtttgttttttcggttgcgacgtcggaattttcggtttttttttttagtttgcgtcgtcgtagtttcggaaatcgttgaattatagtttttttagttaattttcgtttagttttagtttggtcgaggtacgtcgttatgtataatttatgaaaggttagttcgttcggttatttagaggttttagtgcgtgtgcggtatagtcgaagtttcgtttattgattaatgaggagagtagttaggagaaagggcggagttaagaggagattgatacgtttttgtgttggttgtttcgatagttcggtgttttttttttcgttatagcgagggaagagtcgaggatttgggtatagaagttcggggggagggagggaagatgatcggaatgttttgttgaaaatttagttgagtttttggtagtgcgtgacgttaaggtattttaaatgtttttgatatagtttttttttgttcgtttttttttttttcggtttttggtattacgtggtggcgaggttgagagttttttattacgcgggaattagttagttagatagtttttaggtatttttagattttttggggatttaatttttgaattgggttttggggataataaaaagaatatgggtgatttcgtttgttttgaattttagtttttgcgtgagtagggatatatatattcggaaatatgacgtggaaatagagtaattattagagtgcgtggggagagggtagtggatttaatttcgtatttcgttttattattttaagtattaaacgtcgattagttagtttattggttcgtataggcgaatgtagaagacggtgtatacgaaagttgataacgtgtagggtttgatatttttatgcgtttgaattgaaatatatgaaatgttttgttttttttttttttattttgtttatttggtatgtaagttttattgaattgaagttagtggttgataggaaatgtagatattttgttttttataatagaggatgaattttgtataatggagtgatttttgtgtatgtgttgatattattagggtttttaatttttatttttttgggtttttaaaaatatgttattaatatttgtgtttgtttaatacgaataggtataaagataaaaatttaaaaaggatttattattttattgtttagttaattttgatatatttttttttaatgaatttaatatatgtttttgtttagaaaatgtagatcgtttagaaaggttaaaaatattaaatgaaaatttttttttatttttattattttttttttttaaggatagttgtttttattaatttttagtgagaaaaattaatgatttttaatttttgaaggtagttatagatttttttgagtgtttgaaggagattagattttagttttagaaataatataaggttttatttatatggttttttagatatttgaagtttgtttaagtttatagatttagatcgttcgtattattttatatttaatgagggatagaggtatttatagggtaatttatagggttattggtggtgagaattgagaattttttattgttttttggtagatatagtttagtatggaaattgttgtatttatttgtagagtgtgtgtgtattgattaggttgtttatttatattataggatagatattttttattttcgtttatagttttttgtaattacgttatttcgtgcggttaattgtttttttgataatatagggtttaggatttgtttagtgatttattgtttataaagtatttatatattttatatattttttgtttggttttttttttataattatgaatagtagataggagaggttatattattcgttgatagaaaattaaagataatataatatgatatttttaagattatagagaaatttagaaatatattaggtttagagttaggtttgggggttttacgttttatagttttgttttatttatttaaattttgttttgtttttgattttttaagagttggtttttgttttttttattggtttttttattagtaatatataaaatttatttttgcgattatgggtttgatttgtaaaaattttttttagtttagatattggtttttttttataatttcgttaaattttttttggttaaatgttgtaatttttgttttttgggttattgttttaattatttgattattttttttttattttattttatttttttattggttgttagggatattattttaaaaattaaataaataaatatttaggttaaggcgggtggattataaggttagtttaagattagtttggttaatatagtgaaatttcgtttttattaaaaatataaaaattaggttgggtattgtggtttacgtttgtaattttagtattttaggaggttgaggcgggtagattatttgaggttaggagttcgagattagtttgattaatatgatgaaattttgtttttattaaaaatataaaaattagttagttatggtggtttgtatttgtaatttttgttattcgggaggttgagggaagagaattttttgaattcgggaggtgaaggttgtagtgagtcgagatcgcgttattgtattttagtttggataataagagcgaaattttattttaaaataaaagtaaaaattagttagttatggtggtacgtgtttgtagttttaattatttaggaggttaaggtaggagaattgtttgaatttaggaggtggaggttgtagtgagtttagatttttttattgtattttagtttaggcgatagagtaagattttggtttaaaaaaaaaaaaaaaaaaaaatttaattatgttatagtcggtttaaaaatttttatggttttttattatcggtaagataaaatttaagttaatttttttttttttttttttttgagatagagtttttttttgtcgtttaggttggaatgcgatggtatgattttgggttattgtaattttcgttttttaggtttaagtaatttttttgttttagttttttaagtagttgggattataggtgtttattattatgtttagttaatttttgtatttttagtagagacggggttttattgtgttggttaggttggttttgaatttttgattttaagtgattcgtttattttagttttttaaagtgttgggagttatcgtgttcggttaatttaagttaaattttaaaaatgttgattaggtatagtggtttatgtttgtaattttaaagttttgggagatcgaggtaggaagattatttgaggttaggagttcgagattagtttgggtaatatggtaaaatattaattttataaaaaattagtcgggcgtggtggtggtatgtttgtagttttagttattttgaggattgaggtaggaggattatttgaatttagaaagaagttcgaagttatagtgagttatgattgttttattgtattgtagtttgagtaatagaataagattaattttgttttaaaaataaataataaataaaaagttgattatttaatttagtgttatggttgggcgtagtggtttatgtttgtaattttagtattttgggaggtcgaggcgggcgaattttgaggttaggagttcgagattagtttggttaatatgatgaaatttcgtttttattaaaaatataaaaaaattagttgggtatagtggcgggtgtttgtaattttagttatttgggaggttgaggtaggagaatcgtttgaattcgggaggtagaggttgtagtgagtcgagattatgttattgtattttagtttaggtaataaagtgagattttgttttaaaaaaaaaaaaaaaaaagaaaaaaatattataatttagtgttatgtatgtggtaggagtttaattgatgttttttttttttttttttttatttgaattataaaattttataggtttagtatagtggtttacgtttgtaattttagtattttgagaggtcgaagcgggtggattatttgaggttaggagtttaagattagtttgattaatatggtgaaagtttgtttttattaaaaatataaaaattagttaagcgtgttggcgggtatttgtaattttaggtatttagtagggtgaggtagaagaatcgtttgaatttaggagataaaggttgtagtgagttaagattgtattattgtaatttagtttgggtaatatagtgagattttgttttaaaaaaaagataaattttataaaggttgatttgaatttttttttttttaatttagttttataaattttattaaatgtgttatttttttttaaatatgtttatattttttgtaattttatgtttttgtggatagttttttttttatttggaatttttttttttagtttttatttgagaatttttatttattttttaaagttttgttgtaatattattttttttaggtttttttttatttttattggtaaagttaattttttattagattttttcggtaggttgtttttttatttagaatatattttttattttgaattttaataaatttatatattggtttattttttgaaaaaaaataataattaatattgattaagtaattattattatattttaggaattgtgttaagtattttatatagattattttatttgatttttattagaatttagtgagggtaatattataatttttattttataattgaggaaacgaagattgagaaagtgaaagattggtttaagattggttttatagttagaaattaggtggaaatttagaatgaaaattaggtttggttgattttttggttacgtgttaataaatatttttttttaaattgtgggtttttggaaatttgaattttttaagttttgtttttataattttagtatttattatttagtttagagtttatttaagattgaattaattaaatattaataaataagttttgaggtttgacgtggtggtttattttgtagttttagtattttgggaggttgaggtaggcggattatttgaggttaggagtttgaaattagtttggttaacgtggtgaaatt

SEQ ID NO: 1977 - DNA, 6049 bp, Artificial Sequence
  chemically treated genomic DNA (Homo sapiens)
gagatggggttttgttttgttgtttaggttggagtgtagtgtcgcgattttggtttagtgtaatttcgaatttttgggtttaagggattttttcgttttagtttttcgagtattgggattataggcgtgtgttattaaggggcgattattattttttttttttacgtaaaataaaagacggttatttagtgttgttgttttatttttgtttggggagaaattcgattagtttaaggaattttaaatttttggaattattattttaggtatttttgttattatttttggaatacgagaattaagcgattgattttgttttttttaaaagataaatagggtagttgtagttgtaatagggtagatagaggtaggtttattttgggtttaaagtggagattatagtcggggaaaatcggattggatttcgaggttttttttagggaggggcggtaggggtgttttaaaattttttatttgttagtttaatttttggattttttgttattttttatattgttcgagtttcggatatatagttttggtgtataagggttttattttttgtatattaggggtataatggatttcggattgttggcgagagtgatagtaaaaagagttagtttttttttttaggttttttagtaatttgtttgtttcggttttaggaggcgggttttagttaatggttgagttattcgtttttagttaatggttgagggataagttgaggggagtgagaggttatttattgtagtcggatataacggcgttggtttcgttttttttcgagaattcgtagagttgggttggtaaaattgtagtgttgaagatattggattcggtaaggagattgggggtggtaaagaagttggggaggaagggttgttgagttgggtagcggagggggttttggtgtttagttgtgtttcgaattttaagggtaataaaattattagtatttgtttttattttttttgtttgggtgtttttgagatcgcggggtgttgtcgtaagatttttttgtgtttggatgtcggacgtatgtttttatttaacgtgtttatggggagtgaggggttattatttgtattaacgggtggtatttttgtattatagtaaaaggttgttttttttaaatttgggattttgggtttattgagtttatttgcgagttagttttatttgtattgttttggtttagtataaataggttgttggtattgaggtaggtggtagagagagtaatggttttatggtttaggggtaaggtgaagattgtttttatttttatttttaggtttttttttttttttatttacgatttatttattttagtatattggtttttagtattttattagtagtttagatatttgttatttttttttattttggttttgttgggttagtgttttttgtttagtaatttgaggaagaaatttgtagggtagagagtagaaaaattattttttttttttagtttgtttttgatattttggttattaattttttaatttgttgagtttattatagtggtatagagaagattgaggtggttcgggattttaggttggggtttagtttttagttgggtttaattttttttagggtgaatggagggagagttggggattgaaaagtttttaaagataatgttattatagtagtttttttttatttaaagttttttttttttgagttttagttagttatggttaatcgtttggaaaatagttgaatatagtataataagatattttgaggttgggagtggtggtttatgtttgtaataattttaggattttgtgagattaagtttgaaggattatttgaatttaggagtttgagattagtttgggtaatatagtaagattttatttttataaaaaaaaaaaaaaaaagattatgtatggtggtatacgtttgtggttttcgttatttaggaggttgaggtaggaggatggtttgagtttagaagtttgatgttatagtgagttgagattacgttattgtattttagtttgggtagagtaagattttgttaggggtagggggaggggaggggaagtcggatagtggtttatgtttgtaattttagtattttgggggttaaggtagtaagaggttaggagtttaagattagttttgataatatagatttttatgtttatagaaaaattagttaggtttggtgatatatatttgtagttttagttgttggggaggttaaggtaggaggatggtttgagtttaagaggttgaagttttagtgagttatgatcgatatttgttttatcgtttaggttttttttttttttgagataaggttttgttttgttgtttaggttggagtacggtggcgttattataatttattgtagtttcgattttttggatttaagttatttttttattttagtatttttttttttattatttcggtagttgagattatagataggtattattatgtttagttaatttgtttttttttttttagagatatagttttattatgttgtttaagttggttttgaatttttggagttaagtgattttttttttttggttttttaaaattttgggattataggtatgagttattatgattggttaaaaaaaagtatattttgagagagagattatatttatataatttttttttgtttttgttttgagatagggtttcgttttttgttgtttaagttgaagtgtagtggtatagttagtttattttgtaattttaaatttttgggtttagatttttttagtttttagagtagatgggattataggtgcgttttattatgtttaattaattttttattttgtagggacggagtttttaatttttggtttttagtagtttttttgtgtaggttttttaaagtgttagtgtgttcggaattggtgggtttttggttttattgattttaagaatgaagtcgcggattttcgtagtgagtgttatagtttttaaaggtagcgtgttcggagtttgttttttttgatgtttagatgtgtttggagttttttttttttggtgggttcgtggttttgttggtttaggagtgaagttgtagatttttatagtgagtgttatagtttataaaggtagtgtggattcgaagagtgagtagtagtaagatttattgtaaagagggaaagaataaagtttttatcgtgtggaaagggatttaagcgggttgttattgttggtttgggtagtttgtttttgtttttttatttggtgttatttatattttgttgattggtagagtcgagtggtttgttttgatagggtgttgattggtgcgtttataatttttgagttagatataaaggttttttatatttttattagattagttagatatagagtgttgattggtgtatttataatttttgagttagatataaaggttttttaaggttttattagagtagttagatatagagtgttgattggtgtatttataaattttgagttagatatagggtgttgataggtgtatttataatttttgagttagatatgaaggttttttatttttttattagatttaggagtttagttggttttatttagtggatttcgtattggtgttgtaggtggagttgtttgttagtttcggtgttatgcgttcgtattttttagtttttgggtggttgatgggattgggtgtcgtggagtaggggtcggtgtttttcggggaggtttaggttttataggagtttacggcgaaggggggtttaggtatggcgggttgtaggtttcgagttttgtttcgcggggaggtagttaaggttcggcgagaaatcgagcgtagcgttggtgggtcggtattgttgggggatttagtatatttttcgtagttgttggtttaggtggtaagttttttattgttcggggtcggtagggttagtcggttgtttcgtgtgcggggtttgttaagtttacgtttattcggaattttagttggttcgtaagtttcgcgtttagtttcggttttcgttcgtatttttttttttatatttttttgtaagttgagggagtcgattttggttttggttagtttagaaaggggtttttatagtgtagcggcgagttgaagggttttttaagtgtcgttaaagtgggagtttaggtagaggaggtatcgagagtgagtaagggttgtgaggattgttagtataatgttattttttattaggattataagggtgagttattatatttagtttttttattatagtataatgttataatttttttttttttttttgttttttttttgagacgtttgagacggagttttattttgtcgtttaggttggagtgtagtggcgcgatttcggtttattgtaattttcgttttttgggtttacgttatttttttgttttcggagtagtagggattataggcgttcgtcgttaagttcggttaatttttttttttttatttttagtagagatgaggtttcgtcgcgttagttaggatggtttcgattttttgatatcgtgatttgttcgttttagttttttaaagtgttgggattataggcgtaagtttttgcgtcgggttaatttttttattttgttattgttgttaattttttttttttttttttttttttttttgagatggagtttttttttgttgtttaggttggagagtagtggcgtgattttagtttattgtaatttttattttttaggtttaggtgatttttttgttttagtttttcgagtagttggggttataggtacgtgttattatgtttggtttatttttgaatttttgtagagataggttttttttattttggttaggttggttttaaatttttgattttaggtgatttgttcgttttagttttttaaagtgttgggattatagacgtgagttattgcgtcgggtattgttgttaattttttattgtgggtaatttagtaattaaattataagaggtatgtatgtatgggggaaaaaatagtaatatagggtttggtgtaatttgtggttttaaatatttattgggggtcgtagaatatatttttagtggataagggggtattattgtatttgttggttttttatgttagttttgttaggtagatgttattttagagaagaggaagtaagtttagaacggtttggaattttgtttaggaaatcgggttggttaatgaataataagagatttagttttataaatttaaggtattttgtttttagaatttgggtttttttatttatttaggttgttattattttttttttatttttttatttttgtttaagttagtttgatttatagttgttttttgttgattttagaaataataatttggttagtagatatttggtttcggttttttaggtttttcgttttaggtatcgttttttatggtggataaagtttagaatggaagatgggagaaaggtgattttgattttagaagtatttattttttttattttattttttattcgtattatttgttattttgttagtatagtttgtttttgaagtgttttaagttttttttaagggtttatttggatttttatttttaagattttttatttgtttagaaagttttttgttgattttttttgtgttttttttttatttatttttttaggtttttttaatatttttttttagggtttttttattttgattttagaattttttttttataggtttgttataatgttgttgttgtatagagttgtggtttttaggttttaataggtttgtaggtaggttagtttattttaggatttgttttttagtttttatttgttatttttagtgttttttataatgttatattttgtaaataagatagttgagagagtgtgtttagggaggatagagaaagttagattttatttgtttatatttatttttggagaaattaagttttaatttaaagaattaatgggttaattaggggagaaagaagtagattttaggtttttattagttttttgttatgattatacgtgttattaagatcgattttttttttaga

SEQ ID NO: 1978 - DNA, 6049 bp, Artificial Sequence
  chemically treated genomic DNA (Homo sapiens)
tttggaagagaggtcggttttagtagtacgtatggttatggtaaagggttagtgaaggtttggggtttattttttttttttttggttggtttattggttttttaagttggagtttagtttttttagggataggtgtgaataagtgggatttggttttttttgttttttttggatatatttttttaattgttttatttgtaaggtatgatattgtaaaagatattaagggtggtagataggggttaggaggtaagttttgggatgggttggtttatttgtaggtttgttggagtttgaggattatagttttgtgtagtagtagtattgtagtagatttgtagaaggaagattttgggattaagatagggagattttgggaggggatattagggaggtttaagggaatgggtgagaggaagatatagagaaggttagtaaggagttttttgggtaagtgaggagttttgagagtgggagtttaaatgggtttttagagaaaatttggagtattttagagatagattgtgttgataggatggtaggtaatgcgggtggggaatggggtaggagggatgggtgtttttagaattagaattattttttttttattttttattttgaattttgtttattatagagaacgatgtttggggcgaagggtttaaaggatcgaaattaaatgtttattggttagattattatttttgaagttagtagaggataattgtgggttagattgatttaaatagggataaaaaagtgaaaaaaaagtagtgatagtttaaatgggtgaagaagtttagattttgggggtaaaatgttttgggtttgtgaaattggattttttgttatttattaattagttcgattttttgagtaagattttaagtcgttttgaatttgtttttttttttttgaaatgatatttgtttagtagagttaatatgaagagttaataagtatagtagtatttttttatttattggggatatgttttacgatttttagtagatgtttgaaattatagattgtattaaattttatattattgtttttttttttatatatatatattttttatagtttaattattaaattatttatagtaagagattaataataatgttcggcgtagtggtttacgtttgtaattttagtattttgggaggttgaggcgggtaaattatttgaggttaggagtttgagattagtttggttaaaatggggaaaatttgtttttataaaaatttaaaaataagttaggtatggtgatacgtgtttgtaattttagttattcgggaggttgaggtaggagaattatttgaatttgggaggtggaggttgtagtgagttgagattacgttattgttttttagtttgggtaatagagagagattttattttaaaaaaaaaaaaaaaaaaaaaagagagattaataataataataaaatagaaaaattagttcggcgtaggggtttacgtttgtaattttagtattttgggaggttgagacgggtagattacgatgttaggagatcgaaattattttggttaacgcggcgaaattttatttttattaaaaatagaaaaaaaaaaattagtcgggtttggcggcgggcgtttgtagtttttgttatttcggagataggagaatggcgtgaatttaggaggcggaggttgtagtgagtcgagatcgcgttattgtattttagtttgggcgatagagtgagatttcgttttaaacgttttaaaaaaaaaataaagaaaaagaaaaaaattataatattatattgtaataaaagagttgggtgtggtggtttatttttataattttagtgagaagtgatattgtgttggtagtttttatagtttttgtttattttcggtgttttttttgtttgggtttttattttggcggtatttgaggagttttttagttcgtcgttgtattgtgggagtttttttttgggttggttaaggttagagtcggtttttttagtttgtagggaggtgtggagggagaggtgcgagcgggaatcggggttgagcgcggagtttgcgggttagttggagtttcgggtgggcgtgggtttggtaggtttcgtatacggagtagtcggttggttttgtcggtttcgggtaatgaggggtttattatttgggttagtagttgcggagggtgtattgggttttttagtagtgtcggtttattagcgttgcgttcgatttttcgtcgggttttagttgttttttcgcggggtagggttcgggatttgtagttcgttatgtttgagttttttttcgtcgtgggtttttgtggggtttaagttttttcgaggagtatcgatttttgttttacggtatttagttttattaattatttaagggttgaggagtgcgggcgtatggtatcgagattggtaggtagttttatttgtagtattagtgcgggatttattgggtgaagttagttgggtttttgagtttggtggggaggtggagaatttttatgtttagtttagggattgtaaatatatttattagtattttgtgtttagtttagggtttgtgaatgtattaattaatattttgtatttagttattttggtggggttttggagaatttttatgtttagtttagggattgtgaatatattaattaatattttgtatttagttaatttggtggggatgtggagaatttttgtgtttagtttagggattgtaaacgtattaattagtattttgttaaaatagattattcggttttattaattagtaggatgtgggtggtattagataagagaataaaagtaggttgtttaagttagtagtggtaattcgtttgggtttttttttatacggtggaagttttgttttttttttttttataatgaattttgttgttgtttatttttcgggtttatattgtttttatgagttgtaatatttattgtgaaggtttgtagttttatttttgagttagtaagattacgaatttattagaaggaagaaattttaaatatatttgaatattagaaggaataaatttcggatacgttgtttttaagaattgtaatatttattgcgagggttcgcggttttatttttgaagttagtgagattaagaatttattaatttcggatatattagtattttgggagatttatataggaggattgttagaggttaggagttggagatttcgtttttataaaataaaaagttagttgggtatggtggagcgtatttgtggttttatttattttggaggttgagaagatttaagtttaggagtttgaggttatagagtgagttgattgtgttattgtattttagtttgggtaatagagagcgagattttgttttaaaataaaaataaaaaaaagttatatgaatgtggttttttttttaaaatatatttttttttggttagttatggtggtttatgtttataattttaaaattttgggaggttaaggaaggaggattatttgattttaggagtttaagattagtttgggtaatatagtgagattgtgtttttagaaaaaaaaaaataaattaattgggtatggtggtgtttgtttgtagttttagttatcggggtggtggggagaggagtgttgagatgagaggatggtttgagtttaggaggtcgagattgtaatgaattatgatggcgttatcgtattttagtttgggtaatagggtaagattttgttttaaaaaaaaaaaaagtttgggcgatggagtaagtgtcgattatggtttattgaagttttaattttttgggtttaagttatttttttgttttagtttttttagtagttgggattataagtgtgtgttattaagtttggttaatttttttgtagatatgggagtttatgttgttagggttggttttgaatttttggttttttgttgttttagtttttaaagtgttgggattataggtatgagttattgttcggtttttttttttttttttttgtttttgatagggttttgttttgtttaggttggagtgtagtggcgtgattttagtttattatagtattaaatttttgggtttaagttatttttttgttttaattttttgagtagcggggattataggcgtgtgttattatgtatggtttttttttttttttttttgtagagatgaggttttattatgttgtttaggttggttttaaatttttgggtttaagtgattttttaaatttggttttataaagttttgggattattataggtatgagttattatttttagttttaaaatattttattgtattgtgtttaattattttttaagcggttgattatagttaattgaaatttaggaaaaggaaattttggataaggggagattgttgtaataatattgtttttgaaggttttttagtttttaattttttttttatttattttaaaaaaaattgaatttagttgggaattggattttaatttagggtttcggattattttaattttttttgtgttattgtagtgagtttagtaaattgaggagttaatggttagagtgttaggggtaggttggagaaggaaggtaatttttttgttttttgttttgtaagttttttttttaaattgttgaatagagagtattgatttagtagggttaaagtgaggaggggtgataaatgtttaaattgttgatgagatgttggagattaatgtgttggggtgggtgggtcgtgggtagggaggaaaggaaatttagagatgggaataggagtagtttttattttgtttttgggttatgggattattattttttttgttatttattttaatgttagtagtttgtttatattagattagagtagtgtaggtagggttgattcgtaggtgaatttagtgagtttagaattttaggtttgggagggatagttttttgttgtaatatagaaatgttattcgttggtgtaggtgatgattttttattttttatgggtacgttaggtaggaatatacgttcggtatttaggtataaaagggttttgcggtaatatttcgcgattttaagagtatttagatagaaggagtggaggtaggtattgatagttttgttgtttttgaggttcggagtatagttggatattaaggtttttttcgttgtttagtttagtagttttttttttttagtttttttattatttttagtttttttatcgggtttagtgtttttagtattgtaattttattagtttagttttgcgagttttcgagaaggggcggggttagcgtcgttatgttcggttgtagtaagtgattttttattttttttagtttattttttagttattggttggaagcgggtggtttaattattggttggaattcgttttttggagtcgagataggtaggttgttaagaagtttgggagaagaggttggttttttttgttgttattttcgttaatagttcggagtttattatatttttggtgtgtaaagaatgggatttttgtgtattagggttgtatgttcggagttcgggtagtgtggaaggtgataaggaatttaaaagttgggttgataggtgggagattttgagatatttttgtcgtttttttttggaggaggtttcgggatttagttcggtttttttcggttgtgatttttattttaaatttagggtagatttatttttatttattttgttgtaattataattattttgtttattttttagggaaagtaaagttaatcgtttagttttcgtattttaggaatgataatagaaatgtttaaaatagtggttttaagaatttgagattttttgggttagtcgaatttttttttaaataaaaatgaaataataatattgaatagtcgttttttattttgcgtagaaaaaaaaaataataatcgttttttggtggtatacgtttgtagttttagtattcgggaggttgaggcgggaggattttttaagtttaggagttcgaggttgtattgagttaagatcgcggtattgtattttagtttggataatagagtaagattttatttt

SEQ ID NO: 1979 - DNA, 18434 bp, Artificial Sequence
  chemically treated genomic DNA (Homo sapiens)
ataaagaataagattaggtattttatatatgttgtaaattatattagaggtttttttttgagttttggatttatttattttattaataaatatttatgatagtaaggtttttttttttttagttttttttatttttattttttattttttagggattagtttttatatttttattataagattattttatgatatagataaaggttatttttaggtgaaaagtaagaggtatgtttaaaagtaatagtattttttttaattttgggtttttttttaattttttttgttgatttaaaatttgtattataaaatggaggttaatttgtatgattataaattttttaataattaatttaatcggattatggtaagttatggtttgtttttgatattttagatttttttttgtgattatttaaaagttttgttagatatttgtgtttttatttattagaagtttagtggatttaattaggatattttaaatggaggatgatagtgaagttgtatttataattttatttttgattttaataaataaatattgaatttagggtttagggattgaatagtcgtgttataatattgttaataaaggagagattttatttatttaaatttattttatagatttataagaaataataagatgttattatttttttatttttgtttgtgttgcgtgggtttttggtgttatatttaaaaaaattattggttaaggttaatgttaagaagtttttttttttgtgttttttttaagagttttatagttttatattttatgtttaggtatttaaattaatttgagtggattttttgtgtatggtgtaagatagggtttaattttatttttttgtatatggatattgagttttttaatattatttattggagagattattttgttttttgttgtgtgtttttggtagttttgttaaagaatttgattatttatgtatgggtttatttatgggttttttagtttgttttattagtttgtttttaagttagtattatattgtttcgattattgtagttttgttatatattttgaaattaggatattttatgtttttagttttgtttttgtttaagattgttttggttatttggggttttttgtggttttaaatatattttaagaaaattttttatttttataaaaatgttattgagattttgatagagattatgtttgaatgtgtaggttattttgagtagtatggatattttaataatattaatttttttaatttatgaatataggatgtttttatatttatttgtgtttgttttaatgttttttattaatgttttatagtttttagtgtttaagttttttatttttttaagtttttttttaagtattttattttttttaatgttattgtttttataatagttaaaatatggaagtaatttatatgtttattgatggatgaatggataaagaaaatatggtatatatatataatggaatattattttattttataaaaggaagttttgttatttgtgacgatatggatgaatttagagaatgttacgttgagtgaaataagttagatgtagaaggatagaaggatgttatatgatattatttatatgatgaatttggaatagttaaatttatagaaggagggagtgatatggtggttgttaggggttgggaggaggtataaatagagaggtattagttaaagggtattaagtttagtttatataatatgagtaagttttagagatttattgtatagtttagtgtttatagttaataatgttgtattatatatttaaaaatttgttaaaaaggtaattttatgttgtgatatattataaaaataataataaatgaatagaataaagggaaatttttggaagtgatggatatgtttatggtatggattgtggtgatggttttatagaagtatatttgtttttaagtttattaagttatatatattaaatatttatagttttttgtatatcgattatatttcgatagagtggtttaaaatgaaggaataaaatagtgtatattttatgatattaaaaaaaaagtattatttttaattatcggtcgggcgtagtggtttacgtttgtaattatagtattttgggaggttaaggtgggtggattacgaggtaaggagatcgagattattttggttaatacggtgaaatttcgtttttattaaaaatataaaaaattagtcgggcgtcgtggtacgtgtttgtagttttagttagttattttggaggttgaggtaggagaattatttgaattcggtaggcggagtttgtagtgagttgagatcgcgttattgaattatagtttgggtgatagagtaagattttgttttaggaaaaaaaagattaaaaaaaataaaaacggttgttttattaagaattgttattaggaacgggtagagaagaatagtgtttgtgtagtttagtatgtgagtggtaatttgttaattatatttggtttgttatttcggtttttgtaatttgttgtgttttgttaagtgatttttttagaaattttgtgtatattattttattaaatttttattaaagaggttttttaaatggaagaagggaatttagagtttttagaatgtgaataaatttaagggattttggtttttagaattttgtagatttttgttttgttgggaatatatagttttttattattttgagattggttgatttgtaatgttgtgaaatattagtgtttattaaatttgttattttatatttatgggtatatatttttttttaattttttttttttttttttttgagatagggtttttttttgttatttaggttggagtgtagtggcgtatttatgatttaatgtaaatttgaatttgtttggatttaagtgatttttttattttagttttttaagtagttgagattataggtatgtattaatatgtttagttaatttttgtaatttttgtagagatggagttttattacgttgtttaggttggttttgaatttttaggtttaagtaattttttaaagtgttgggattataggtatgatttattgtttttagttttaatttttttaaaaaggggaaaaatgaggttttttattattgttttaattattattatagttaaataagttaatgtatatagttaagaaatgtatagtagagagaaaataatttgtgttgtatttagaaattagtaagaattaaggattaataatatttgaatatgaattggtattaagtttaaattattgtattaggagattattaataaaatttatttatcgagagttatttattagttaattaaagtcgtgggaaatttaatttgtataaggagttataaggtataagggataggtatgaaggattgttgagatgatgtgttttatttcgttaataatgtatatgatattattttaatttttttaaatttaaaataataattatttatttgtttgttttttaagtttgggtaatcgtgtttggtaatgagattttgttgtatgtttgttaatattttattggttaaagttagttaaatggttaagtttagagttagcgtgggagaaggttatataagggtttgaattttgaggacgagttttttttattgaaggttaaagaaatagtttattttagagggttgttggggagttataatgtaaagaataaattttattttgtttttaaggcgtttatagagaagaaattttttgaatattagtgaagtttttttggatattttaatggatagatgtgagggatagttacgtatttaggatatttgtttgtttatggtgttatgttatagatgttataaatgaaaattagagatatgtagttttgagtttagtaattataaagcggtttagttgaagttggagtttataagagggtattttgtattatgatgtacgtttgttttttgttattagttttgtaatgagtttaagttaatgttatgttttagtcgtttagttgttttatgatttgtgtgattgaagtatatggtggtttgtggtatgtttttaggtaaattatttatttttttaggtttcgtttttttaattttttaaataagggagttagattaggtggtttatagttttttttaattgtgatattttattatataataatatagttataatagattatagtatatttgtaatgaaaaaaagtgagtttattttttaataagtatatttatttaattagttggagttattaaagtaaattaagaacgaaatttttagttaatttgaatttttttgggtatattgatttgttttttaacgcgtttgatcgtggaaaagtggattagtaggagtgggattggtttttagttttgttatgtttggttttttttttgttgtgaaatttagtttttttttggattaagaggttaatttttgtcggtgttattttatagtgttgtaaagagataaaagttagacgaaagaagggaaagtattttagttttgattagggatttttttttttgtttttgtgattatatattatttaattttgatagtttcgtatgagtttagtagaaaattgagggatttattgttattttttaatttgtagaggtttagattcgtttatattaaatggtgaggtttttatttttaattttagttgttgttaaatttgtgatttttttaatgaaatttaaggattttagtttaaaaaaagttaaaataaaataaaaattaggtgttttttagaggcggtttgaaacgtttttttgaggttgttagagattgtttttgttttttttttttgttttttttggaatgtattaaatataaaagtatttttttttaagttttatttttattttcgagagtgtcgtttatttgttatatatttttttgatgaaatgtttggatttggattaaagaaaaaaggaaaggttagtagttatttaagtaagtgaaggtgtttattttacgtttttattgggtagggttttttttgttgagtagagtttgttagtagaatgtatgtggttttagttttttttggtttttttttgatttggtgtttgaaatttagttagaattatttaggaaggaaagtggaagaaaagggatatgatatgggtatgggagaagggtataatttagaatataagtaatagtattaatatttagttaatgtgataatgtatttatgtagtatttaatttttttttttgtagtattttgtatttggaaaaaatatattagggaagttatggaaattattttgtaatagtttttttagtaaattatatttttgttttaaagaaataaaattttaagaggttaaaagagcgtatttttttttgttagttttattggttggaggggagataggagttggtattgtatgataatgttttagataggagagaatatttaggtatgtttaggagtaagtaaatggtttttttttatttaatgaaggataatggaagaagtggagaagtggaaagttgttaaggtgtatgggaagattagaaattggtatcggtaattgtggggtattcgggtaaaaatggagttggttttagtaagttgatttttaggtttatagatgattacgtgttggtatgtgtttttatatgggcgtgtttgtgtatgaatttattataaaggttgtaaagtttataaattaaattatggatagtggttaattttaggtagtttgtttttagattttatgttttaattattaggtaatattgttttttatttggataaagaatgtgaattttatgtgtttttataaaatatttttaaaattttaaggttgagtgagtttttttttaatttttttttattttttttatttttgttagattttatttaatagtaacgttttttttatttttattttattttttaattgtatttttgtttgttttattgaagtatgttttagaataatttttttatatagatcgtatggttataaatttattgaatttttgtatattttaaaatatttatatttttttatttagttatttagatggatgtgaaatttttttattttattttattttattttattttattttattttatttatcgatttagagataaggtttcgttgtgttgtttaggttgaagtatagtggtatgatcgtggtttattgtagttttgatttttttggtttaagtaatttttatattttagtgttacgagtagttgggattataggtgtgaattattatggttagttaatttaaaaaaaaattttggtggagatgaggtttttttgtgttgtttaggttggttttaaatttttaggtttaagggattttttagttttagttttttaaagtgatgggattataggtatgagttataggtaatttttttggtttggttaaaggtaatttttttgttttttagaggtaaggttttgttttgttgtttaggttggagtgtagtggtgtgattatgatttattgtagttttaattttttgggtttaagcgatttttttgttttagttttttaagtagttggaattataggtttgtgttattatatttggttattttttaaaatatttttgtagatacggggttttattatgttgtttaggttggtgttgagtttttgatttttttttgtttatattttttaaagtgtcgggattgtggggatgagttattatgttttgtttggatatgaaattttaaatttaaaataattttttttaaatgtttggaaagtttatttttattgttttttagtggtttatgttattgatgaaaagttttttattaattaagattttttttttttggaaatgaaggttttaggatttttgtgtgtatggttgtaattttgaaattttataggagtttttttaagtttgttttttttttattttttttgtttagtatttggtgagttttgtttattgatgaaatgtttttagatggggtaagtttttaagttatttagggatatgttttgtaatggattagttttttttagtaattttgatttatagtaggagttttattagaggggtatattttatttaagtaaggagaatgtattgtagggattttatttatgagttggtaaatagagataggaagttttgaaggaattggaagagaggtttgggatatttttagagagggggtaggtggggagttggtttttagtatttgagaggtattattgttagttttgtattttttacgtgtttgggtaagttagtaaatgtatttttgttggtttagttgtggtattttttatggtttgtggatataaagaatgtgtatagttttataatgattagtgttagagttgtaaaggttatgagatgggaatattagtttatggaagttagttttttttgttgttttttttgtttttgagaattaaattagaatattagtaaaatcgttatttttaagtatattagaataattttatatatttatattagttttgtttttttaggattagttatttaaggtgattttattatttgatatttatttggaataatttttatgttatgatttttagattttgtggaatatttatttagatattattattattgttttatttttatattttgtgggtgtatttgattttttaaaatatttgaaatttggttgttgattatattatagagtattatattgggtatatattttattaaaataaagtgtgataatgtatggagttgagtggtttttttgagttgattaaatgtttatggaaagttattgtatgagtgtatttttatattgttttatagaaatatttgagattggttatttataaagaaagaggtttaattggttgatggttttgtaagtggtgtaggtagtatagtagtttttgtttttggaggagttttaaggagtttttatttattatagaaggtaaagttagagttggtatttttatatagtcggagtaggaagaagagagaaggggaaggtgttatatatttttatttttttattatttattttggggggagtgggggcgaagttttattttgttatttaggttggagtgtatgtggtgggatttcggtttattgtagttttcgtttttttagtttaagcgatttttttgtttcggtttttttagtagttgggattataggtatttattattatatttagttaatttttgtatttagtagagatacggttatattatgttggttaggttggttttaaatttttgattttaggtgatttgtttattttggttttttaagtgttggggttataggcgtgagttattgcgtttaattattatatatttttaaacgatcgaattttataagaatttatttatttattatcgggagaatagtatcgagggggtggtgttgaattatttgtgagaattttgttttatgagttagttattttttattagtttttatttttaatattgggaattataatttaacgtgtggtgtgggtggagacgtattgtattattggttataagttaaaattgtttagtttataggtgttttttgttttttgagatggagttttatttttgttgtttaggttggagggtagtggtgtgattttggtttattgtaatttttattttttaggtttaagtgatttttttgttttagtttttcgagtagttgggattataggtaggtatgggttattacgttcggttaattttgtattttttgtagagatggggtttttttatgttggttaggttggtttcgagttttcgattttaggtgatttatttgtttcggttttttaaagtgttgggattataggtatgagttatcgtgtttggtttttatgtatatttttaatgtaattattgttttggtatagttttattggaaatatatattgtgagttttaaaaaattaatgtataatttaattttggttatataatttatttgtttatatttggggatatcggttgtttcgaattttattataagatatatatttgggattatttataattgataagtaagttttgataattatgatttgttaatatttttaaaataaaagttatgggttgaaaaggaaagtaaatgtaattattgtatgtaaatgtatttgaatagattgttggaatattttttagatattgtggagagtaatttgtagttacgtttcgtcgttttttgtcgttttgggaagtaggttgtagggaagataggaagaggaggggaggatattcggtgggtgggatttttttgatattgtatttttattttttttattattttcggggtttggtttttttagaatttgttggttaacggattgataatttttaagatattagcgcgtaatagagagtattttttttggtcgtattgttttttggttgtagaaagtgaggaatatatttgtattgataatagattattattgcgattatatataaatttaggtttttaagttggtggtgacgatgttgttgtttttatttgtatggaaagttttaggttaatgaggttaagataggattgaagggttggtttgtttttttatatttgtgggcgttttttgtcgggtgggacgagggattgagaaaagaaatagatatagagataaagtatagagaaagaaaagtgggtttaggggatcggcgtttagtttagggaggatttttgttagtattagtttttgagtttttttagtatttattgattattatttttattatttcggagaggaggatgtggtaggataatagggtaatagtggggagagggttagtaggaaaatatgaataaatgtttttgtgttataaataaggttaagaaaaatgtgttgtgttttgatgtgtatttatatgaatatttcggtgtattaaagagtagtatgttttatttttagttttaaggcggtttttttttattttagtagatggaatatataatcgggttttatatcgagatattttattgtttagggacgagtaggagatagatgttttttttttgttttaattgtaaagaggtattttttttttttttattaattttttttagtatagattttttatgggtgtcgggtttggggacggttaggtttttttttttttacgaggttatattttagattgttatacggggagaaattttggataatatttgatttttttaggtagaggtttatgtggtttttcgtagtgttttgtgtttttgcgtatttgagattagggagtggtgatgatttttaataagtatgttgtttttaagtatttgtttaataaagtacgttttgtatagttttaaatttattaaattttgagtcgatatagtatatgtttttgtatagggttgggggtaaggttatagattaatagtattttaaggtaaaagaattttttttagtatagaagaaaatggagttttttatgtttatttttttttatatagatatagtaatagtttgattttttttttttttatataggatgatgggagtagtttagaagatagatggtatattgttttttatttttacgtagtagggtttaagagtggtagggaaggagttgtttttagtttttgttttttaaaggaagagtggattttttaatgtttttgatatttttttttttttttttttttttgagtcggagtttcgttttgttgtttaggttggagtgtagtagcgtgatttcggtttattgtaatttttgttttttaggtttaagcgatttttttgttttagtttttttagtagttgggattatagttatatgatattttatttggttaatttttgtatttttagtagagatggggttttattatgttggttaggttggttttgaattttcgatatcgtgattgttaggtttttgagtttaagttaagttattatattttttgtgatttgtacgtatatatttagatggtcggtttttgttttaattgatgacgttttattataaaataaatgaaaatggtttgtttttgttttaattgatgattttattttgtgaaatttttttttttggtttattttggtttaaaagtttttttattgagtattttgtgatttttatttttgtttgtcggagaataattttttttttttttttatttatttaaattttataaaacggttttatttttattttttttcgtttttttttcggatttagttcgtttgtatttaggtgaaataaatagttttgttgtttatataaagtttgtttggtggtttttttatacggatatatatgaaatttggtgtcgtgatttagattgggggattttttttgggagattaattttttgtttttttgttttttgttttatgagaaaaatttatttatgatttttggtttttagattaattagtttaaggaatattttattaattttaaattcggtaagcggtttttttttattgttttttttaattttttttattattttttaatttttttttttttttaattttggtattatattttaatttttttttttttttaattttaattttttttatttattggtaaagataaaggagatatattttattcgtggatttaaaattttggcgttggttatggatttaggaaggtagttttttttttgtgtttaattattgtagggacgtttttttgattatttatttacgttttattggtgtttgattttcgtagggacgtttgttttggttatttatttacgtttttttggtggtaagttaattgtgggggcgtttgttttggttggttatttatattgtagttagggttgttttttattttttttttcgtgtttttatttttttttttaaatttgttttttttattataggtaattttttatttttaattttttttttttttttagtttgtgtttttaagaatttaaaatttttttaatttatatttaatttaaaatttaaatgttttatttttttttataatgttatttgattttaatataaatttgatagtagttttaaatagtcggaaaatggtatttttattttttttattttattagatttagataatttttgtcgtaaaatgggtaaacggtttgaggtgtttgacgtttaggtatttttttatatatcggtttttttttagtttttgtttttaatgtaattcgttttatatttttttttttttttttttatttgtttttttagttttaattttaagcgttgttgagtttttttaattttatttttttatagatttatttgatttgtttttttttcgttaggttgagttacgttttaatttttttttagtttttgtttttttattttataatttttttattattttttttttttatattcggtttagtttatagttttattttacgattagtttttttttatttgtttagtaatttttttttaaagaggtggttggagttaaaggtatagttaaggttaatgtttttttttttttattcgattttttttaaattagttagcgtttaggtttttttattaaatatgaaaaatttagtttagtttatggtttattcggtagtaattttaagatgttttatagttttagattttaaaaagttaaaaggtcgtattatttttaatatatattttattatttaatttgtttttgatattaaataaaattttaaaaattaaattttggtttttaaattttataataggatttaattaatttcgtttttaaggtgtataataatagagtagaggtagttaagtaataatgtatttttaagttgtaattttttgtttttattgtgagataaattttagttatatttttagtttataaaaatttttaaacgtttgaattatagtggttaggtatttttttagaatttttttttttaagagtttgttataagtgtcgataatttggttattaggttaaggattgtttgtagtttgggattttttttaagttacgttttatttgtgtaggattttatcgaaaattagattgtttaatttatttggtagttatttttagagtttttggaattttggtttaaggttttttgatttttttttagatttttttggtttagtagttgaaggttgatattgtttgatcgtttcggaagatttttaaattattatggacgttgggttttgggtaattttcgtagtggaaggtaagttcgttttttttttaattaatacggaggttatttattttatattattttttttttaagggttcgttttttttgtttttataagtgttgtgggtattgacggttaggtttttaaattttttaaaattttttaattttggtgttaatttagataatatttttttaagtatttttttttagttatttttatttgtttagtttttttattaggttaagatattttaattaaattatttgtttttttgattatttttaggttatagttatattttattgtcgtttttttttttagtttaaagttttttttatattttttttttgtattttttattttagtttataagtataggatatttttattttttttttggcgattaatcgtgtattttttattattttattaaaatttaattatttttattttgtttaatgttaatattttattttatagtatgttttaaaaggattaaagtttgttattattcgtttgttatattatggttttttaaagtttataaattttttttattatttttttattttatttgttttaaaattagataagttttataggttagtttaggatttgtgttttatgaattaaattgttttgtttatttattttgtggtgttaaatttatatatttttttatttttaatatatttttttataatttattattttgttttggattttaaatatgttttttttattattttttgtattttttattttagtttttttttgtttttatttagattgattttgatatttattaggtttagtaaattatttgggttatattgttataaagttttatagatagattttattattttagttaagtttaaattttttttttatttgttatgtattttagtataatttttataaaaatatatatgttttttttgttgattatgtttgattgattttttaaattttagtattttttataaaataataattttttttttttttgggtatgggtagatattttcgattttagatatttggttttgttattttaataaaattattatataaatttattaaaggaaatttagttgattttatagattttaaatttttttagtatttttttttttgttttttgaagatagttttagagattgtttttattttagttttttttgatttattttaattttttttattatttatagtcgaagtgtagggttgtgtagttagaatttttatataagaatcgggatcgcgttttgtagtttttttatttaaataatttgattttattgttttgtttagtttttacgtttgcgtgcggtagttattattattttaatatttttaggggttttaaaaattataaattatgtttaatttattttttatagtttttataatttttaaaatttgtttttttttttatatttgatgtatatattttttgttcgtttgttttttttagttgtatttattttttgttgagttttttataattattattgtttttggtttagattttaatttggttttttatattatttttgatgttatatttgatttttttgattgtatttttttgatttatttgatatttattttatttttttatattttttttttttttgttttttattttgattatatttagtttattgatggtagttttattaggtttaatcgttatatattagtaaaggtagattatgttatagtataagttattagttcgttttttagaattttttattttttttttattatggaaatttatttttaaagaaataattttttagtgttttatttgttattttattattttttagggattatttaggtttttttttttttttatatattaagtttgaggatttgttttcgtttaggattggtaaattagttttatttaatatgtttcgagttagataattaaaatattttttagtttaggtagatatttttattggatgggtagaggttttttttatagggtttgagaaggttattgtggttatttttttttttttgttagatataattttttagtttggtttttttatttttatatagttcgatagtagatcggtttttattagttaaattagttaaatagttttttaggtttttagtatttagtgaaatttttatattttttacggtttttagtatttaggaaaagtagaatagattaaaggttttttaaaaatatattttattaagtttagttattaatttaaaaaggattggataatatttttattattttttttttttagatattaggtttgttttcggaatgttatagggtatagtttatttaagtttttgtatggatgtttttttttattaggttttagttttattttagatattagattaatttggattgtgttttataaaatttgttatttttattattttttttttagttatatagttatttattgtttttaattatttatatatgttttgtttttgattatattgtcggtttatattgtttttttaagttattatagttgatattttttggtgttatttttaaatcgttatttttaatttttaaagtaaataaataatttttgttggtaaggttatgttgaatttttttaggtattttttaattagatgttttaggtttttttaatttttagatttttaatatttgttttttttttttttttatttcgtttagttttttaatttatataaaattatatttaggttattattaataattttatacgataaatgttttttttaataattttataatattattttttattataaaatttttttttagtttaattttttttattttaagtttttacgtcgtttttaatttcgtttaaagtagttttgagaaatattgtttattatttttttatattattttttaaaattttttagttttaatattttattattatttcgttttattttttttattaatataagaagataggaatgttaggtttttgagtttaagttaaggtattatattttttgtgatttgtacgtatatatttaaattgtaatataatgggaagtatttgtgtatttaaatatagaaaaggtaagtgaaaatgtggtataaaaggttataaatggtatttttatagggtatttattacgagtggagtttgtagtattgggagtggttttgggtgagtttgtgagtgagaagggaagtggatgtggaggtttcggatatgattgtgtattattgtagattttatgaatattgtatatttaggttatattaaatttatttaaaaattttattttttttagtaataattaatttattataattgttttattttataagagttttaattttttaaaattttttgattcgtgtaataatgtttggtttaaaataagtatattgtatatttatataaaaatattttttttgtatttttattttataagtttttttttatttttaatttttttttttttttttaattttttaaacgtttttgttaaaaacgaagatataaatatatatattagtttaggtttgtttagagttaggattattaatgttattgttttttattacgtcgtgttttattggaagttttttaggggttataatacgtacggatttgttattttttatgataatagtgtttttttttggaattttttttgaaggatttgtttgaggttgttttatagttaatttaaaaaaaaattagtagaaggagtatattttaaaattatgataaaaagaatagtatagtaaatatataaattagtaatatttatttattattattattaattattaggtattgtaaataattatgtgtgttatattttatataattagtagtgtagtaggtttgtttatattagtattattataaatatgtgaggaatgtattgtattatgatattatgacggttagattagtaggtgataagaattttttagttttattatgatttgtagtgattatttatttatatgattgtaaaattgtgattgaggttgggtatattggtttatgtttgtaattttagtattttaggaggttaaggttggaggattatttgatgttaaaagtttgagattagtttgggtaatatagtaagattttatttttttataaaatttaaaaaataataaaaaattagtcgggtgtggtatatgtttgtagttttagttatttgggaggttgaggtggaaggaatttttgagttcgagagttggaagttgtagtgagttatgatagtattattgtattttagtttgggtgatagagtgagattttgtttttaaaaataaataaataaatataaataatttttaaaattgtaaataatatttattgattttagatttgttgaattaatgtaggttaaggattttatatgtaattatagttttagggtaaaatgttaatattttatattttgataatgttaagtaatgttatagttgatagttttaggaaatgtaagaaaggaagaaatgtgaagaaaaatgtatttatttatttaaaataaaataaaaattaattggttgggtacggtggtttacgtttgtaattttagtattttgggaggttgaagtgggtagattatgaagttaagagatcgagattattttggttaatatggtgaaatttcgtttttattaaaaatataaaaattagttaggtgtggtggcgggtgtttgtaattttagttattcgggaggttgaggtaggagaattatttgaatttagaaggtgaaggttgtagtgagtcgagattgtattattgtattttagtttggtgatagagttagattttattttaaaaataaaatagaataaaataaaacgaaataaaaataaataaaattaattaaagaaaagttgtgaatagaatgagagaaaaatataattaaattttttatttttatagtgaaatgagtaaatgaagaaatagaagattaagaatattaagtttatggaggtaattatgagaattatagatagaatttattaaaagagagatattgtagttgtaattggtattaaggtgaaggataggaaggaagtttggatgttttattttttatttttttgtattgtttgatattttttcgtttgatgtatgatttgtataatatgtatttgtatggtataaaattatgagtaataatattatatatggttatattttggtgatatattttataaggaatatattaatgtatttgaaagttatttgttattaatgttgtttatattttttaatgttttttttttatagt

SEQ ID NO: 1980 - DNA, 18434 bp, Artificial Sequence
  chemically treated genomic DNA (Homo sapiens)
gttgtagaaaagaaatattaaaaagtatgagtaatattaatagtagatggtttttaaatgtattggtatattttttgtaaaatatattattaaaatatgattatgtatgatgttattatttatagttttatgttatataagtatatattatataagttatatattaaacggaaaaatgttaaatagtatagaaaggtaaaaaataaaatatttaaattttttttttattttttattttaatgttagttgtagttgtaatgttttttttttgataggttttatttgtaatttttatgattatttttataaatttaatatttttgattttttatttttttatttatttattttattataaagataaggaatttaattatattttttttttattttatttataatttttttttagttaattttgtttgtttttgtttcgttttattttgttttgttttgtttttgagatggaatttggttttgttattaggttggagtgtaatggtgtaatttcggtttattgtaatttttattttttgggtttaagtgatttttttgttttagtttttcgagtagttgggattataggtattcgttattatatttggttaatttttatatttttagtagagacgaggttttattatgttggttaggatggtttcgattttttgattttatgatttgtttattttagttttttaaagtgttgggattataggcgtgagttatcgtgtttagttagttaatttttattttattttaaataaataaatatatttttttttatattttttttttttttatattttttaaaattgttagttataatattgtttgatattgttaagatgtgaaatgttagtattttattttgaaattatgattatatatgaggtttttggtttatattaatttagtaaatttaaagttagtaaatattatttataattttaaaaattatttgtatttatttatttatttttagagatagggttttattttgttatttaggttggagtatagtggtattattatggtttattgtagtttttaattttcgggtttaagggttttttttattttagttttttaagtagttgggattataggtatgtattatattcggttaattttttattattttttaaattttatagagagatagggttttgttatgttgtttaggttggttttaaatttttgatattaagtgattttttagttttggttttttaaaatgttgggattataggtatgagttaatgtgtttagttttaattataattttataattatataaataaatagttattgtagattataatggaattgaaaaatttttattatttattaatttagtcgttataatattatggtgtaatgtattttttatatgtttgtagtgatgttggtgtaaataaatttattgtattattagttatataaaatatagtatatataattatttatagtatttaatagttgataatgataataaatgaatgttattgatttatgtatttattatattattttttttattataattttagagtgtattttttttattaatttttttttaagttaattgtaaaatagttttaggtaggttttttaagagggattttagaagaaggtattgttgttataagagatgataggttcgtgcgtgttgtggtttttaaagagtttttagtgggatacgacgtggtggaaggtagtgatattaatgattttgattttgagtaggtttaggttaatgtgtgtgtttgtgttttcgtttttaataaaaacgtttaaaaagttaaaaaaaaagaagaaaattaaaaatagaaaaaagtttataaaataagaatataaagaaaatatttttgtataggtgtataatgtgtttgttttaaattaagtattattatacgagttaaaaagttttgaaaaattaaaatttttataaagtaaaatagttataataagttaattattattgaagaaagtaaaatttttaaataggtttagtataatttaagtgtgtagtgtttataaagtttgtagtggtgtatagttatgttcgaggtttttatatttatttttttttttatttatagatttatttagagttatttttagtattgtaagttttattcgtggtaagtgttttatggaagtgttatttgtaattttttgtattatatttttatttattttttttatgtttagatatataagtattttttattgtgttataatttggatgtgtacgtgtaggttataggggatatgatgttttagtttgggtttagaggtttgatatttttgtttttttatattaataagaaaaataaaacgaaatagtggtaaagtgttgggattggaaaattttgggggatggtatggagaaataatgggtaatgttttttagggttgttttgagcgggattaggggcggcgtgggaatttagagtgggagagattaagttgaaggaagattttgtggtaaggggtgatattgtggggttgttagaagaaatatttatcgtgtagaattattggtgatggtttggatatggttttgtatgaattgaaaaattaaacggaataaaagaaggagaaaaataggtattaaaggtttaagaattgggaggatttaggatatttaattagagagtgtttaaggaggtttagtatagttttgttagtaaagattatttatttattttaagagttaagagtggcggtttggggatagtattaggagatattagttgtgatggtttggagaaatagtgtaaatcggtaatgtaattaagagtagggtatgtatgagtagttgagaatagtgaatagttgtatgattagagagaagatagtaaggatgataagttttatggggtatagtttaagttggtttggtgtttggaatgagattggggtttaataaaaaggagtatttatataggagtttaaatgggttgtattttgtagtatttcgaggataggtttgatatttgagaagggaaagtggtaaaagtattgtttaattttttttaagttggtagttgagtttggtgaggtgtgtttttaaaagatttttagtttgttttattttttttgaatattgaggatcgtaagggatataaaggttttattggatattaagagtttgaaaaattgtttggttgatttgattaataaaggtcggtttgttatcggattatatagaggtgggaaggttaaattgaggaattatgtttgatagaagggaagaaatgattatagtgatttttttagattttgtgggaaaggtttttatttatttagtgaaagtgtttatttagattaagaggtattttagttatttgattcggggtatgttgagtaaagttaatttgttagttttgggcgggggtaaatttttaagtttgatgtgtagggaagggagggggtttgaatagtttttgaggagtagtagaatagtagatggaatattgagaagttatttttttgaggatagatttttatgatggaaaggaaatgagaggttttaagaggcgggttagtggtttgtattatagtatagtttgtttttgttggtgtgtggcgattaggtttggtggaattgttattaataaattaagtgtgattagggtgaggaataggaaagaaggaaatatggggaaatggggtgaatgttaggtggattagagagatatagttaggagggttaggtgtggtattaggaatgatgtgggaggttagattgaggtttgggttaggaataatggtaattgtgggagatttaataaagagtgagtatagttgaaggaggtaggcgagtagaaagtatatgtattaggtgtgaggaagaaaatagattttggaagttatgagaattgtagagagtgagttgagtatagtttgtgatttttagggtttttgaaagtattagggtggtggtggttgtcgtacgtaaacgtgagggttaggtaaaatagtaaggttaagttgtttggataaaaaggttatagggcgcggtttcggtttttgtgtaagaattttgattgtatagttttatatttcggttgtgggtaatgaaaagggttaggatgagttagggagagttaggatgggggtagtttttaaagttgtttttaaggaatagaaagaggagtgttgaaaggatttagggtttatggggttagttaggttttttttagtgagtttatataatggttttgttaggatggtaaaattaggtatttaaagtcgaaagtatttatttatgtttaggaaggaaaggagttgttgttttgtagaaggtgttagggtttgagagattagttaaatatgattagtagggagagtatgtgtgtttttatgagaattatgttgagatatataatagatgaggaagaaatttaggtttgattgaagtaatggggtttgtttgtgaagttttgtggtagtatagtttaggtaatttgttgagtttgatgggtgttagggttagtttaagtgaaggtaaagagaggttgggatgaagggtgtaaggaatagtaaagaaagtatgtttgagatttagaatagaataatggattgtggagggatgtattgaggataggagagtatatgggtttggtattatagggtggataggtaaaataatttggtttataaggtatagattttgaattaatttgtaaggtttgtttggttttaggataggtaaaatgggggaatggtaaggggagtttataggttttaaaaggttatgatgtagtaggcgagtgataatagattttaatttttttaaagtatgttgtgggatgggatattggtattgagtagggtaagggtgattaggttttaatgagatggtaaggggtgtacgattggtcgttaaggagggagtagaggtgttttatatttgtgggttaaggtgggagatataaggggaggatgtgaaggaggttttgaattgggagaaaaggcggtaatgaggtgtggttatagtttaggaatagttagggaagtagataatttagttgaagtgttttggtttaataagggaattgggtaggtggggataattaaaaaggagtgtttaaaagagtattgtttaagttggtattagagttggggagttttaagaggtttagaagtttggtcgttaatatttataatatttatggaggtaagggaaacgggtttttgaaaagaaggtaatgtggagtgggtagttttcgtattgattaagaaggggacggatttattttttattgcgagagttatttaaagtttagcgtttatgatggtttaggggtttttcgaggcgattaggtagtgttagtttttagttgttaagttaagaagatttgggaaggagttagagagttttgagttagagttttaggggttttgggagtggttgttaggtgagttgaatagtttgattttcggtagggttttgtatagatgggacgtggtttaggaagaattttaggttgtaggtaatttttggtttggtggttagattgtcggtatttgtagtaagtttttgggggaggaggttttggaggaatgtttggttattgtggtttaggcgtttggaagtttttgtgggttagagatgtggttggggtttgttttatagtggaggtaaggaattgtaatttagaaatatattgttatttggttgtttttattttattattgtatattttgagggcgaggttaattaagttttgttgtggggtttgagggttagaatttaatttttggagttttatttaatgttaggagtagattgggtaataaaatgtatgttgagaataatacggttttttgattttttagggtttagagttgtaaagtattttagggttgttgtcgaatgagttatgaattgggttgagttttttatatttgatgaaagagtttaaacgttaattgatttgggagaggtcggataaagaaaaaggagtattaattttgattatgtttttagttttagttatttttttaagaggaaattgttgggtaagtgggggagggttagtcgtggaatgaaattgtaagttggatcgggtgtgaggaggggaggtgatagaaggattatagggtggaggagtagaggttgaggaagaattgggacgtagtttagtttggcgaggaggggataggttagatgggtttgtagaaaagtaaggttagaaagatttagtaacgtttggggttgggattgaggggatagatgggagggaaagaaggaagatatgggacgagttgtattgggaatagagattggggagggatcgatgtgtaaaagaatgtttggacgttaggtattttagatcgtttgtttattttacgataagaattatttagatttagtagggtagaaaaaatgaaagtgttatttttcggttatttggaattattgttaagtttgtattggggttaagtggtattgtagaagaaaataaggtatttaggttttaggttgggtgtgagttgaagaggttttaagtttttgagaatataggttaagggagaaggaggaattgagggtggaaggttgtttatagtgaaggaggtaagtttaaagagaagggtagagatacggagaaggaggtggggagtagttttggttgtaatgtgggtgattagttaaagtaggcgtttttataattgatttgttattaagggaacgtgggtgaatgattaaggtaggcgtttttgcggagattagatattaatggaacgtgggtgaataattagagaggcgtttttgtaatgattaaatataaagggaaggttgtttttttgagtttatgattagcgttagagttttgggtttacggataaaatatgttttttttgtttttattagtaaatgaaaggaattgaaattgagagaagagagagattgaagtgtggtgttaagattgaaaggagaaagaggttgagggatagtgagggaggttggagaagatagtgaaaagaggtcgtttatcggatttaaaattggtgagatgttttttgggttggttggtttgaggattagaggttataggtggattttttttatggaataaagagtaggaggataggagattgattttttaagggaggttttttaatttgagttacggtattaaattttatgtgtgttcgtgtgaagagattattaaataggttttgtgtgagtaataaggttgtttattttatttgggtgtaggcgggttgagttcgaaaagagagcgaagggagataggggtggggtcgttttataggatttgggtagataaaggaaaaagaggggttgtttttcggtaggtaggagtgggggttataaggtgtttagtaggggagtttttgagttaggatgagttaggagaaggaattttataagataaaattattagttaaggtagaaataggttatttttatttattttgtggtggaacgttattagttaaggtaggaatcggttatttggatgtgtacgtgtaggttataggggatatgatggtttagtttgggtttagaggtttgatagttacgatgtcgggagtttaagattagtttggttaatatggtgaaattttatttttattaaaaatataaaaattaattaggtggggtgttatgtagttgtagttttagttattggagaggttgaggtaagagaatcgtttgaatttgggaggtagaggttgtagtgagtcgagattacgttattgtattttagtttgggtaatagagcgagatttcggtttaaaaaaaaaaaaaaaaaaaaagatgttaaaagtattgaaaagtttattttttttttaggagatagaggttaaaaatagttttttttttattatttttagattttattacgtggaaataagggataatatgttatttgttttttggattgtttttattattttgtatggggaaaagaaagattagattgttattgtgtttgtgtagaaagaagtagatataagagattttatttttttttgtattaagaaaaatttttttgttttgagatgttgttaatttgtaattttatttttaattttgtgtaaaaatatgtgttgtgtcgatttaaggtttaatggatttagggttatgtaggacgtgttttgttaaataaatgtttgaaggtagtatgtttgttaaaagttattattattttttaattttaagtacgtagggatataaaatattgcggaaggttatatggatttttgtttaggaaagttaggtattgtttaaggttttttttcgtgtggtagtttgaaatatggtttcgtgggaagggaaagatttgatcgtttttaagttcgatatttataaagggtttgtgttgaggaggattagtaaaagaggaaggaatatttttttgtagttgagataagaggaaggtatttgttttttgttcgtttttgggtaatggaatgtttcggtgtaaaattcgattgtatattttatttattgagataggagaaaatcgttttagggttggaggtgggatatgttgttttttaatgtatcgagatgtttatgtaagtgtatattaaagtatagtatattttttttagttttgtttatgatatagagatatttgtttatgtttttttgttgattttttttttattattattttattgttttgttatattttttttttcgagatggtagagataatgattaataaatattgagggaatttagagattggtgttggtaggggttttttttaggttgagcgtcggttttttgggtttatttttttttttttatattttgtttttgtgtttgtttttttttttagtttttcgttttattcgataagaaacgtttataggtgtggagaggtagattaattttttaattttgttttgattttattggtttgaggttttttatataaatggagataatagtatcgttattattaatttaaagatttaggtttgtatatgatcgtaataataatttattattaatgtaaatgtattttttattttttgtaattaaaagatagtgcggttaggaggagtgttttttattacgcgttggtgttttgggagttattagttcgttagttaatagattttggagaaattagatttcgggggtggtggaggaggtgggaatgtaatattaggaaagttttatttatcgggtgttttttttttttttttttgttttttttgtagtttgttttttagagcggtagaagacgacgaggcgtgattgtaaattgttttttatagtgtttgaggaatattttagtagtttatttaaatatatttgtatgtaatgattatatttatttttttttttaatttataatttttattttgaaaatattaatagattataattattagagtttatttgttagttgtaaatgattttaggtgtatgttttgtggtagaattcgaaataatcggtgtttttaaatatgggtaagtgaattgtatgattaaagttaagttatatattagttttttaaggtttataatgtatatttttaatgaaattatgttaaaatagtagttatattaaaaatgtgtatggaggttaggtacggtggtttatgtttgtaattttagtattttgggaggtcgaggtaggtggattatttgaggtcgggagttcgagattagtttgattaatatggagaaattttatttttataaaaaatataaaattagtcgggcgtggtggtttatgtttgtttgtaattttagttattcgggaggttgaggtaggagaattatttgaatttgggaggtggaggttgtagtgagttaagattatattattgttttttagtttgggtaatagaagtaaaattttattttaaaaaataaaaaatatttgtggattgaataattttagtttatgattagtaatgtaatgcgtttttatttatattatacgttgaattgtaatttttagtgttggaggtgggggttggtgggaggtgattggtttatggggtagagtttttatagatggtttagtattattttttcggtgttgttttttcgatagtgagtgagtgaatttttatgagattcggtcgtttaaaagtgtgtggtggttgggcgtagtggtttacgtttgtaattttagtatttgggaggttaaggtgggtagattatttgaggttaggagtttgagattagtttggttaatatggtgtaatcgtgtttttattaaatataaaaattagttgggtgtggtggtgggtgtttgtaattttagttattgggaaggtcgaggtaggagaatcgtttgaattagggaagcggaggttgtagtgagtcgagattttattatatgtattttagtttgggtgataaagtgagatttcgtttttattttttttaaaataaataataaaaaaataaaagtgtgtggtatttttttttttttttttttttttgtttcggttatgtgaaggtgttagttttggttttgttttttgtggtgggtgaaagttttttgaggtttttttagaagtagaggttgttatgttgtttgtattatttgtagaattattagttaattgaatttttttttttataaatgattagttttaggtatttttgtagagtaatgtgagaatgtatttatataatagttttttatgggtatttagttagtttaggaaagttatttaattttatatattgttatattttattttggtgggatgtgtatttagtgtgatattttgtggtgtgattaataattaaattttagatattttaaaaaattaaatatatttataaggtatggagatgaagtagtggtaatgatatttaaatagatattttataagatttaaaagttatgatatgaaaattattttaggtaagtgttaggtaataaaattattttaggtgattaattttaggaaaatagaattaatgtgagtatatagaattgttttaatatatttaaaaatagcgattttattaatattttaatttagtttttagaaatagaaaaaataataaaaaaaattggtttttataaattaatatttttattttatggtttttataattttggtattaattattgtaaagttgtgtatattttttatatttataggttatgaggaatgttatagttaggttagtaaggatgtatttgttgatttgtttaggtacgtgaaggatgtagggttggtaatgatattttttaaatgttggggattagttttttatttgttttttttttgagagtgttttaaattttttttttagtttttttagaattttttatttttatttattaatttataggtaaggtttttataatatattttttttgtttaggtgagatgtatttttttggtagggtttttgttataggttagaattgttgagaaggattaatttattataaagtatatttttgaatgatttaaggatttgttttatttgaagatattttattagtgggtaaaatttattaaatgttaggtaggaggagtgaaagaggaataaatttggagagatttttatgaaattttagaattgtaattatgtatataaaaattttaaaatttttatttttaaagaaaagagattttgattaataaaaaattttttattagtaatatgaattattggaaaataatagagataagttttttaaatatttagagaaaattattttgaatttaaaattttatatttaggtaaagtatagtggtttatttttataatttcggtattttagaaggtgtaggtagaaggagattaggagtttaatattagtttgggtaatatagtgagatttcgtatttataaaaatattttagaaagtagttaagtgtggtggtataagtttgtagttttagttatttgggaggttgaggtaggaggatcgtttgagtttaggaggttaaggttgtaatgaattatgattatattattgtattttagtttgggtaatagagtaagattttatttttaaaaaataagaaaattatttttgattaggttaagaaaattatttgtggtttatgtttgtaattttattattttaggaagttgaggttggaggattttttgagtttaggagtttgggattagtttgggtaatatagggaaattttatttttattaaaatttttttttaaattagttggttatagtggtttatatttgtggttttagttattcgtgatattgaggtgtgagaattgtttgagttagggaggttaaggttgtagtgagttacgattatgttattgtattttagtttgggtaatatagcgagattttgtttttaaatcgataaatgaaataaaatgaaataaaataaaataaaataagatagggaaattttatatttatttgaataattaaataaaaaggtataagtattttgagatatgtaaaaatttagtaagtttatagttatacgatttgtatgaaaaggttattttaggatatgttttagtaaaataagtaaaaatgtagttaaaggatgaaatgagagtgaagaaaacgttgttgttgaatgagatttagtagaaataaagaaaatgaaaaaaaattaaaaagagatttatttagttttagaattttggaaatattttgtgagggtatatggaatttatattttttgtttaagtgagagataatattgtttgatggttaggatatggggtttggaggtagattatttggagttaattattatttatagtttgatttgtaaattttgtaatttttgtagtaggtttatatataggtacgtttatatgaagatatatattagtacgtaattatttgtaaatttgggaattaatttgttgaagttaattttatttttattcgagtattttataattgtcgatattagtttttgatttttttatatattttaataattttttatttttttattttttttattattttttattaggtgaaagaaagttatttatttatttttaggtatatttgaatgtttttttttatttaagatattgttatataatgttagtttttgttttttttttagttaataaaattaataaaaggggatacgtttttttaattttttggagttttgtttttttaaggtaaagatgtgatttgttaaaaagattgttgtaaaatgatttttatagtttttttaatgtgttttttttaggtatagaatgttatagagaaaaaaattaaatattgtataaatatattattatattaattagatattggtgttattatttgtgttttgagttatattttttttttatgtttatattatatttttttttttttatttttttttttgaataattttgattagattttaagtattagattaaagaaagattaaagaaggttaaaattatatgtattttgttagtaaattttatttagtaagagagattttgtttagtaagaacgtgaaatgaatatttttatttatttggatgattgttagtttttttttttttttttagtttaaatttagatattttattagggaagtgtgtggtaaatagacggtattttcgaaagtgaaagtaaagtttgaaaaaaaatgtttttatgtttggtgtattttaagaagggtaaagggagaaaataaaaataatttttgataattttagagaggcgttttaaatcgtttttgaaaaatatttagtttttattttattttaattttttttaagttgagatttttggattttattgaaagggttatagatttagtaatagttaaagttgaaagtggggattttattatttgatgtgggcgggtttggatttttgtaagttaaggaataatagtgaattttttaattttttgttagatttatgcgaagttgttagaattgagtagtgtatggttatagggatagaaaaaaaaatttttaattaaagttgaagtatttttttttttttcgtttggtttttatttttttgtaatattgtaaaataatatcggtagaaattaattttttgatttaggaagaaattgagttttatagtagagaaagagttaaatatggtaaagttgagagttagttttatttttgttgatttatttttttacggttagacgcgttagggaatagattagtatgtttagaaaagtttagattaattaagaatttcgtttttaatttgttttaatgattttaattagttaagtaaatgtatttgttaagaaatgaatttatttttttttattatagatgtgttatgatttattataattatattgttatatagtgaaatattataattggaaggaattatagattatttaatttaatttttttgtttgagaaattaggaaaacgaaatttagggaggtgagtggtttgtttaagaatatgttataagttattatatgttttaattatataagttataaaataattggacggttgggatatggtattagtttgaatttattgtagagttgatggtaagaaataagcgtgtattatggtgtaaagtgtttttttgtgggttttagttttagttagatcgttttatagttattgggtttagggttatatgtttttgatttttatttgtgatatttgtaatataatattataagtaaatagatgttttgagtacgtgattgttttttatatttatttattgggatgtttaggaaaattttattaatatttaaaagattttttttttgtgagcgttttgaaggtagggtgaggtttattttttgtattatagttttttagtaattttttgaggtagattgtttttttggtttttaatgaaagagattcgtttttagaatttaaatttttgtgtggtttttttttacgttgattttaggtttggttatttgattagttttgattagtgggatattagtaagtatgtaataaggttttattgttaaatacgattatttaggtttgagaagtaagtaaataaatgattgttgttttaaatttaaaaaaattggaatggtgttatatgtattattagcgaaataaaatatattattttaataattttttatatttattttttatgttttatgattttttatatagattaaattttttacgattttggttgattaatgaatggttttcgataaataaattttattgatggttttttgatgtagtagtttgggtttaatattagtttatatttagatattattagtttttaatttttgttagtttttaaatataatatagattgttttttttttattgtatattttttaattatgtgtattaatttatttagttatgatggtgattggagtaatagtgaaaaattttattttttttttttttaaaagaattaaggttgggagtagtggattatgtttgtaattttaatattttaggagattgtttgagtttaggagtttaagattaatttgggtaacgtggtaaaattttatttttataaaaattataaaaattagttgggtatgttggtgtatgtttatagttttagttatttgggaggttgaggtgggaggattatttgagtttaggtaaatttaagtttgtattgagttatgagtgcgttattgtattttagtttgggtaatagagggagattttgttttaaaaaaagagagagagagaattaaaaaaaaatgtatgtttataaatgtaaaataataaatttagtaaatattgatattttatagtattatagattagttaattttagaataatgggaagttgtatatttttagtaaaatagagatttatagaattttagaagttaaagttttttaaatttatttatattttaaaaattttaagttttttttttttatttgaggggtttttttaatgagagtttagtaagataatatatataaaatttttggaagaattatttgataaaatatagtaagttatagagatcggagtgataagttagatataattagtaaattattatttatatgttgaattatatagatattgtttttttttgttcgtttttaataataatttttaataaaatagtcgtttttattttttttaatttttttttttttgagatagagttttgttttgttatttaggttgtaatttagtggcgcgattttagtttattgtaagtttcgtttatcgggtttaagtaatttttttgttttagtttttagagtagttagttgggattataggtacgtgttacgacgttcggttaattttttgtatttttggtagagacgaggttttatcgtgttagttaggatggtttcgatttttttatttcgtgatttatttattttggttttttaaagtgttgtgattataggcgtgagttattgcgttcggtcggtagttgaaagtgatattttttttttaatgttatgagatatgtattgttttatttttttattttaagttattttatcgaggtatgatcgatatataaaaagttgtgaatatttaatatatataatttgatgagtttgaagataagtatatttttgtgaaattattattataatttatattataaatatatttattatttttaaaagtttttttttattttatttatttattattatttttgtgatatattataatatgaaattatttttttggtaaatttttaaatatataatatagtattgttaattataggtattaaattgtatagtagatttttagggtttatttatattgtataagttggatttggtgttttttgattaatatttttttgtttatgtttttttttagtttttgatagttattatgttattttttttttttatgagtttgattattttagatttattatataaatgatattatgtagtatttttttgtttttttgtatttggtttattttatttagcgtaatattttttgggtttatttatgtcgttataaatggtagaatttttttttgtaaggtagaataatattttattgtatgtgtatgttatattttttttatttatttatttattaatgggtatataggttgtttttatgttttagttattgtgaaggtaatagtattgaaaagaataaaatatttaagaaaaaatttaaagaagtgaaagatttgaatattgaaaattataaaatattgatggaagatattaaaatagatataagtaaatgtaaagatattttgtgtttatggattagaagaattaatattattaaaatgtttatattatttaaagtggtttatatatttaaatataatttttattaaaattttaatggtatttttatagaaatagaaaatttttttaaaatgtatttgaaattataaaagattttaaatagttaaagtaattttgagtaagaataaagttgaaggtataaaatgttttgattttaaagtatgtgataaggttatagtaatcgagatagtatggtattggtttaaaaatagattaatggaatagattagagagtttataaataaatttatgtatagatggttaagttttttgatagggttgttaagaatatataatagaggataggatagtttttttagtaaatggtgttggaaagtttagtatttatatgtaaaagaataaaattgaattttgttttatattatatataaaaaatttatttaaattagtttaaatatttaaatatgagatgtgaaattgtaaaatttttagaagaaatatagaggaaaaagttttttgatattggttttggttagtgatttttttggatatgatattaaaaatttacgtaatataagtaaaaatagaaaagtggtaatattttgttgttttttataaatttatgaaatggatttaggtgaatggggttttttttttattaataatgttatgatacggttgtttagtttttaggttttgaatttaatatttatttattaaaattaaaagtaaaattatagatataattttattattattttttatttaaaatattttaattaaatttattaggtttttaataaatggaaatataaatgtttgataaaatttttaagtgattatagaaggaagtttgaagtattaaaagtaagttataatttattataattcgattgaattggttattggagagtttatgattatgtaaattgatttttattttataatgtaaattttaaattaataggagaaattaaaagaaagtttagagttggaagggatgttgttgtttttgaatatgttttttgttttttatttaagagtaatttttatttgtattatgggatgattttataataagaatatgagagttggtttttaaaaagtaggaagtaaaagtggaaagaattggggagagggaagttttattattataaatatttgttgataaaataggtaaatttaaaatttaaaaagaaatttttaatatagtttatagtatgtatagaatgtttagttttattttttat

SEQ ID NO: 1981 - DNA, 5750 bp, Artificial Sequence
  chemically treated genomic DNA (Homo sapiens)
agttttagttattcgggaggttgaggtagaagaattttttgaattttggaggtagaagttgtagtgagttaagattgtattattgtattatagtttgggtgatagagtgagattttgttttaaaaaaaaaaaaaaaaaggatatttgggattgtagggaaatattattgtttgtgatatttttgtataataatagattatataagaatttgttatatttttggtatttgagatggatttgataaatttatttgttttttgtttgtttggtatttttatggtttatattttttttgtcgtttttggaggtaatagtatagtttataatttttatagtacggtgttatttttaaatggagttttaaggatatggatttagggatgtgggggagtttttatttaggtttggtagtgtgggtttagagagtagatggagtcgagttaatgtatttttatgttagtatcgtgcgttagatatttagttatagacgtagttttgtgtttattgtgtttgtgtgtttgtgtttttgttttggatagaatatatttaatagcgtatttggattgatgaataatttttaaatatttggatatatggtaagtaggtttttgtttgtatttttgttttggggattgtatagtgttgggggtggtttgaagttggagataattattgataagttttagtatatgagtggatgttatttggagaaagggtagaataaggaggaaaggtgagtaaagtcgatggttgttgatattcgtttttttttatgattcgtatttttttttttttattttgttttttttttttttgattttttgtttattttttttgttttaagtttaaaaataatttatttttttttaggttttagaatatttattgatattataagtattaggtatgtttaatagtgattattagtttgggtgtttggagtaggggtggcgatattgaattttgaaagaatagattttttaggtagaaaataagtgtaaatagtgaatattttacggaagagattttttttaagatgcgttttggaagggcggaagaatattttataggaagtttattttgagggttttttttttttaaatgttttttttattttgtttagaattgttgggtttttatgttatttagttttaaagtatttagttgtttgagatatttaagattagatttatagttaattaaaatgaaataaaatttattttttggtttatttatttatttattttttttttattttatttatttatttatttttttgagatggagtttcgttttgtcgtttaggttggagtgtagtggtacgatttgggtttattgtaagtttcgtgtttcgggtttacgttatttttttgttttagtttttagagtagttgggattataggtatttgttataacgttttgttaatttttttttgtatttttagtagagatggggttttattatgttagttaggatggtttcgattttttgattttgtgatttttttattttagttttttaaagtgttgggattataggtatgagttattgtattcggtttattttttggtttagaatgagatgtttaggatgtgatgaaatagattattaatattgtttaggatggatgaaatatattattaatattattaatattgttaaagtgttgttgttttgtcggggttatttttgatttagtttgagatggttttatggaatagaaaaagtttttgttgtatttgaaagattatagggttataatggataaagtaatatgatatatgttataaagtaaatgaaaattatattaaaagagtattatatttttggttagtttagatagtatgtatatttggttaattatataatttgatttagtttattacgatgattttatattatataaaaatgtatgtagtaatatgaattttttttttttttttttttgagatagtttagttttgttgtttaggttggagtgtataggtgtaaatatggttgattgtaatttcgattttttaggtttaagtaatttttttattttagttttttaagtagttagaattataggtatatgttattatatttagttaatttttgtattttttgtagagatagggtttgggtattttgtttaggttattttgaatttttgggtttaagcgatttttttgttttagtttttttaagtgttgagattataggtgtgagttattgtttttagttatgaattttttaaacgtttgagtaaagttgagtatagtttttagtagtagaattttgaagtggttgattttgtttaattgtgggttggtaaaattaatgttgagatttttttagtttagtaaagatttttatgttattggtataaaagtttgaaatagtgagttaattattgtgttgggaaattaaatatgttatttttagaggaagtaatgtttttgtttatagaatgtttaaaacgtagattagtgagtagtatttagttaaatgaaatatggtttagttaaatgttatattgtaatgttaaatagagtattatatgtaaataaggagattatttggttagatggtgatttttaaagtgttaggaggggattagtagttcgatttttatggtgtgatatttttatatttagttaatttttgttaaagtggggtaaggagggattttatagatgttataggtaagataatttttagatgatcgttagtatttgggaatatattttgtaggtagtttatgcgtttttttttttttttgttatgatttgttttgtggtggttttattgatggttagtgtgggaggtagggaaggaatattttaaattagtaagtttgattatagtaatttttatttttttgagaattatgtgttaagtattgagttaagtattttatgtttatcgttttatttaatttttatttacgaggaagatgtatggtgttattgtatttgtaagatgtgtttgtaaaaatagagttagggaggttgagaaatttgtttaagattatataattgaggtaggagaatggggaatatgaggcgtgagagagtaaagggaataaaaattattgggaatcggtaattttttttattttcgagagtggttagggagagagaggttgtttgagggaaggaagttcggtaggattcgttgtagatttagggttaagggaagtttcgcgggaggaaacgcgggcgcggtggggttggttttaggtacgcgggttaagggcgggagggtcggatacgaagttataaggtttttttttttttttttttttttcgtttgtttttttttgtttttgcggtttgattttcgagtttttttgtttgtaggcggcggtagaacgttcgtatttgttcgtattttagcgttgttttttaatcgagtcgcgtcgcgttttttttttttgtcgggagagttcgtgttgggaatcgcggggtaggaggacggtttaagttattttcgatgtttttttttagtttacgtttgttttagttatagtttttttggtttttttgaggttttttagttgtttaatgatgggtaggtttatttatagtttggagtagtcgtttttttttttttttttttttttttttttttttttagaaatatttttttttttttttttttattttttttttttatttttttttttttttatttttttttttttttattttttcgttttatttttttttttttttatttttttttttttttttttttttttttttttttttttgtttttttttttttttttttttttttttttttttttttatttttttttttttttttttttttttttttttttttttttttatattttttttttttttttattgtatttttttttttttttgttttttttgtttttttttttttttttttttttttttttttttttttttttttttttttgtggttggagtgtagtggcgtaatttcggtttattgtaatttttattttttaggtttaagcgatttttttgttttagttttagtagttgggattaaaggggtttatcgttattattttttgttaatttttgtaattttagtagagataggtttttgttatgttggatagtttagtgttaaatttttgattttagatgatttatttatttcggttttttaagtgttgggattataggtatgagttatcgcgtttggttttttttttttttttttttttttaaagaaaaattgaaattatggttttttaaaaattttttttagtttttagttttatcgaattacgttttggttattgatttgtcgtgtgattgttgtgttttttttgtttttatttttttttattttttttttttttttttttttgttatttatgttcggaggagtacgataagggattaggtcgatttgggttttaattttgtttgttttttgttttgttgacgttttaattttatttgtagttttattttttttatttgtatagtgtttttttagtaataatagtagttatattaagttttagggttttttcgaggatagtgtgtatttatcgtagtgtatttttgatgtttggtatatcggttgtgtttaagtaatggtagttattgtattatagtgattatggagttaggggatcgtatatggtaaaatgttgattattgttttgaatttggttttatttttttaattttaaatttagtgttttaaggatatgttaaatgttttgttttggagagttattttaagggataaaatcgtttttttagcgttatttgtgatatattttgatagtagagagttgtttttaagaagtaatttgaagtgttattattaggtagggacgggggttttaggggatttcggggttagtagatatgaaatgaatgattttatagggttgttatagagttgtggtgggaattttttatgagatttcgtttttggttgagttatcgtatttttgtgtttgatttgaagttttttcgagttgtagaagtttgaagattaaggagtggaaagtttttcggtagttttgagattttaaggtttgtttatttgggggagtgggtgggggtattgagaaggggtgagattggaatttttgttttttttgtttatttttagatttttttttttaatatgtaataatttttttttaatagttttttaaataaatattaataatttagtttgaagagttttttattttttagttttgttattatataaattttatattttaaaatatgtttttgtttaagaaaatgtgttagtgagttgaatagggaggtttttttatatgttagtagttaggtgtttagttaaagggggaagagtgattatgtgatagtttttttttgaattgaattgtttgatgtttttgatagattttttttgtaaggagtttattttaggggtaataagtaattggtattattgttggttggtattgtaaagtatttatgaaagtttttaaaagtttttgttattgttatttttgtattttggtagaatatgatggaaaatgtatttttaaattttggtaaatcggtataaagttgtgtgtttaattacgtttgttttgttttagtggtttttatgaatttgttattttttcgtaatattgtattattaattgtttttgaaaaattttgagttatttttttatagaattgtataagtaatgattgtaatatagataattttgaaaggagaaattatttttttttggaaatgtttattttttgtaga

SEQ ID NO: 1982 - DNA, 5750 bp, Artificial Sequence
  chemically treated genomic DNA (Homo sapiens)
tttgtaaaagataaatatttttaaggaaaggtggtttttttttttaaaattatttatattgtaattattatttatataattttataagaggataatttagggttttttaggaataattaatgatgtaatattacggaaaagtagtagatttatagaaattattaggataaggtaggcgtgattaaatatatagttttgtgtcggtttgttaaagtttgagggtgtattttttattatgttttgttaaaatgtagaaataataatagtaagaatttttggggatttttataggtattttgtagtattaattagtaataatgttaattatttattgtttttgaaataaattttttataaagagaatttgttaggggtattagataatttagtttaagaagaagttattatataattatttttttttttttagttgaatatttaattattaatatgtggaaagatttttttgtttaatttattaatatatttttttaaatagagatatgttttgagatgtgaagtttgtatggtaataaaattaaggagtgaaaaattttttaggttaagttattgatgtttatttaaagggttattgaagagaagttattatatattaggagaaaaagtttagaaatgggtaaagggagtaaaagttttaattttatttttttttagtgtttttatttatttttttagatggatagattttgagattttagggttgtcggagaattttttattttttggtttttaggtttttgtagttcgagaggattttaggttaaatataggagtgcggtgatttagttaggggcggggttttatgggaaatttttattatagttttgtgatagttttatgaaattatttattttatatttgttgatttcgaaattttttagagttttcgtttttgtttgataatggtattttaaattgttttttggaagtagttttttattgttaggatgtgttatagatgacgttgggaaaacgattttgttttttaagatagttttttaggataaagtatttagtatgtttttaaaatattggatttgagattagaggaatgaaattaaatttaaaatagtgattagtattttgttatatgcggttttttaattttatagttattgtaatgtaatagttgttattatttgagtatagtcgatgtgttaggtattagagatgtattgcggtgaatatatattattttcgaaagaattttagaatttggtatgattgttgttgttattgggagaatattatgtaaatgaggaaagtggggttgtaagtggaattagagcgttaataggatagggagtaggtagggttggaatttaggtcggtttggttttttatcgtgttttttcgggtatgggtgatagagggaggaaggagggagaaatggagggaaatggaaataggggaagtatagtagttatacggtaagttaatgattaggacgtggttcggtgaagttgagagttaggagggatttttagaaaattatgattttaatttttttttaaaaaaaaaaaaaggagaaagagattaggcgcggtgatttatgtttgtaattttaatatttgggaggtcgaggtggatggattatttgaggttaggagtttgatattagattgtttaatatggtaaaaatttgtttttattaaaattataaaaattagtagggaatggtggcggtggatttttttaattttagttattgaggttgaggtaggagaatcgtttgaatttgggaagtagaggttgtagtgagtcgagattgcgttattgtattttagttataaaaaaaaaaaaaaaaagaagaagaagaagaagaagaggaagaggagggtagagaaagtagaaggaaaaaaaagtatagtaagaggagaggaggagtataaggagaaagaagagggagaagaggaggaggaggagaaaaataaagagaaaaggaggaggaggaggaagaagaaaagaatagaaagagaaggggaagaggaagaggagaaggaagaatgaggaggagaaagaatgagacggaagaatgaggagaaggaagagtgaggaggagaaagaatgagaaggaagaatgaggagaaggaaaaaggggtgtttttggaggaggaggaggaggaggaggaggaggaggaggcggttgttttaggttgtagatgaatttgtttattattgagtagttggagaattttaggaaaattaggggaattgtggttggggtaggcgtgggttggggaaggatatcgagagtagtttgggtcgtttttttgtttcgcggtttttagtacgagttttttcgatagaagaggaaaacgcggcgcgattcggttgggggatagcgttgagatgcggatagatgcggacgttttgtcgtcgtttgtaggtagagggattcggagattaggtcgtagaagtagaagaaggtagacgggaaggaggaggaaggaaaggagttttgtggtttcgtgttcgattttttcgtttttggttcgcgtgtttggagttagttttatcgcgttcgcgttttttttcgcgggattttttttggttttgggtttgtagcgggttttgtcgagttttttttttttaggtagtttttttttttttggttattttcgggggtgaggggggttatcggtttttagtgatttttattttttttgtttttttacgttttatgttttttatttttttgttttagttgtgtaattttgagtaaattttttaatttttttaattttgtttttgtaagtatattttataggtgtagtgatattatatatttttttcgtgagtgaggattaaatgagacgatgagtatgaaatatttagtttaatgtttggtatatagtttttaagaaagtaggaattgttatgattagatttattggtttgaaatgttttttttttgttttttatattgattattagtagagttattatagggtaagttatgatagaaaaggagaaaaacgtatgagttgtttgtaaaatgtgtttttaaatattgacggttatttgagagttattttatttgtgatatttgtgggatttttttttgttttattttggtagaaattggttgaatgtgagagtgttatattataaaaatcggattgttgatttttttttaatattttgaaagttattatttaattaagtaatttttttgtttatatgtggtattttgtttaatattgtagtgtgatatttaattgggttatattttatttaattaaatgttatttattagtttacgttttggatattttgtaggtagagatattattttttttgaaagtgatatatttagttttttagtatagtaattagtttattattttaggtttttatgttagtaatataagagtttttattgagttaaaagagttttaatattagttttgttagtttatagttaaataaagttaattattttagaattttgttattgaaggttatgtttaattttatttaggcgtttaaaaaatttatggttgggaatagtggtttatatttgtaattttagtatttagggaggttgaggtaggaggatcgtttgagtttaagagtttaagatgatttggataagatgtttagattttgtttttataaaaaatataaaaattagttgggtgtggtggtatgtgtttgtggttttaattatttgggaggttgggatgggaggattgtttgagtttgggaggtcgaggttgtagttagttatgtttgtatttgtgtattttagtttgagtaataaaattagattgttttaaaaaaaaaaaaaaaaagaatttatgttattgtatgtatttttgtgtggtataaaattatcgtagtaagttaagttaaattatatagttaattagatatatatattatttaagttagttaaaggtgtaatatttttttggtataatttttatttgttttataatatgtattatattgttttatttattgtagttttgtaattttttaaatgtaataaaagttttttttattttataaaattattttaaattaaattagagatgatttcgataagatagtaatattttagtagtattaataatattaataatatgttttatttattttaagtagtattaataatttgttttattatattttaagtattttattttaaattaagaaataggtcgggtgtagtggtttatgtttataattttagtattttgggaggttgaggtgggaggattataaggttaggagatcgagattattttggttaatatggtgaaattttatttttattaaaaatataaaaaaaaattagtaaggcgttgtggtaggtgtttgtagttttagttattttggaggttgaggtaggagaatggcgtgaattcgggatacggagtttgtagtgagtttagatcgtgttattgtattttagtttgggcgatagggcgagattttattttaaaaaaataaataaataaataaaataaaaaaaaaataaataaataaataaattaagaaatagattttattttattttgattgattataggtttaattttgaatattttaagtagttaaatattttgaggttaaatagtatgaaggtttaataattttaaataggataaaggagatatttagaaagagaaagtttttaaaataagttttttataaaatattttttcgtttttttagggcgtattttagagggaatttttttcgtgggatatttattgtttatatttgttttttgtttgaaagatttatttttttaagatttagtgtcgttatttttattttaaatatttaaattagtagttattattagatatatttggtgtttgtgatgttagtaggtgttttgaggtttgggaaggagtaaattgtttttaaatttggaataaagaaaatgagtaggaaattaaagaggaaggaggtagagtaaggagaaggaagtacgaattataaggagaggcgggtgttagtagttatcgattttgtttattttttttttttgttttgttttttttttaggtggtatttatttatatgttaaggtttattaatagttgtttttaattttagattatttttaatattgtgtagtttttaggataagagtataaatagaggtttgtttattatgtgtttaaatatttagaaattgtttattaatttaaatacgttgttaagtatgttttgtttagagtagagatataaatatataaatataatgaatatagagttgcgtttgtgattgggtgtttggcgtacggtgttggtatagggatgtattaattcggttttatttgttttttggatttatattgttaggtttgggtgaagatttttttatatttttggatttatgtttttgaaattttatttgagggtgatatcgtgttgtgagagttgtgagttgtgttgttgtttttaagaacggtagggagggtgtgagttatagaagtattaggtagataaaaggtaagtagatttgttaaatttattttagatattaagggtgtaatagatttttgtataatttattattatgtaagaatattatagatagtggtatttttttatagttttaagtattttttttttttttttttttgagatagggttttattttgttatttaggttgtagtgtagtggtgtaattttggtttattgtagtttttgtttttagggtttaagggatttttttgttttagtttttcgagtaattgggatt

SEQ ID NO: 1983 - DNA, 6050 bp, Artificial Sequence
  chemically treated genomic DNA (Homo sapiens)
ttttttttaatttttttattttttcgtagttgatgttttagatttggtttggataggggaatcgtgaggggaaagaattagttgtataaaatgattttttgatattgggatattttagatgtatggtatttttgttagaattatagtgttagtaaagaggtttgttaaatttgaattgtgataattagaaaagtttagttaaggttatgtaaggggttaaaaagatatttggttgagggaggaggatatgtttttattttttgttatatttttttatgaaattaaattttagtagatttatggttaagaaagagtagaatatatttttatgtagtatttaaggggttttgattgatgttttttattattattatattttaagttttagggtatatgtgtataatgtgtaggttagttatatatgtatatatgtgttatgttggtgtgttgtatttattaattcgttatttagtattaggtatattttttaatgttatttttttttttttttttattttataatagtttttagagtgtgatgtttttttttttgtgtttatgtgtttttattgtttagtttttatttgtgagtgagaatatgcggtgattgatgttaaatgattttacgtatatatagaattagtgggattagattttgtgtttatgtgtgtgtgtttatgtgtatgtatataattattttattaagtagttgttttttttggtgattgattgttttattagtttaggaattttttgattgaatttgttcgtatttgaaagattttaatttgtgttttgaatttttatttatttatatatatttaaattttgaaatttagtatagtaaaattaagttaaaataaataaaaaaatttattttttgataggaagttagtatatttgggttttaattagttttttaatattagttttaaaattttgggtaagttagttaattattcggaggttgtttaattttttttttttttaatttttagtatattatttgttttgattaggtaaagttaaagttgttataagatttaaggtattattgattaaaatgttttagaaattataatattatataaaagtataaggaattattatatttttttaaatgaagagattatttaagaaaaataaaatgttggaaaatagtttttaaaaatttttttataataattatttttttgatgaattttatattgatatttaatttgaagttttgaatattattttttgaataatgaattgggtttatatattaaagtgttttaattaaaggtttgtttaatttattagagttattaagtttacgtttagattaaggtagtagttagattggtgtgataatttgtttttaattagtgatttaaagttgtgattattttgatgttatcgaatggttatagtttgtaaaaggtaattttgaattattttatagtttttaaaaggttgttattgtaaagtgaaatatatattgtaaaaatgaagataatgtatagttggtaggaatattgttaagaatagtgggtttgagagttgatttattttatttaatttttttaaaatattttagtgttttttttttttattaaaaatattagtagttattattaaagatttatttgtatgtataaataggaaagtattttttaaaaaaattttaaggttttaaatattttattataaatattatagaaaatattaaaaattttttaatatgtattttaaagtatgttttttatgtggtgaacgttttaattaaatatttttttagaagtttttataatattaataaaattagtatattttttttttttagagagttatagtggaggtaaaaggagtggtttgtaggatggagaagttgtattagtgttattggaagtgagttattatttgaatttgttagtttatgttgtagtatttagattagtgggtgttttgtgattatattttttgcgatttaaattaagatttaaaattgatttttattttgagatttatattttattatttaatgttatttggttattgttttagttttaaaatttttgatttgttattttgatatattttaggataatttaagttaatagtttaatataaaaatttttttttggttatatgttttgaattaggttatatgttttgtatttataagtatatataggatttttatttttagtaatttggtagtaaaagaataagtagattttttaggagttaaagttaagtttgggaattgttgttaggtggtatatattttatagtttatgtttgtttttaagataaggttttattttatcgtttaggttggagtgtagtggtacgattatagtttattgtaattttgattttttgggtttaagtgatttttttattttagttttttaagttgttgggattaaaggtatttattattatattcggttaagagacgaggttttattatgttgtttaggttgattttgaatttttgagtttaagtggtttttatgttttgattttttaaagtgttgagattatagatatgaattattatatttggtatatgttatagttttgagagtttgaattttaatttcgggatttttggtaatttatttataatattttagaaatatattgttattaggatgagtagaaatttatttagatagaaattattataaattattgtaagaaaaatgtttgttagttttgtatatatttattttttttttgattaaaaaataatttttaatttgagtagaataattttgttatgtttaatagatttaggatagatttattttaaggtaataattttttaatttttttttttttatattggattggtttaaattatttagtttgttttattaatggtttttaatagtttattttaatatatgtaaaaagtagtaattaatatgttatagtttggtggtaaatattttgatgttaaagtttatatatttttttgtttagggaatagaaattgggaagatagatgtagttattatttgataatgtatttaaattttattttattttaggattttaaaattttgtaatagttatatattgtatttttaagatttagatttgtttttttttttgtgttttatttttttgtagtaatatttttatttttttattattatgtttttatttttttttttttttttttttttttgttaattttgaaagttttgttgtttacgtgtttgaaaatttttaatttgtttttttttttttagtgttagtaggtttattttttgttttgtaagttagttttgtttttttatagtatgatatttgatgttggagggtcgtatttttaaaaatgagttagttggtatatggggttattattaatttttagtttttttgtttgggagatataagtttggaagtaattttggggtatttatttataaggttggtggagattaggtgtgttatataggtgatttgtttgttttttgggggagagggtggagtgaaatttttgtatttgtgttatagttaagttattgttatttttagtatgttttagtttttagtttttatgtaattttgtgtaaaattgaaaatttaaatatattgtaaagaagatttaaaataaatatttgagttgttggagtttttttttttttttttttttttttttttatttttgtttttggaatttgaatgaattgtagtgagggtaattttgagagtttgataaagaagtgaggggttgttttttgtttttgtttttgtttttagttaagaaatttagaaaataggtttgtgtgtgtgcgtgtgtgtgtgtgtgtgtgtgtgattgattttaagatttttgttagagttgtttaaagttggaagtttaaagttagtgagaagtttataaattaggattttgtaatgttaatttgaaaatttagtttttgattttaaaaaatattttttatttagtttgggaatttttaagtgttagaaattaatattatattgatttatttattgttgttgatgttgtttataaaagtgaatagatagggaaatattgatttatatttcgtgaaatgaaaatgaaaggttttttagtgatttagaattttaaatatttttatataagagagtagtagtatatttagaaataataaagtaattggtaattgtttaaaattgaagttaatttatagttatttagtgtaaaattttattttaggtgatatatttttgataggtaatatatatagtaagtgtatttttagggaaatagttttattgttgaattaagataattattattagaatgttgtatttgatttaagtgtttttaaatttattaaggtattagattttagtttgaattgtttggagtagcggtagcggttggtatatttgtttttaaagggttagaaaataaatattttaggttttatgggttatgtggtttttgttataagtttttagttttgtttttttagtgtgaaagtagttatagatgatatttaaatgaatgagtatggttgtattttaataaaattttatttataaaattatatggttggtttaagttttagtttgtttgtttagggagtagtttattgagttattaatttaaagtttaatattgtgagtgaatattagtgagtatttttgttaatgtggataattaatatttggttataggaagttttttagttgtgtgttttattatacgtatttgattttgtgaataattatggtttataatggtttgtttgttggtatttatgtatagcgtttatagttttttttaaaaaatatgtattgagttttttaatagtttaatttttaaaataaatgtgttgtatggttatttgatttgattatttttttttatgttgatatttttaattttaaaattgttttatttagtgtttaaattttgtttataaaattgtttttttaagtaatatgtttatttttttttttggaatatggaatattttgttaattgttttttaattgtattttatagattaggagaattttagtttgacgatattgaagttagtcgaatgtaagtgtaatttggttgagattgtggtttttattttgagttgttttagattgttttaaattacgttatattatttggaaataatttttggttaaaagaaaggaattatttagtagtaaatgggagataggaatatatttatttttttttttattagataattttaaatttcggtaatagtttattaggtttttattattagatagataaatgtatacgtttaaatttttagtttttttgtttttttggtagtagttgtagggaaatagggaggttgaggaaagagtttaatagttttaacgtttattatatttaaggtattaagtattatgttatagatatagagatgcgtaataattagtttttattttatagaaatttatattatatttaagagtgaaagatgtagaagtaaataattttagttattgaggtagaatggtatttaaaatataatagtaatatgaaggagtattggagtatttaggtatgtaataggaatttagtgtagatggtagggaagtaagagtggttaggaaatgttaagtttagttttgaaatgtgattgggaattaggtagttagaagtatgagcggtttattttaggtagaagtatgagttaaagttagaagtagtatagggagtaggggataataggtagttgaggatttttagattataaattagttgagaggtaggaaaatgaagaagataagatgtgatagaaggtattagggagttagtaaagaatttgtttagtaggtagatagtaagtttgttaaacgtgtatttttaataattttgtaagagagaaaggattgaagagaaacgtgtggtggtaaggtagtttagttagtgagagttttgataatgatagtggtataataggaatttaaaataaatttttttggatttaagataaatatttaggatatgaagtaagtaagattttagtgatttattgtgaagattaaagatgttttagataatagaggtagta

SEQ ID NO: 1984 - DNA, 6050 bp, Artificial Sequence
  chemically treated genomic DNA (Homo sapiens)
tattatttttattatttgaaatatttttagtttttataataaattattaaagttttatttattttatgttttaaatatttgttttaaatttagaaaaatttattttgaatttttattatattattgttattgttaaggtttttattgattgaattattttattattatacgtttttttttaatttttttttttttgtaaggttattaaaaatatacgtttgataaatttattatttatttattgagtaaattttttgttgattttttaatattttttattatattttattttttttatttttttattttttagttagtttatgatttaaaagtttttaattgtttattgttttttattttttatgttgtttttaattttggtttatatttttgtttggaataagtcgtttatgtttttagttgtttgatttttagttatattttaagattgaatttagtattttttggttatttttatttttttgttatttatattagatttttattgtatatttgggtattttagtatttttttatgttattattgtattttggatattattttattttagtgattgaaattatttgtttttgtattttttatttttgagtataatataaatttttgtagggtgaaaattaattattacgtatttttgtatttataatatagtatttgatgttttaaatatggtaggcgttgagattgttaaattttttttttaatttttttatttttttataattgttattagggaagtaaaaagattaagaatttaggcgtgtgtatttatttatttagtagtagaaatttagtaaattgttatcgaggtttagagttatttgataggaaaaaaagtaggtatgtttttattttttatttattgttaaatgattttttttttttaattagaaattatttttaaataatgtgacgtaatttaaagtagtttagggtaatttaaaataagaattatagttttaattaagttatatttatattcggttagttttaatgtcgttagattgaggtttttttgatttgtaaaatgtaattgagaaatagttagtaaaatattttatattttaaaaaaaaaggtagatatattatttaggaagataattttgtaaataagatttaagtattaaataaaatagttttaaaattaaagatgttaatatgaaagaaagtggttagattaggtggttatataatatatttattttaagggttggattattaaaaaatttaatgtatgttttttaaaggaaattgtaaacgttatatatagatattaatagataagttattataagttataattatttataaagttaaatacgtgtaataaaatatataattaaaaaattttttatagttaagtattggttatttatattaataaaggtatttattggtatttatttatagtattaaattttagattagtggtttagtaaattattttttaggtagatagattaaagtttaggttagttatgtagttttgtaaatgaagttttattgggatgtagttatatttatttatttaggtattatttatggttgtttttatattaaaagaatagagttgaggatttgtggtagaaattatatggtttataaagtttaaaatatttattttttggttttttaagaataaatgtgttaatcgttatcgttattttagataatttaaattaaaatttaatattttggtaagtttaaagatatttaaattagatataatattttaatgatgattattttggtttaataatgaaattgtttttttaaaaatatatttattgtatgtattatttgttaaaagtgtattatttgaggtgaagttttgtattggatagttgtgaattaattttagttttaaatagttgttagttattttgttatttttaaatatattattgtttttttatgtagaaatatttaaaattttaagttattaaaaagttttttatttttattttacgagatatgaattagtatttttttatttatttatttttataaatagtattagtaataatgaatgagttaatataatattgatttttaatatttagaaatttttaaattagataaaaaatgttttttgaggttaaaagttaaatttttaaattggtattataaagttttgatttgtgaattttttattgattttaggtttttaattttaagtaattttaataagaattttaaaattagttatatatatatatatatatatacgtatatatataaatttgttttttaaattttttagttaaaaataaaaataaaaataaaaaataattttttatttttttattagatttttaaaattatttttattgtaatttatttagattttaaggataagaatggaaaaggaaaaaaaaaaaaaaaaaaagattttagtagtttaaatatttattttagattttttttgtaatgtatttaaatttttaattttgtataaaattatataagaattaaaaattggggtatgttggaggtggtagtgatttggttgtgatataaatgtaaaaattttattttatttttttttttagggagtaagtaaattatttatgtgatatatttggtttttattagttttgtgggtaagtattttaagattgtttttaaatttgtattttttagatagaagagttaaaaattgatgataattttatgtattagttgatttatttttgaaagtgcgattttttagtattagatgttatattgtaaggaggtagagttggtttgtaaaataaaaaataaatttgttggtattgagggaagagaggtagattagaagtttttaaatacgtaggtagtaaaatttttaaaattaatagggaaagagaagagagggaaaaaatgaggatatgatgataggaaaataaaaatattattgtaaaaaggtaagatataagaagaaaaataaatttaagttttagaagtataatatgtaattgttataaagttttgagattttgaaatgggatagagtttaaatatattattaaatgataattatatttatttttttaatttttgttttttaagtaagagaatatgtgaattttggtattaaaatgtttgttattaaattgtaatatattaattattattttttatatatattaaagtaggttattaaaaattattgataagataagttaagtaatttaaattaatttagtatagaagaagaaggattgaaagattattattttaaaataaatttgttttgggtttattaaatatagtaaagttgttttatttaaattggaaattgttttttaattaagagaaaaatgaatatatgtagaattagtagatattttttttgtagtaatttataatagtttttgtttgaatgaatttttatttattttaataatagtatatttttagaatattataaataagttattaaaagtttcgaggttagaatttaaatttttaaaattatgatatatgttaggtgtggtagtttatgtttgtaattttagtattttgggaggttaagatataaggattatttgagtttaggagtttaaggttaatttgggtaatatgatgaaatttcgttttttagtcgggtgtggtggtgggtgtttttagttttagtaatttgggaggttgaggtgggagggttatttgagtttagaaggttaaagttgtagtgaattgtgatcgtgttattgtattttagtttgggcgatggagtgagattttgttttggaaataaatataaattatgaaatatatattatttagtaatagtttttaagtttgattttggtttttaaagagtttatttatttttttattgttaagttgttggaagtaagaattttgtatgtgtttgtaaatgtagaatatataatttaatttaaaatatataattaaagggaaatttttgtattaaattattgatttaggttattttaaagtgtgttagaataataagttagaaattttaaaattgaaataataattaaataatattggataataaaatgtaaattttagaatgagaattaattttaggttttgatttgaatcgtagaaaatatgattataaaatatttattaatttgaatattgtagtatgagttagtaaatttaaatggtggtttatttttaataatattggtgtagtttttttattttgtaagttattttttttatttttattgtaattttttaggagagaaaagtatattagttttattaatgttataaaaatttttagagaaatgtttagttaaaacgtttattatataaaaggtatattttaaaatgtatattaagaaatttttaatgttttttataatgtttatagtaaaatgtttaaaattttgaagtttttttgagaaatatttttttgtttatatatatagataggtttttgatagtggttattgatatttttaatgagaaaaaaagatattaaaatattttaaggagattaaatgaagtaggttaatttttaggtttattatttttagtagtatttttgttaattatatattgtttttatttttatagtatgtattttattttataatgatagttttttaaaggttgtaaaataatttaaaattattttttataagttgtggttattcggtgatattagggtgattatagttttgagttattgattaaaaataggttgttatattagtttagttgttattttgatttgagcgtaggtttaataattttaataaattaaataaatttttggttagaatattttaatatataaatttaatttattgtttaaaaaataatatttaaagttttaaattaggtgttaatgtaaaatttattagaagagtaattattatagaaaagtttttaaggattattttttagtattttgttttttttaaatgatttttttatttgagaaaatgtaataattttttgtatttttatgtaatgttatagtttttgaagtattttggttaatagtattttgagttttataataattttggttttatttaattaagatagataatatattaagaattaaaaaaaaaaaaaattaagtagttttcgagtgattaattgatttgtttaagattttggaattagtgttgaaggattgattaaaatttagatatattgattttttattaagggatggatttttttgtttgttttggtttagttttgttatattgggttttaagatttaagtatatgtaaatgagtaaagatttagaatatagattgagattttttaaatacggataaatttagttaaaagatttttaagttgatagagtaattagttattaaggagggtaattgtttaatggaatagttatatatatatatataaatatatatatataaatataaagtttagttttattaattttgtatgtacgtaaagttatttaatattagttatcgtatgtttttatttataggtgggaattgaataatgagaatatatggatataggaaggggaatattatattttggggattgttgtggggtggggggaaggggagggatagtattaggaaatatatttaatgttaaatgacgagttaatgggtgtagtatattagtatggtatatgtatatatatgtaattaatttgtatattgtgtatatgtattttaaaatttaaagtataataataataaaaaatattagttaaaattttttaagtattgtataaaaatatattttatttttttttggttataaatttattaagatttaattttatgaaaaagtatggtaaaagatgaaagtatattttttttttttaattaaatatttttttaattttttatatggttttagttgaatttttttgattgttatagtttaaatttagtaggtttttttattgatattgtagttttggtaaagatattatatatttgaaatattttagtattaaaagattattttgtgtaattagttttttttttttacgatttttttatttaggttaaatttgaggtattaattacggaaagatgaggaaattaggaggaa

SEQ ID NO: 1985 - DNA, 7588 bp, Artificial Sequence
  chemically treated genomic DNA (Homo sapiens)
tttttttgttttattttagtttaggttttattgttttttttatatgtttttaaatgtaattttttttttggggtttggatttgtagagttaggttttgtttattagggtagcgttggaggaaggtttgtagagtttttttttttattttaaaagatggagttattatttatggttatttttgttatttgcggttgggtttatattttttaattttggtgttgagtataaggggttttttttaattatgggttgatgatttttagggtgtttggtgttaagttatttttataagaaattagatgggtttttggataaaggtaatttgtttttatttattggtgttttgtattggcgaagtaaattttaatttgtttttataggaaaatatgataatttgtataataatattatgatagttttatatattaatataaagttttttgttgattaggtattgtcggattaaatgagttaagatgagtttttttagagtatgtggtttttattattttgtgtttaggtatttgataatatagatagtaggtgtttaataaatgtttgtttattgaatatatgaatgaagaaatatttagtttttgagtgaaattaatatttagtttattagggtttaggttttttaagtattagaaagggtagagttatgaatttgatttaatgatttaaaaattaattattgttattttttttttatagaaattagttgtttttttggtttttgttgataggtatttttttattttttgttttgtgagaggttggtttttagttattattttagtttttgttgtttgacgggatattttatatttttttatatttatttttttttttttatatttatatttattaatggaattaatttttgagaaattttgattttgagttttgattttggtgatttttgttgttgtggtttttggtttgtaattataaatattgaattttgttttggaatagtttaaatataatatttgttttagtggttttttggtaaagagtttttttgataaatttaggaattttggtgttatttttagttgttgttttattttgatgttgtttttttacgttttatgttgaaatgtaatttttaatgttggaggtggggtttaatgggaggtgtttgggttatggagatagattttttatgaagggtttggtgttattttggtggtaatgaatgaatttttgttatattatttttcgtgagagttggttgttaaaaaaagaaagaaagaaagaaaaagtcgggtatttttttttttttttattaagagtttgcgtacgttagtttttttttgtttttcgttatgagtggaagtagtttatagtttttattagaagtagatgtcggtgttatgttttttgtatagtttgcgaattatgagttaaataaattttttttttgtataaattatttagttttaggtttttttttatagaaatatagatggattaagatagttgttattttgagatttttgttattagttatataagggttgtatttagtaagtattgttcggtattttgttgttattttttggagattgttgatttttttttgttttttagattgttgggtttgttttttttgattagttttaataagtttttgatatttttaatatattattagttattatagtgtgaatggaatgaggattattttattgttgtgatgtgagttttatagaaaaatgtatagaaaagtaattaaaataatgtagtaaaggattagaaaatggaggaaatgtttattttttattgatatgtaaagaagttggagttagttggattaaattgatttaagattatttatgagtatatgtatttagtacgtgaagattatttatgagttttatatatatttggtaagtgagaattttttaaagtttaaaattggtgttattaggtatagggaattatttattggtattaatgttatagttattttggaaaatatattaaaatattatttatttttttttttatttttagtaagtaaatggtaatatttttttttaaggaaattgaaaaaatttaagggattattttatttagtttgatattaaagttattttagtttataagtattagatatatggagtagttgtgataaaagtaaagatatttataaattatatttttaaaaaagaattttgagagtgtttatatatttaagtttttataaaagttagtatgaaagtagtaatagaggaaaagagaaaatagttgagttgatattatataatagttaaatggaagggggataaattggtatagttaaatagattatttgattataaaaattaagagttttaaaaatgtgtaaattattagaattaataattttatttttaaaaatttattttgaaaaaaagaattaaaagttaaagatttttaaataaaaaagtgtgtttttttgtttttttgttttttgttttttttttgtttttttttgttttttgttttgagatagagttttattttgttgtttaagttggagtgtagtggtataatttttttttattgtaatttttgttttttaggtttaagtgatttttttgttttagttttttaagtagttgagattataggcgtttagtattacgtttagttaattttttgtatttttagtagagatggggttttattatgttggttaggatgttttttatttgttgattttatgatttatttgttttggttttttaaagtgttgggattataggtgtaagttatcgtgtttggtttgtaaatatgtttttaagtttatttaatgatataggaaaatatttaagttaaagtaataggtgaaaaaattttaatagttgtatatgtagtataattaaaattatattaaaatattattttatatagaaaaaaagaaaagatataaatgtattaaaatattaatattgtttatttttgtatgatgagattgtgaatgattttttttttgagatagagttttattttgttggttgggttggagtgtagtggtattattatagtttattgtaattatagtttattttaggttttatgttattattttgtttttatagttgggattataggtgtgtgttattttattatattttatttaattttttttttttttgagtcggagttttatttcgttgttaggttggagtgtagtggcgtaattttggtttattgtaatttttattttttgggtttaagtgatttttttgtttcggtttttcgagtaggtgggattataggcgcgcgttattacgtttagttaatttttgtatttttagaagagatagggttttattgtgttggttaggttgggtttaatttttaggtttcgtgatttgtttattttagttttttaaagtgttggaattataggtgtgaattatcgtgtttagttttttaatatttttaaagattatataaagaaaagtatagtttttatatatagtttaggagttagggttttgagtgaaatggagtataaggtgatggaagattgtttttggttttgaggattattttgttggatgattagagtttgttttttatttggaagaattatggttttttttttggagagaatttggagttttggttatattttttgagtttttgatattaagattcggtgtggtgtgtgagtagttgggagtaaatgtgagaatagttttgttaattattttttttgttttattattatttattttattttttttatttcgatttttattttagaaaattaatattaagtttttttttggaggggttttttttttttttttttttttaattagtttttttttttttgaagtaatattaaatattagaataaatttatttatatataatgatggtttttaaatatttgaagattatgttggtttttatgagagggtttttttgttttagattaaattaaattaggtttttgtgtgatattttttaagtttttttttattttgttaattttttttggatgttatatttggaattgttaagggttatttaataggtagtgtttggagttaatattggttttttgttttggttagaaagatatattgtaattttgttgagtttgtaaagaatgtttaaggggtatttgtgttcgtagttgttcgtgtagtattttagtttgcggtgttagattcgaatttagagttgtgttaaatgagttaggatttttttttgttgtttttgtgtattggtaggggtattaggttattagtgttaggagattttggttagtgtttatttgtgttgttatatgtagggttttggtagtgaggtttggagaaggaagagaaggggtagggaatttatacgttttgttggttattttttatcgtggttttgttacgggaattttttttttttatttttattttttattttaggtagaaatattttttatttttttttttttttttaagaatttttttttaaaattttggtattttttatatatatttgtatttttgttatatttgtgggttttgttttttttgtaggattttttttggaaagttaattttttttgatattggagaattttattaaattgttgagtattttttttttttttttatagattttatggtatgtttagattatagtagaagatattttttttgttgttaaatttatggtattttgaggttgattgtgtttattttatttttttagttgttttttttttgttgttattattatgttttaagtagattttggagtattttttttatagtagtatggattttggtagattttttggggattagcgatgttttaatttgtttgtttttttagggttgatgtttgtagggtgttttttttttttttttgaattaaagtagaaattattttgtatttttatgtaattttttcggtaggttttaatagataaataaagtttattattttttatgggtttattttttttagtagagtatttgggttggtttcgaagtttttaattatttgtacgtttgttagggtttttttggggtagttatgaagtttttcgttttgtttttttgttttgtttagttttggggttgttatttagttttatatggtttagggttgatttatagataatcgaattgcgatgatttagaaattgaggaagtagttttggtggttatagattatattaattaaaattttttttggggatataaatatattttgaattagattgatgaagtaaaggtgtggttttaggtaagtggatttgttgtttatgagttgaaataatgtgtatatggagtttaattaggtgttttaaaaaattattattatttagtgtaaatgaaattatagaggagtaaattttttgatttttttttaggagtgagggaaggggtaggtagagggtaggagaggagatattttgtatggtagttatgggtgttaggagggagttgggtggggtgtgaggtggtgtgtaggagaaaaagtgttttaaatggtagtgtgtagattatagatagaaagtgtaatttgttggaaaaattaggatttaagagattagtttttagttgttaagttattattggttgaaaattacgtatttgtttttggtttggtttttttttaataaagattgagaatgaataaaattagtatttggtagatgtttattatatgttaggtttatttatatagattattttatttattttttttcggttttgttttttggtgttgtgtggtatatatattgtttttgttttatttaagaggagattaaggttttgttgtgtgtgtgtgtgtagtttttttgttttttgtttttgtttttttttttttggtttaaaattatataattattaagtttttaggttgggatttgattttatatttgtgtttttttttttatataaattgttttttaaagagagttatttatattttagagagaagttttggtataaatataatttatttttttatatattagataggaaattaacgtagtttgaagttagtgataagaaaaattaagttggaaatatgtttcggggattagttaagagatttggagaggtggaaagaagttgtttgtttattgtttgttttgaaattagatttatttttgattaaggataatttttttagtaaatatgtattataagttttttttggataagaattagagatattaggttgaattatataaaattgttatttttttatattaaaagtaattaaatattggtcgttttaatggtttaatttaatatagtggtgaaaaaggtataatatgtgtttataagagtttataatttaggttggaaaataaggttaataataggaagtttggatcgattgacgattgttattcgttttataaagagataaaatatttgaaattaggattgtttcggatggattttaagagtgttgtagttatattaaagtatagtggtggttaggaggaaacgttgattaagttaggggaaatgaatacgtaatacgtatatttgagggaaaaggtaattatgaatgggtattgtgatttttattaaaggtagagttttagagttggtttttttgagaaatttaggtgtattcggtttttgttcgttagagttgtgaacgtttttaggtagttattttgggtatatttggatattataaaatgcggagttttttttaggggaggggatgttgaggttttaggtattagtgaattaggtagaattaatgagaggtaaatagagttgggttgagaggagaaaaggtatatttgtattttttggattttttaggtttcgaagataagatatagaaataggtgaatttataagaatatttttaaggattgttgtaagttttttcgtgtttatattagtgatatttagttttttgttagagggagatatgtttttttttattatcgttagtagggggaagtagagagtagtatcgttgtatgtcggtatttgttgtataagttaagataaaggaaaaattaaggataatagtagtaaaaatttttaggagggaaaagaaaacggaggaaggaaggaaagtaaataatgaaaaggaagaaagaaagaaggagagggagggatagaggagattaaaaaaagatagtaagatattattttatattattttattttgtagtttgtttgagaaaaatttaaatttgtattttttaaagtattgtttgaagagtgaaattttaaaaaattaaataaataataaatataaataagtgttaatatttatttgtagtttttaaatagagtttagagtgagggttgtggttttatcgatttgtttaagtttaggatttcgtttgttttgcgagtattatttggtgtttttttaattaatagacgaagattagataagttttggttattgttttgtttataggttagtttagagttagacggagttgtagattgatagtaagaatgatattttttttatttttttaaaagcggggtgtttttaagtttaatgagggcgtatatcgtggatcgtattataggattaggggaataggttgtttacggttttattttttgtttttatagt

SEQ ID NO: 1986 - DNA, 7588 bp, Artificial Sequence
  chemically treated genomic DNA (Homo sapiens)
gttgtggagataaagagtgaagtcgtgagtaatttatttttttgattttgtggtgcggtttacggtatgcgtttttattgggtttgagagtatttcgtttttggagaggtgagggaaatgttatttttattgttagtttgtaatttcgtttagttttgaattggtttgtgggtaggataatgattagggtttgtttggttttcgtttgttgattaaggaagtattagatgatgttcgtaaagtagacggggttttgggtttgaataagtcgatggagttatagtttttattttgagttttatttgaaaattataaatgggtgttaatatttatttgtatttattatttatttaattttttaagattttattttttaagtagtgttttggaaaatgtaagtttggattttttttagataagttgtaaaataaggtggtgtagggtaatattttattgtttttttttaattttttttatttttttttttttttttttttttttttttttttattatttgttttttttttttttttcgttttttttttttttttagaggtttttgttgttgttgtttttggttttttttttgttttggtttgtgtagtaggtgtcggtatgtaacgatgttgttttttatttttttttgttggcgataatggggaagggtatgtttttttttgataggaaattggatgttattagtgtagatacgagggagtttgtaataatttttggagatatttttgtgagtttatttgtttttgtattttgttttcgaagtttgaaaaatttagaaggtataagtatgttttttttttttttagtttagttttgtttgttttttattggttttgtttgatttattagtatttgaagttttagtatttttttttttgggagaagtttcgtattttatgatgtttaggtgtgtttagagtgattgtttgaaagcgtttatagttttggcgaataggaatcgggtatatttgggttttttaagggaattaattttgaagttttgtttttagtaaaagttataatgtttatttatgattatttttttttttagatgtgcgtgttgcgtgtttattttttttgatttgattagcgtttttttttaattattattgtgttttaatatggttgtagtatttttaaaatttattcggagtaattttgattttaaatattttgtttttttgtgagacggatggtagtcgttagtcggtttaggttttttgttgttgattttattttttaatttagattgtaagtttttgtgggtatatattgtgttttttttattattgtattaggttgaattattaaaacggttaatatttggttgtttttgatatagaaaaatggtagttttatatggtttaatttaatatttttggtttttgtttaaggaaggtttgtaatatatatttgttgaaagaattgtttttaattagaaataaatttaattttaaaataggtagtaggtagatagtttttttttatttttttaaattttttgattgattttcgaggtatatttttagtttgattttttttgttattggttttaagttgcgttggttttttgtttagtgtgtgaggaggtgaattgtgtttatgttaagatttttttttgggatgtgggtaattttttttgggaggtagtttgtgtagaagaaggaatatagatatggaattaaattttagtttgaagatttagtaattatatgattttggattaaaaaaaaaaagataaaaataaaaaataaaaaaattgtatatatatatataatagagttttggtttttttttgggtaagataagaataatatatgtattatatagtattaggaggtaggatcgggaaagagtaaatgagataatttatgtgaatgggtttggtatatagtaggtatttgttagatgttagttttatttatttttagtttttgttagagagaaattaaattaaagatagatacgtgatttttagttagtggtaatttggtaattaggagttggttttttgggttttagtttttttagtaagttatattttttgtttgtgatttgtatattattatttgaagtatttttttttttgtatattattttatattttatttagtttttttttgatatttatgattgttatatagaatgtttttttttttgttttttgtttgtttttttttttatttttgggaagaaattagagaatttatttttttgtggttttatttgtattgggtgatggtgattttttgaggtatttgattgagttttatgtatatattattttagtttatagatagtaggtttatttatttgaggttatatttttattttattaatttggtttaaggtgtgtttgtatttttaaggaaggttttgattgatgtagtttatagttattagagttgtttttttagtttttggattatcgtagttcggttgtttataaattagttttgggttatgtggggttgagtggtagttttagagttgagtaagataaaggagtaggacgagggattttatggttgttttagagaggttttggtaggcgtgtaggtggttggaggtttcgggattaatttaggtgttttgttgggaaaggtagatttatggagggtggtgggttttatttatttgttggagtttgtcggaagaattgtataaggatataggatgatttttgttttggtttaaaagaaaaaaaaaaatattttgtaaatattagttttggaaaagtaaataggttaggatatcgttggtttttaagaaatttgttaaagtttatgttgttgtgggggagatgttttaaagtttgtttggaatatggtaatagtagtaaagagaagatagttgagggaatgaggtggatatagttagttttagagtgttatgggtttggtagtagaggaaatgttttttattgtgatttgagtatgttatggggtttgtgagagggaagggaggatatttagtaatttgataaaattttttaatgttagggggagttagttttttaagaggagttttatagggagaataaggtttatagatatagtaaaggtatagatgtgtataggagatgttaagattttgggggaagatttttggagaaaagaaaaaggatgagagatgtttttgtttaaagtggggaatggaggtggaagaagggggttttcgtggtaggattacggtgggaaatgattagtaaaacgtgtgggttttttgtttttttttttttttttttagattttattgttagggttttgtatgtgatagtatagatgggtattgattagagttttttagtattagtaatttagtgtttttgttagtgtataagggtagtagaggggagttttgatttatttgatatagttttgggttcgagtttgatatcgtaggttgagatgttgtacgagtagttacggatataaatattttttgaatattttttgtagatttagtagaattatagtgtgtttttttagttagaatagagggttagtgttgattttaggtattgtttattaagtgatttttgataattttaagtgtgatatttaaggagggttggtaggataaagagaggtttgggaaatattatataaggatttggtttggtttagtttgaagtaaagaagtttttttatggagattaatatggtttttaaatatttagaggttattattgtgtgtgggtgaatttgttttaatgtttgatattgttttagagaaaaaaaaattggttaaaaaaaaaagaaagaagagggtttttttaaagggaagtttaatattgattttttggggtgagaatcggggtgagggaggtgaagtgagtggtgatggggtagagaaggtagttggtaggattgtttttatatttatttttagttgtttatatattatatcgaattttaatgttagaagtttagaaggtgtggttaggattttaggttttttttaagagggggattatgatttttttagatgaaaaataaattttggttatttagtaagatgatttttaaagttaggggtaattttttattattttatattttattttatttagggttttgatttttgaattgtgtgtggaagttatgtttttttttatataatttttaaaaatattgaagggttgggtacggtggtttatatttgtaattttagtattttgggaggttgaggtgggtagattacgaggtttagagattgagtttaatttgattaatatagtgaaattttgttttttttaaaaatataaaaattagttgggcgtggtggcgcgcgtttgtagttttatttattcgggaggtcgagataggagaattatttgaatttaggaggtggaggttgtagtgagttaagattgcgttattgtattttagtttggtaacggagtgggatttcgatttaaaaaaaagaaaaattgaataaagtgtggtaaggtggtatatatttgtaattttaattatgaaggtaggatgatagtataagatttggagtaggttatggttgtagtgagttatgatagtgttattgtattttagtttagttaatagaatgagattttgttttaaaaaagaaattatttataattttattatgtagagataaatagtgttaatgttttgatgtatttatattttttttttttttttatgtaaaataatattttaatataattttgattatattgtatatatagttgttaaaatttttttatttattgttttaatttgaatatttttttatgttattaagtagatttaaaaatatgtttataggttaggtacggtggtttatatttgtaattttagtattttgggaggttaaggtaggtggattatgaggttaatagatagagagtattttggttaatatggtgaaattttatttttattaaaaatataaaaaattggttgggcgtggtgttggacgtttgtaattttagttatttgggaggttgaggtaggagaattatttgaatttgggaggtagaggttgtagtgaggggagattgtgttattgtattttagtttgggtaatagagtgagattttgttttaaaataaaaaataaaaaaaaataaaaaaaaaataaaaaataaaaaaataaaaaaatatatttttttatttaggaatttttggtttttgatttttttttttaggatagatttttagaagtaaaattattgattttaatgatttgtatatttttaaagtttttaatttttatagttaaatagtttatttggttatgttaatttattttttttttatttagttgttgtgtgatgttagtttagttgttttttttttttttttgttattgtttttatgttgatttttgtgggaatttagatatgtgaatatttttagaatttttttttaaaaatgtaatttatgaatatttttgtttttattatagttattttatatgtttaatatttataaattaaaataattttggtattaagttgagtaaaatgattttttagatttttttagtttttttagaaagaaatgttgttatttatttattggaaatgaggaagaaaatagatgatattttggtatgttttttaagatggttgtagtattagtgttaatgggtagttttttgtgtttgatgatattagttttaaattttaaaagatttttatttgttaaatgtatatgggatttatgagtgatttttacgtgttgaatatatatatttatgagtaattttgggttagtttgatttaattggttttagtttttttgtatattagtaggagataggtattttttttattttttggttttttgttgtattattttagttatttttttgtgtatttttttatgaggtttatattatagtaataaaataatttttattttatttatattatgatggttgatagtgtattgaggatattaagggtttgttagaattggttaaggagagtaggtttaatagtttaaggagtaggagaggattaataatttttaggagatggtagtagggtgtcgggtagtgtttgttgggtgtaatttttgtgtggttgatggtagaaattttaagatggtagttgttttagtttatttgtgtttttataaagaaaaatttgaggttgggtaatttatatagaaaagaggtttatttggtttatggttcgtaggttgtataagaagtatgatatcggtatttgtttttggtgagggttataggttgtttttatttatggcggaaggtaaagaagagttggcgtgcgtaagtttttggtgagagagaggagagatgttcggttttttttttttttttttttttttttaataattagtttttacggaaaataatatagtaggaatttatttattattattaggatggtattaagttttttatgagggatttgtttttatgatttaaatattttttattaggttttatttttaatattggggattatattttaatatgagacgtggggggataatattaaagtagagtagtagttaaggatggtattagggtttttgaatttgttaaaaggattttttgttagggagttattagggtaagtgttgtatttaaattattttaaggtagaatttagtgtttatagttgtaggttaggagttataataataaagattattagggttagagtttagggttagagttttttagaggttggttttattagtggatgtgggtataggagggagaggatagatatagaaagatatgaaatatttcgttaggtagtaagagttaaggtgatagttagaaattagttttttataaaatagaagatgaaaaagtgtttgttagtaaaagttagaaggataattggtttttgtagggaggaaatagtagtggttggtttttaaattattaggttaggtttatggttttgttttttttggtatttaaagggtttaggttttgatagattgggtattaattttatttaaagattgggtgtttttttatttatatgtttaatgaataaatatttattgagtatttattatttgtgttattagatgtttggatatagagtgatgagaattatatgttttggaggagtttattttgatttatttagttcggtaatgtttgattagtaaagaattttatgttaatatatgaaattattataatattattatataaattattatatttttttgtggagataggttgggatttatttcgttaatgtaaagtattagtgaatgaaagtaaattatttttgtttaaggatttatttggttttttgtgaaagtaatttagtattaagtattttggaagttattaatttataattaggaagagttttttgtatttagtattaaagttgggagatgtgggtttaatcgtaggtggtaaaaatgattataagtaatggttttattttttggggtggaaaaaggggttttgtaagtttttttttaacgttgttttgataagtaggatttagttttgtaaatttaaattttagaaaggaaattgtatttgagaatatataaagggaatagtaaggtttggattagagtagggtaagggag

SEQ ID NO: 1987 - DNA, 6182 bp, Artificial Sequence
  chemically treated genomic DNA (Homo sapiens)
tttatggtttttgtttagaagttttagttgtaattagtaggaaagaatatggtggagtgtgttttttatattttgattttaattggaagttattgttattattattattattaaatttttgtaattttagtttttatttaatttttatttaggaattaatgataggatttttattgtttatgtgaaggaatatgtgagtttttttgttgttgttgatagtaaattttagttttattaaatgtgattagagagtattgtttgtaatattttttttttattaaagttattgatattttatttgtgatttatatgtgatgaatttttatgtatgagttatgggtatttgagatgaatgtgttttttattattagggtatagagtttaatagatttatatttaatataatgattatgttgtttaaattttttataattttattttattttatttttagtttgtatatgtatatatatatatatatatatatatatttatttatatatttatatagagagattttataaaattttatttattttcgttggaataaagggggttgatagtttgagatgttgttagagtggaagaaaaattgaatttttaaaagatgtgtatgtagtttgcgtggtggggtggggtggggtgggtaggttatatggtattgggtgttttaggaatggggataatgtgaatatgtataagaaagtaagagataaaagggaaagggaggtataattgttgtgaggaaattgtatttgaagagagacgaaaggtatttagttgttgatgtgagtgaaagttcggggatgggaagaaatattttaaaagaatgtaggaagtattttcgatgttggtatgttttgtgaaatttttagggaggtttttttaaggaagtttaagtgaatgaaatgggatttgtgttttttttgaatatggttttttgtatagattggattttggtggtttttagtttttatttttaggttttatttttattttatattttatttataatgattgatagaattgtaaatgaaatgattataataagataaatttttaatagttttttaattttattagattttttattagtttatatttattttatgtgtttttatatgttttatatatatagaatatattgttttttttttaaagatagaattgatatatgttattgtaatttttgttcgtaaattaaaggtatttttttaagggttcgtacgggttggaaatttattattttaaaaatagttaggaaattattttgagttgaaagggtttatttttgtttttgataaggttatatatgggattttttgttttttatagatttttatgagaatagatggattgtgatttttttaagtagattttgtggggatatttatgaataagttaagatagtagttatattgttttttgatttttaaggataagtttaaaaggatgtagtgggagataagtttagaaatgattaggaaggttttatggtttaaaaaggaaaaaaaaaattataggtattttaggatttattttagttgtttttttttttttttaatttttattttaagtttaggaatatatgtgtaggtttgttatataggtaaattgtatgtcggtagggacgttgtatagagattatttttttttttaggtaataagcgtatatttgaggttggagggcgggagaagggagaggattaattgttttttatttgagaaagatataatataaattttttgagttttattttttttatttgtaaaatgggagattttaatttaaataatgtttaaagttttttttagtttattatttatttatttattaataaaggaaaaaattggatatatatttatttttaaggttattgaatttgtatatttaattaaaattaaagtgaggatttaagtattattttgtaaatggaagaatataggtagaggttttaaagtttttatttataaatttaataataattttaaaggataagaaaatagaggtttgtaggaaaattagatatattatttatatttaattttgttattgaaattggttaaggtaaagtttaataaatttaaaggtttagaatatttatttttttatgataaataatgatatttaaaacgtgatgataaaataatttaggaggtgaaatgggattaattattgtatttttttgggaagttgaaattttgaggtagaaagtgaattttaatttgtttttaaaattagatttggattttgtttagaaaatttttttgtgtttgtttatgaattttatagaattaaaaggtttaattagaaaaggtagtattgataataatagtgattttttaagaattttttatttattattatgttggttggggttacgataacgtgatgaaatgatgtagtataaataagtggaaattaataaggttttttgtagttggaattttgattagagagatgataggaagtttcgttgattgtatttatttaaatgtataaggataatattatattatgttatttattgttaagtgaaagttgcgattatttatgttaaaagtaaaagagaattagaagaaggaggaggaattatagtaaaaagagaagagagggtaaatatttatatgtaaataagagatatagagtaattgaatttttttgtgttttgtttatagtaaaacgataaagaatatattaagaagtaaaaatagatttaatatgtaattatttagaatgaatttatatgatagaatttgtaattaagttatggaatttgttattataagattttttttaaatagatagattagaaaggttagatttggtaaatagagtttatataaaaattttaatgtttggaatttggattaataaaaattatattaagtaaataaataaaatataaatgatattagtttttagggaataggtttatattttttaggatgtgtaaagaatatttttaatttggaatattaagtatttttaggttatttttattttttgggtattatattaaatttagtattttttattatgttttcgttattagtattcggttattaaagaatttttatatttttagtttaattatagagttttatgtaattagagtttatagttttttttattgatatttcgtgtaattttgaattaatttttagtagtttttttaaatttttttttagttttgggtaagtgaggataagagatagtaaaatgtaggttattatagtttatgtttttttatttatatgtatgaattggtaaggttaatggaaatttggattattattgtatggtaagggagaataattaatgtaatacgttagtttatatgattgttttttttttatatttatgttattttgggattggttaattgtaaattaattgttgtaaatatagtagtgggagggatgtttgagttaatgtgaagaagaaaataatggtgagtagagttttaattatggatgatttttggtaattttaagaagattatttagtatgtgtgttacgtgggttttttgttttttatttattgattattttattatttgaaagtattttatatttttagtaggtaagaaatagaaaggatatgggatttaaaatatttagtttatgaatattgtaattagaatatggagaatagggaatttatttgtaggtttattttttttttatattaataataatttttttttttagaaagtttattataattgttaaattaaaattaaattttagggattttttgtaattttatttttttttatgattattttatttataaataattatggaggtgagtaataattattttattcgattttggataagttaataggatttttttttttttgggaaagaggtaaaattgtataaaattgagaggcgagtaattgtaagatgatggtattttttaattttaatagttttttataatagagaatttagttatttggataaatgttggttgtatttttgaaaatatttaggtagaaggattaggtttgtagttatttttatgtatagtaggtgaaggtaggtgtaatatatagtttaattttatgatgttacggttagaaattgaaatgtgtttttgtttttgtgtggtatgttttgatggtaaaggtgtaggtaattaattgggtttaatttatttttttttatatttggttattttttaaagtgtaaatttattttaataaattttagtttgtattataggaggaaggatttgggtggtgtagacgtggttttttattgttagattagaagggtggaggagaggttggtaggatgataagaatgaatgaatatattaagttttagtttttatttgaagttgtttagtttaggtaagtatttagagaagttagttgtaataattaatagggtaaatgtttttttggaaaattttaagttagagaaaattgagaaaaagagggaaggatggaaagtagtataaagagaagttagtttaaaaggttagaggtttagatgaaaatttgagattggagaatgataaaaaatattgtgtgagattttattttaggttattatgttagggaaatttatataggatagggttgaaagaaattaggttataagatgagtggtaagttgtaataaaatggtattttaaatttattaagttattgttgttattgttattttgttttagttgatttgatgtttagttagtttatttgtgtgttttttatagaagagtatgttttgatttaggttgatagatattgttgattttgaaatttgtttttatggttatgttaaaattattgttattataagaaatagagatgggaatattgttttttgaaatttgatttatatataaattgaatgaattatataataattattttagttagatattattttgaaatttggtttaaaatttaaatgtttataagatttttgagagatagtgttgtgttttgagttatagggaagttattttagaagttaggtttatttattaataagtagttgtttgtgtagagtgtaggttgtatttttggatagtttttaaaattgaatttttagaattttagaataaatttttgtttagaaatgttgattttggtttattaggtagtggtaaaataggtttttttcgaagtttttttttattatttttttaagtgtatgggggaaaatatttagggtttaatagttttgagaagtgtggaaatattttttttgtgagtgagaatagattatttagagaaaggagattagatttttattattgtttttgggtattagatgttagcgtgagtatattgttgatttgtttatttaattattgatttatattattgtttttattttttgttgtaggtaagaggtaagtttattaacgaattttaaggaagatgtaaatggttaatgattatgtttagaggtttgaaatttttttaggtcgtttttttggagggatgtttttttggtggggtagtttttattattatatataaatgtgtttgggtttggattttgttggagagaatattgtgattcgtggttttttttttgggttatgttagttagttttggatttattttgtattttattttttattttattgatgtttgtgtatttttggtttggtgttttagtttattgtttattaaaatttgttattaggaatagattaattattagttatatataatgcgttatgattttattttagaggtattaggttatttggttttatgttttttttgttgttgttgttgagttttaaaataatgaaatataatgtagttatataaagatgaatttaatagatgtatataatttaataatagaatattattagaatttttaaaatttttttttttatttttttattaataaaatttttttatttattaggggtaattaaagtagttatattcgtggtttagtttatttatttatgtaagtatttattaaaaaatagttttgtttggtttgatttttttatgaagggtattttattgtgtgtattttttcgtgtttgatttatttgttttttaaattttatttttattagtggcgtgggagttgatggttattgttgtggtgattttagatagttttgagaagatgagggtagagttttgtggttagaaatttttttgtgtgttttaagatagtgcg

SEQ ID NO: 1988 - DNA, 6182 bp, Artificial Sequence
  chemically treated genomic DNA (Homo sapiens)
cgtattattttaaggtatataagaaggtttttgattataaaattttatttttatttttttaagattgtttgaaattattatagtagtagttattagtttttacgttattgatagaagtaaggtttagaaggtaaataaattaggtacgaaagaatatatatagtaagatgttttttatgaaaagattaaattagataaaattgttttttaatggatgtttatatgggtggatagattaagttacggatataattgttttagttatttttagtgggtggggaggttttgttggtgaaagaatggggagggaggttttagaggttttggtgatgttttattattaaattgtatgtatttattgaatttatttttatgtagttatattatattttattattttaaaatttaatagtaataataaaaaaaatatgaagttaaatgatttaatgtttttgggatagggttatggcgtattgtgtataattgataattgatttatttttgatagtaggttttgatggataatgggttgggatattaagttaaggatatataggtattagtgaggtaaagaataggatgtaaaataagtttaagattgattgatatggtttaaggaagagattacgggttatagtgttttttttagtagaatttaaatttaagtatatttgtgtatggtgataaaagttgttttattagaaaagtatttttttaaggaggcgatttggagagattttaggtttttgagtatgattattggttatttatattttttttgagattcgttagtgaatttattttttgtttataatagaagataagagtaataatgtaaattaataattggataagtaaattaatagtgtatttacgttagtatttgatatttagaagtagtgatgggaatttggttttttttttttaggtgatttgtttttatttataaagaaaatgtttttatattttttaagattgttgagttttaggtatttttttttatgtatttaggaaggtgatgaaggagagtttcgaagggagtttgttttattattatttaatgaattaaagttagtatttttagataaaaatttgttttaaaattttgagaatttagttttaaaggttgtttaaaggtgtagtttgtattttgtataggtagttgtttattgatgagtagatttggtttttgggatggtttttttatgatttagagtatagtattgttttttaagaattttataagtatttaggttttgaattaggttttaaaatagtatttgattaaggtggttgttatgtagtttatttagtttgtatgtgaattagattttaggaggtaatatttttatttttgttttttataatgataatggttttaatataattataaaaataaattttagaattaatagtatttgttagtttgggttaaaatatatttttttgtgagaaatatataaatagattaattagatattaaattaattaaggtaagatagtagtgataatagtgatttggtgagtttagggtgttattttattgtaatttgttatttattttatagtttaattttttttaattttattttgtgtaaatttttttagtataatgatttaaaatagaattttatataatgttttttattattttttaattttagatttttatttggatttttaattttttgagttggtttttttttgtattgttttttattttttttttttttttttaattttttttggtttggaattttttagagaaatatttgttttgttagttattgtaattggtttttttaaatgtttatttgaattgagtagttttagataggagttgaaatttggtgtgtttatttatttttgttattttgttagttttttttttatttttttgatttggtaatggaaagttacgtttgtattatttagatttttttttttataatataggttagagtttgttaaagtgggtttgtattttgaaaagtgattaggtgtagggaaaggtaggttgggtttagttggttgtttatatttttgttattagaatatgttatataggggtaaaaatatattttagtttttggtcgtagtattatgaggttgagttgtatgttgtatttatttttatttgttatgtatggaaatgattgtaagtttggtttttttgtttgagtgtttttaaaagtatagttaatatttatttaagtaattgggttttttattgtaaaaagttattggaattagaaggtattattattttatagttgttcgttttttaattttgtgtaattttgttttttttttaggaagaagggggttttgttaatttatttaaaatcgaataaagtagttattgtttatttttatgattgtttatgagtagaataattatagagaaaagtaaagttgtagaaaatttttgaaatttaattttgatttagtagttgtggtgaattttttgaaggagaaggttgttgttaatataaaaaaaaaatgagtttataaatggattttttgttttttatattttaattgtagtgtttataggttgaatattttgaattttatattttttttattttttatttattgaggatataaagtatttttaagtggtgaaatggttaataggtaaaaggtaagggatttacgtgatatatatattggataatttttttggaattattaagagttatttataattaaggttttatttattattgtttttttttttatattaatttagatattttttttattattgtgtttgtaatagttgatttataattaattaattttaaagtgatataagtatgagaagaaagtagttatgtggattggcgtgttatattaattatttttttttgttatataatgataatttaaatttttattggttttgttagtttatgtatatagatgaggaaatatgaattgtaataatttatattttattgttttttgtttttatttatttagggttgaagagggatttaaggaaattattagggattaatttaggattatacgaggtgttagtagagaaggttgtgaattttggttatatagagttttgtagttaggttgaagatataagaattttttggtgatcgaatattaatggcgagggtatggtaaggggtgttagatttagtgtagtgtttagaaaatggaaatgatttgggaatatttaatgttttaaattagggatattttttgtatattttaaaagatataaatttattttttggaagttgatgttatttgtgttttatttgtttgtttgatatggtttttgttggtttaaattttagatattgaaatttttatataaattttgtttattaaatttaatttttttaatttatttatttgaagaaaattttgtagtggtaagttttatggtttaattgtagattttattatgtgaatttattttaagtgattgtatgttaggtttatttttattttttgatgtattttttgtcgttttattgtgggtaggatataaaggaatttagttattttatgttttttgtttatatgtaaatatttatttttttttttttttttgttataatttttttttttttttttgatttttttttatttttgatatgaataatcgtagtttttatttggtaataaataatatgatataatattgtttttatgtatttaaatgaatgtaattagcggaattttttattatttttttgattagaattttaattgtaggaggttttgttggtttttatttatttgtgttatattattttattacgttgtcgtggttttaattaatataataataaatggaaaatttttgaagaattattattgttattagtgttattttttttagttaaattttttagttttatgagatttatgaataaatatagggaggttttttaaataaaatttaaatttaattttagaagtaaattaaagtttattttttattttaggattttaattttttaaagaaatgtagtaattggttttattttattttttaaattattttattattacgttttgaatgttattatttgttatgaaaaagtaaatattttaaatttttaaatttattaagttttattttgattagttttagtggtaaagttaaatataaatgatgtatttaatttttttataagtttttatttttttattttttaaaattattgttgggtttgtaaatgggagttttaaaatttttatttatatttttttatttgtagagtgatgtttaaatttttattttaattttaattaaatatgtaaatttagtggttttgaaagtaaatatatatttaatttttttttttattaatagatagatagatagtaagttaaaggaaattttagatattatttaagttgaagttttttattttataaatgagaaaagtaggatttagaaagtttgtgttgtgttttttttaaataagaagtagttgatttttttttttttttcgttttttagttttaagtgtacgtttattatttaagagaggaaataatttttatataacgtttttgtcgatatgtagtttatttgtataataaatttgtatatgtatttttgaatttaaaataaaagttaaaaaaaaaaagaagtagttgaaatagattttagggtgtttatgatttttttttttttttttgaattatgaagtttttttgattatttttgggtttgttttttattatatttttttaaatttatttttagaagttagaagataatatggttattattttgatttatttataaatatttttataaaatttgtttaaaaaaattatagtttatttgtttttataagggtttatgagaaatagagaattttatatataattttattaaaaataaaagtaaatttttttaatttagagtagttttttgattatttttggagtaataaatttttaattcgtgcgaatttttagaaggatgtttttaatttacgggtagaggttgtaatagtatgtattaattttgtttttaagaaaaaaataatatgttttgtgtatgtgaaatatataagaatatatgaaataagtataagttaatgggaagtttaataagattaggaaattattaaaagtttattttattgtggttattttatttataattttattaattattataaataagatataaaataaaagtaaaatttgagaataaaaattgggagttattaggatttagtttatgtaggaaattatatttaaagaaaatataaattttattttatttatttaggtttttttgaagagatttttttaaggattttataaagtatgttaatatcgaaagtattttttatatttttttaaaatatttttttttattttcgaatttttatttatattagtaattaaatatttttcgtttttttttaaatgtagtttttttataataattatgttttttttttttttttgttttttatttttttgtatatgtttatattatttttatttttaaagtatttagtgttatgtgatttatttattttattttattttattacgtaaattgtatgtatattttttggaagtttagttttttttttattttggtaatattttagattattagttttttttgttttaacgaagatgaataaaattttatggaatttttttgtgtgagtgtgtgagtgagtgtgtgtgtgtgtgtgtgtgtgtgtgtatgtgtagattggaaataaaataaagtaaggttgtaaaagatttaaataatataattattatgttaaatatgaatttattgaattttatattttaatagtagagaatatatttattttaaatgtttatggtttatgtatagaaatttattatatataagttataaataaaatattagtaattttaataaaggaaaaatattataaataatattttttgattatatttaataaaattagagtttattattaataatagtagaaaaatttatatgtttttttatatggatagtaaaaattttgttattaatttttgagtaaaagttaaatagaaattgaaattataagaatttaataataataataatgataatagtttttagttggggttaagatatgaaaagtatattttattatatttttttttgttaattataattaaaatttttggataaaagttataga

SEQ ID NO: 1989 - DNA, 7447 bp, Artificial Sequence
  chemically treated genomic DNA (Homo sapiens)
tatgaattaatttataagttaaaatttatagaattgtatgttaaataaagattaattttattgtatgttaaattgaaagtaaaaaaaaaaagttataggaatgaatgtatatttataaattgaaataattattttgaaggaaatgaatattttatgagagtttaagagagaggagggatattgttttgtgataaaggaaagtattaagaatgttttttttgaggaagtgaggtttgagttgggttttaaaaaatgatttagaatttatttgggttaaaggaaggttgatttatatagaagtatttgtatgtgtaaaggtttcggagtaggaggaagatggtttatttttatttaaaaaggattagagtatacggagtgttttggagggtgggagaagtgtatggggagtgagaaaaatttaagttggaataagagagttagattacgttagattgttttaggtggggtttaggttagggtgggtggagaggtgtagttgtgggttggtttgataattttattgatagttggaatattttgtagagattcgggtaattagattttttagggtaatgttggatttgggattggatttttagtagttttagtaggaggcggtttgtttttaaatttaaagattttagatattttgtagtgtcgtatttatcgtagattttaaagtgtttttttttgaggtttttgttttgtttaggagaatattgatagtttagtaatatatattaagttttttgaggggtttgagggttttgagagataagatagtttggtttgtatagattattatagggttttagtgatgtagttgtttttaaaaatatttgtgttaataattaggtattttttagatgggtaatagatttttattattttattttgaattattttatttttttttaggttttaagtttagggtttttttttatttttaggttttagggtttgttttatttagggttgggggtggaggttagagagtgatatagattaaatttataagttgttagttgattatttaatggaagtttatattgaataattttttgttaagtgaatagtttcggaatttgttttgtggtgtaataagggttgttaaatggtttagtttatatataatagtatgatatatagacggttgtagcgagatatgattttaggtattttatgggttaaatgtaggtagttattatgatttttattttagagatgaagaaattgaggttttggttagtgatttgaaaagttatatagttagaaaatggttaagatttggatttaggattgtttaattttaatatattggtttattgatttttaaatattagtatttgggtcgtgagatggaaatttattaaaaatgtagatttttcggttttatttgggttagggaattagtattttaaattttaaataaggggattttaggtgttttttttttttttaatttgaagaatttgggggattttgtaaatgatttgaagtttgagaggaagtgtaatattgtagggtttttaggagggggtattttgttgacgtttgtgattaggtttaattttttggggttttgcggtttagtgttgtatattgttatttgttttgaggtgcgtttggggtttagattggtcgatgaatacgtatattcgtagcgttttttttatttcgaagatttttatttttttttttgtataaaatcgaatattttattttattattatttttaagttaaaatatttgggtcgtttttttttacgaagggacgcgttttaggcgaatggggagggttcggaagtcgggtttgggatagaggagtcggtttatcgtttttcggtcggaagcggtagtgtaggtgaggcggcggttagtttggggattgcgcgggtaaggagcgggagggcggaatgtatcgcgaagttggcgggggacggttacgtacgtttcgtttcggtttttttgtatcgtagggtcgttttttcgttatttttgggtatttgtcgattacgtttgggcgagggcgggtcggttttcgttttcgggtttttatcgcggcggggacgtcgggttagcgaagggttaagggattcgtttttttttttcggtttttttatttttggaaagttttcgaaatgacgttttaattcgataatttaaaaaagagtttaattatagagataggttttgggagttggaataaatttttggtcggcggggtcggtaaataattcgggagcgagcgggttaggttagtcgtagttttgcggagttcgcgttttcggggagagggggaggggagggttttcgggagttggaaaagtcgaggaaattcgaggaattagttttttttggaaaaatttattttgtagttattttggggcgtttgatggtgtttttggtcggtttcgtagttttggagggaaagcggcgtcgttcgaagtaggggtatagtcggtgtttcgcggggataggttttgggtcgggaagggggtttcgttcgtttttagttttttttttttttgtttttttttagtttttttttcggtttttttagttgagtttcgcgaattttcgggagttaaagattagtcggttttttttttggggggggtggggggtgggggagcgggaatgggtggaggtcgggggaataaaaaatcgaaatagttttatattagaatttagattaattttgtggttttaacgcgtattttgttttgttttgaaatttggaatttattattttattattaagaaattgtacgaaattttttttttatcgttttaatatttatttgggaaaggaacgagtaaatatttttttaagaaagaaatttatatttgaatgatttaaattaaggtggatggaagttatttttttttttggcgtttgttagattttaagaaaagttgaaaaatgggagcgggggagggaagtaatagacggttggagggtagtagtagaataagcgaggggtagtagtcgagttaaagtgggggttatttatttcgggtagaggagataaatgaaagtcgatttcgttgggattacgtaggttcgtggttgtagtaaaagttgggttttataaagttgaaaaatagtcggttttttaaataattgtgatttggaaggtttcgttgggtttgtttagatgtttacgaataaataagaaatgtagttttaaaaaaaagtgtgtgttgggggtggtgagaatgcgtttttttcggttcgtttcgttttttttaaagaaacgtgtttataatggggtgatttaattatatcgtaatggaatttaattttagttatttcgtagtatcgggttttataatagattcggcggtttcgagtgttgggaagaaacgtgcgagggtcgaggggggcggcggagttcgcgtggaaatcggaaagaagcgtagttttgcgattttcgtttgggttattacgttagtagtcgggttaaggcgtagggggcgggtgggggattcgttaattttttatttgggtgggcggtatttaaatttaatagtatatattttattatttttaagggagttatgttttattgcgggtttttcggtttcgtggtttttatgtttttttttttatttttcgttaaaacggcgtagcgtgataagttatatgttttatttcggtgggggcgagagagaagtaataataagttaaaagtgtcgtttttttttatttttttatttttatttttattaaagtaatttttttttattgttttagagttttgaggtgtgtgtggggaggatggaggaggagggagggttgtggcgtcgtttagaattcggagcgcgcgtggaaagtagtgagttgttcggtgggttttttttgggaggaaggggtatttaggaaggattagggtttttttgattaaaaagtttaaagattggatgcgtgaaaagaaacggtacgtttaggtttggtaaaataaataatcgtttcgggttgtggtttttttttgcggcgttttttattcgtttatattcggagagcgtcggttgtaaagcgagcgcgagtgtcgacgcgtgcggcgtattaaattgtgtcgcgttcgttttcgttagattatgtttttttggggaaaaagtttttttagtttttttagtagcgcgttttattttacgtttcgttggaaaaaaaatagtaatataaaattttaggtttgaatattttgtgcgttttaaatttttaatgttttcggtttgttcggtttgtcgaagggagtcgagtgtcgaagagaagtcgggaaaaggtaagttgtgtagatatttggggaagttttaaggagatcgttagtttaagatggaaatcgcggttcgggcgttaaggacgggttttagttttcgttggtaaaaagagaaagtcgagttcgtttttttgtttaataaaaaataataatatgataataagaatttcggagggagtggaatgagtgacgttatagtcgcgttttgaggttgataaaggagggggcgcgtttttttcgttttgcgttcgcgcggtttcggagagggggcgtttgaagcgtcgggtagggaagttagtcgatttgaaatttttttttttaaagaaaaaaaaaaaaaagttgtgcgcggtttatagtggggtttttttttttcgtttttttttttcgttttttttttttttttttttttttgaaagtttttttttttttttttgtttttttttttcgtttgatcgtatggttgatttaattttagtgttaattaattttttttttttttttttttttatttaaataagtttaaagtttttttttttttcggtttattaaatttgaattttataaattgggttttgcgcgttttagttcggagttagaaaggcgaggggcgtcgggaattggcgtgtgggattttagataggagaggatgcgtttttttcgtatcgggattttcgcgatatattagattttcgtttttggttcgcgcgaacgtataggatgattattattttcgtgtttgttattattttcgatttgagcgaagttttatgtaaggtaaaggggggcggagtatttgttttttaaaaagttttttttttttgttttaagaaagaatttttaaaagtttgggttttggaaggtaatggggaaagtggtgtagcgagatgatttttttttttttcggtattttttttaagtttgaaggaatttggtttcgttttttttattttttgagttttaatagttgttggcggggattatatgtgaatttggaggttagggttttgaggggcgaagtttgtttggtagggtagttcgggggtttcggggggagggttgggattgggataagttttgggcgattttgttttacgtaacgtgttgttggattttaggtttgttggtttgatcgggtttttagtttgcgttttaggtttgtttagcggtattatttattcgtggggttgggagtgggaggtttttcggggaagtgagtttcgggataatgtttttttttattttttggggggagttggggatatgcgaggaagaaaggttaagttgtgatttaaaaagatgttgtagaataagtttgtagtggggtttgagttcgttttagtttcgttgggttttttttcgcgatagtcgatcgtgtagtaaattttggggtgaaagaggtatttaggttgattcgtttatttgtgttgtcgaggtattgcggtttatcgattgcgggcggggttggggggggaggtggcgataaaatgttggtttgaattcgagagtttcgcgagtaaggatttaatggggggttttttaaaatatgttgtttgttagttagtgttgaaaaagtaagttttaaattcggaatgttttaggattgcggtttaaatgtatatagtaaaagtttatggatgttgttaaatttttttttaattttttttttttaatttgaaagggtgaagttgttgggttattttttaattgttgaagtgttttgtttttttttaatacgtcgggttatgttgttttgtttttttagtttgttgtttttgttggtgtagttgttaacgttttagggttgtagggttggggtgtagggacgtcgaggagttgaagagtagtatttaaaaagtttgaattttttagtttttttttttttttgtatatttttaaattttatttgttagttcggttgttagcgttttttaatatttttttttttttttttcgattttttcgttttttgatttatttttttttttggtttttttttttttttacgattttttaaatgaattttattgttgggaattagttttcgattgggtttttgtaattttttcggtggggtggttgtagttatagattttcggtttttttttgttgattttaagggattaatattagaatttgtataatgatatttatatgggttgggaattaatttttaggtttttgatttgtattatttttaaattttgggtataatttgggtaggtgattagggttttattggaatagaaatttgttattggtggttttgtttttatttttattatttttaattcgttattgattaggaggtgggtaggggggttggtgtttttttttttttttttatttgtagttttgcgttaaagattaaatattggagtttttatttaagtttgtttttgtagttaaaagattaattgtaaaggtatttttttagtgaagggggcggggtgggttagggttgagtggaaatggtgagagagattattgtagaaaatatttttttcgggaatttagggtaaagagttttatttttaggaattatatttttgttttttttaattttagattaggtttttaattttttttttataagaaaaagtaaaggtagtttgaaaatttgttgttaaaggaagggaatatttttgaaggaggaagttgagagttttaggttaggttttgaaggagggggtattaattaagtagagattgattggaaggggatttaacgtagtttatgatagatttttttttgaggtttatttgtttttgtcgcgggcggtggcgggggcggggtgcggtaatttagagaggtttgggttgtgtgagatattttgagttgaagaatttatttgattagtaaaaaagttgaattttaaagtggtagttttggggatagaggatatgggggttgtattgtaggagttagtatggagtagggtgtttgttatatagtttggattttgtggttttttacgtatggggttaaaataaatttaggtgaatggtttatgggagggagagagggaagggagtttgttagagtcgaggtagagatgagttttttgagaaagagcgggcgtttgtgattgtgtagggggttgtttatagtggatattttggtggatgttttttgtttttattatttttttttttttttttttagg

SEQ ID NO: 1990 - DNA, 7447 bp, Artificial Sequence
  chemically treated genomic DNA (Homo sapiens)
tttggagagagaagagaaaggatggtaaggatagaggatatttattaggatgtttattatgggtagttttttatataattataaacgttcgtttttttttaaagaatttatttttatttcggttttagtaagttttttttttttttttttttttataggttatttatttgggtttattttggttttatgcgtaagaaattataagatttaaattgtgtgataagtattttgttttatgttgatttttgtaatgtaatttttatgttttttgtttttaaagttattattttaaagtttaatttttttattagttaaatagattttttaatttaaaatattttatataatttagatttttttagattatcgtatttcgttttcgttatcgttcgcgataaaaataggtaaattttagaaaggagtttattataggttacgttaggtttttttttaattagtttttgtttaattgatatttttttttttaagatttggtttaagatttttaatttttttttttagaagtgttttttttttttggtaataggtttttagattgtttttgtttttttttgtggggaggagattgggggtttggtttgaggttgggggagatagggatgtgatttttgaaaataaaattttttgttttaagttttcggaagagatattttttataataattttttttattatttttatttagttttagtttatttcgttttttttattgagaagatgtttttgtaattagttttttggttgtaagagtaagtttggataagagttttagtgtttaatttttaacgtaaagttgtagatggaaaggaaaaggaaagtattaatttttttatttattttttagttaatagcggattgggggtggtggggatgggggtagagttattaatggtaggtttttgttttaataggattttggttatttgtttaaattgtatttaagatttggaaatggtgtaggttagggatttaggagttagtttttagtttatgtgggtgttattgtgtaaattttaatgttggttttttaggattagtagggggggatcgggaatttgtaattgtaattattttatcgagaggattataggaatttagtcgagagttggtttttaataatgaggtttatttaaaaagtcgtgaggggggaggggggttaaagaaagaaatagattaaagagcgggagagtcgagaaaagaaggaagaaatgttggggagcgttggtagtcgggttggtaagtggagtttgggaatgtgtagggagggaaggaagttgaaaaatttaaattttttaaatgttattttttagtttttcggcgtttttgtattttaattttgtagttttggggcgttggtagttgtattaataggagtagtaagttgggaaaatagagtaatatgattcgacgtgttaagagaaggtaaaatattttagtaattaaaaagtagtttagtagttttatttttttaaattgggagggggaggttggaaagaaatttaataatatttatagatttttgttatgtatatttaaatcgtagttttggaatatttcgagtttaaaatttgtttttttaatattggttgataagtaatatgttttaaggagttttttattaaatttttattcgcgggattttcgagtttaagttagtattttgtcgttatttttttttttaatttcgttcgtaatcgatgagtcgtaatgtttcggtaatataggtaagcgggttaatttgaatgttttttttattttaaagtttgttgtacgatcggttatcgcgggaagaagtttaacggagttagggcggatttaagttttattgtaaatttgttttgtaatatttttttgaattataatttggtttttttttttcgtatatttttagttttttttaaagagtggaggaaaatattgtttcgagatttattttttcgagggattttttatttttaattttacgggtgggtaatgtcgttggatagatttagggcgtagattgggaattcgattagattagtaaatttgggatttagtagtacgttacgtaaaataggatcgtttaaaatttgttttaattttagtttttttttcgaagttttcgggttgttttgttaggtaaatttcgttttttaaaattttggtttttagatttatatgtaattttcgttagtaattgttgaaatttaaagggtgggaaggacggggttaaatttttttaaatttgggagaaatgtcggaggagaaaagaattatttcgttgtattattttttttattgttttttaagatttaaatttttgggggtttttttttaaggtaaaagaaaaagattttttgaaaagtaaatgtttcgtttttttttattttgtataaaatttcgtttaagtcgaagatggtggtagatacgagggtggtggttattttgtgcgttcgcgcgagttaggggcgaggatttggtgtgtcgcgaaggtttcggtgcggggaaggcgtatttttttttgtttggagttttatacgttagttttcggcgtttttcgtttttttgatttcgggttggggcgcgtaaagtttaatttataaagtttagatttggtgggtcggggggaggaggagttttaaatttatttaaatgaggaagaggaggaaaaagaagttgattgatattggagttgaattagttatgcggttaggcggggagggggggtagggggaggagaagaaatttttaaaaggaagaagggggaggggagacgagaaaagaaggcggaaaaaaaaaattttattgtgagtcgcgtataatttttttttttttttttttaagaggaaaagttttaagtcggttgatttttttattcggcgttttaggcgtttttttttcggggtcgcgcgggcgtagagcgggaggggcgcgtttttttttttgttagttttagagcgcggttgtgacgttatttattttatttttttcggggtttttgttgttatgttgttgttttttgttgggtaggaaggcgggttcgattttttttttttgttagcgggagttgaagttcgtttttagcgttcgggtcgcggtttttattttgagttggcggtttttttgaaatttttttaagtgtttgtataatttattttttttcgattttttttcgatattcggtttttttcggtaaatcgggtaggtcgaggatattagaaatttgggacgtatagaatgtttaagtttaggattttatgttgttgttttttttttagcggggcgtagggtggggcgcgttgttggggggattagggaaattttttttttaggaggatatggtttggcgggggcgagcgcggtataatttagtgcgtcgtacgcgtcgatattcgcgttcgttttgtagtcggcgtttttcgggtgtgggcgggtggggggcgtcgtaaaaaaagattataattcgggacgattgtttgttttattaggtttaggcgtgtcgtttttttttacgtatttaatttttaaattttttagttaagaaaattttaattttttttgaatgttttttttttttagaaaaagtttatcgagtaatttattattttttacgcgcgtttcgaattttgggcggcgttataattttttttttttttttattttttttatatatattttaagattttagaataatgaaaaaaggttattttggtaagaatgaaggtaaagaggtggagggaggcggtatttttaatttattgttgtttttttttcgtttttatcggagtggaatatatggtttgttacgttgcgtcgttttggcgggaggtggagagggggatatgggagttacgaaatcgaagggttcgtaatggagtatgatttttttgaaaatgataaaatatatattgttaggtttggatgtcgtttatttaaataaaaagttaacgagttttttattcgttttttgcgttttggttcgattgttggcgtgatgatttaggcggaagtcgtagggttgcgttttttttcgatttttacgcgggtttcgtcgtttttttcggttttcgtacgtttttttttagtattcgaggtcgtcgagtttgttatgaaattcggtgttgcggagtggttaagattgagttttattgcgatgtaattaggttattttattatgagtacgtttttttggaaaggacggggcgggtcgaagagagcgtatttttattatttttaatatatatttttttttaaaattgtattttttatttattcgtaaatatttgggtaaatttagcgaaattttttaaattataattgtttgagaaatcggttgttttttaattttgtgaaatttaatttttgttgtagttacgaatttacgtgattttagcggggtcggtttttatttgttttttttgttcgaaatggatggtttttattttaattcggttgttgtttttcgtttgttttgttgttgttttttagtcgtttgttgtttttttttttcgtttttattttttagttttttttgaaatttggtaagcgttagaaagggaaataatttttatttattttaatttaaattatttaagtgtaggttttttttttagagggatgtttgttcgttttttttttaagtgggtgttggggcggtgggggagagatttcgtgtagttttttggtgatgaggtaatgagttttagattttaggatagagtagagtgcgcgttgaaattataaggttagtttgagttttgatgtgaagttatttcggttttttattttttcggtttttatttattttcgtttttttattttttattttttttaaaaaagaggtcggttggtttttaattttcgagggttcgcgaagtttagttggggggatcggaggaggggttggaaaaaagtaaaggggaaggggattgggagcgggcggggtttttttttcggtttagggtttgttttcgcggggtatcggttatgtttttgtttcgggcggcgtcgttttttttttaaggttgcgggatcggttaggagtattattaggcgttttagaatggttataaagtggatttttttaaagaaagttgatttttcgaattttttcggtttttttaattttcggaggttttttttttttttttttttcgggggcgcgggtttcgtaaggttgcgattggtttagttcgttcgttttcgagttgtttatcggtttcgtcgattaagggtttgttttagtttttagagtttgtttttataattaaatttttttttaaattgtcgggttgaaacgttatttcggggattttttaagggtgagggagtcgagaggagggagcgagttttttaatttttcgttgattcggcgttttcgtcgcggtgagggttcgagggcgggagtcgattcgttttcgtttagacgtggtcgataggtgtttaggggtggcgggagggcggttttacggtgtaggaaggtcgaggcgaggcgtgcgtggtcgtttttcgttaatttcgcggtgtatttcgttttttcgttttttattcgcgtagtttttaggttggtcgtcgttttatttgtattgtcgttttcgatcgggaggcggtgggtcggtttttttgttttaggttcgattttcgggttttttttattcgtttggagcgcgttttttcgtggggaggggcggtttaggtattttagtttggaggtggtggtggggtgggatgttcggttttgtgtaagggggaaagtgaaagttttcggagtgaaggaggcgttgcgggtgtacgtatttatcggttaatttggattttaggcgtattttaaggtagatgatagtgtgtagtattgggtcgtaggattttagaaggttaggtttagttataggcgttagtagggtatttttttttgagagttttgtagtgttgtatttttttttaggttttaggttatttgtaaaattttttaaattttttaggttgaaagagagagagatatttggagtttttttgtttaaagtttggaatgttgattttttggtttagatggggtcggggaatttgtatttttggtaaatttttattttacgatttaaatattaatgtttgagaattagtgagttagtatattgaagttaggtaattttggatttaaattttggttattttttagttatgtgattttttaagttattgattaaggttttaatttttttatttttgaaataggaattatgataattgtttatatttggtttataaagtgtttagagttatgtttcgttgtaatcgtttatatgttatgttgttgtatgtaaattaagttatttggtaatttttattatattataaaataaatttcggggttatttatttggtaaaggattatttagtgtagatttttattaaatggttaattgataatttataagtttgatttgtgttattttttagtttttatttttagttttggataagataggttttgaggtttggaaatggggagaggttttgggtttggagtttgggggagagtaaagtggtttagggtagggtgatggggatttgttgtttatttgaaaaatatttgattattgatataagtatttttgaaaataattatattattggggttttgtggtagtttgtataagttagattattttattttttaaagtttttaagttttttagaaagtttagtgtgtattattgagttgttaatatttttttgaataaggtagaggttttaggagagggtattttagggtttacggtaaatgcggtattgtagggtgtttggaatttttgggtttgggagtaggtcgttttttgttaggattattgagaatttaattttaggtttagtattgttttggggggtttgattgttcgggtttttgtaagatgttttaattgttagtgaagttattaggttagtttatagttatatttttttatttattttaatttaggttttatttagagtagtttggcgtaatttgatttttttattttagtttgggttttttttattttttatgtattttttttattttttagggtatttcgtgtgttttagttttttttagatgagaatgagttattttttttttatttcggggtttttgtatatgtaaatgtttttgtgtgaattaatttttttttagtttaagtaaattttaaattattttttagaatttaatttaagttttatttttttagggaaaatatttttgatgtttttttttgttataaaatagtgtttttttttttttttaggtttttatggaatgtttattttttttaaagtagttattttagtttgtgagtatatatttatttttgtaattttttttttttatttttaatttaatatatagtaaaattgatttttatttggtatatagttttatgaattttaatttatgaattgatttatg

SEQ ID NO: 1991 - DNA, 5304 bp, Artificial Sequence
  chemically treated genomic DNA (Homo sapiens)
tttttatttttattatattttatagtatatataaaatttaattttagatgggtgataaatattaatatgaaaggtaagattataaaattttaggaagatataggatgttatttttacgattttggggtagataaagagatttaaagtataatataaaaaatgtaaattgtgattggaagcgttgataaattggattatattgagattaagaatatttatttattaaaagatattattaagaaagttaaatgaagttagagttttaaaaattatgtttaatattaatgtttgataaaggattttttttgaatgaagaattaatttttataaataaataagaaaaaggtagataatataatagaaaaatggataaaaaattttgaaaaattagtttataaaggatatttaaaataataataaatatatgaaaagttgttttatttttttagttattagggaaatgtaaattaaaagttatattgagattaaattatttataagttaaaaaaatttgaaattaagttaaagataagtggatgaattatgtgaggtaattagattatttatatattgtgttgggagtgtaattagaataaatattttgagagattgataatatttaagaatagtatatatttagaaaaaattgtgttgttttggaaatagaaaagtataatttgaagtaaattatcggttaaagaagaaattataaagaagttagaaaatattttgaattggaggttatgaatatagaatatattaaaattaggaggaggtaattaaagtagtgtttagatggaaatttgtatatttaaatgtttatatttgaaatgaatttaaaattagtaattttagtttatattttaagaagtttgtaaaaaatgagtaaattaaattttaaataagtagaaggtaataagaaatataagaatagaaattattgaaattttaaaaaaaaaattgagaaaaagtaaaaagttgtattatgaaaagattagtaatatcgttaaattttagtaagtgtaattaagaataaataggagaaaatataaattttttgaaatagtaatgaagaggaggtattattatatagtttatatatatatataaggtaataaaggtatataataaataattttatgttaataaatgtaataatttaaatgaaataaatatatttgtaaaaaaaaatataatttagtaagttttttttaagaagaaatagaaattgaattgtattatatatttattaaaaattgggttaacgttaagaaaataatttttttataaaaattttagatatagatagttttattagttagttttattaaatatttaagaaataaattatattttgtataaattattttagaaagtagaggaggaggaagtataagattttttattaaaattagatgataaaattataagaaatgaaaatgatggagtaatattttttatggatatatatagaaaatttttttaaaatttattaataaattaaatttagtagtaattaaatttatgattaagtgaatttgtggtttgatgttttttgtaaatattgaaaagtttttagaatttattttttgaatagtgtttttgttttatattgattttttatttaatgaaaggattttttatatttgaaagatttggggaggaaggtagttatttagtaaagttatttgaattttttgattgtggtgtgagggagaaagaaatttttattgtggtaagttaatgagaattgaggattattattgtaatggatattatttattatgataattagttttattattttaaacgtataaattttatttatttttattatttttatttatttatttattttgagatggagtttcgttttgttgttttgttagtgtgtaatggtatgatttgggtttattataatttttgtttttcgggtttaagcgatttttttgttttagtttttcgagtagttgggattataagtgtttgttattatgttcgattaatatttgtatttttagtagagacggggtttggttacgttggttaggttggtttcgaattcgtgattttaggtgatttatttgttttagttttttaaagtggtgggattataggtgtgagttattgtattcggttataaattttatagtttattttttagtgttttattattttaaattgtgaggtatatatttttttgtttattttgtttattgattttttttaattgacgatggtttaggatgatgtagagtttgtttttttgaatggtttatattttttattttgaattgatttttatggatattgcgatttgggggtattttttggagttttatgtgtgtaaagttattaaattttttttcggaggaatttttgaattttaaattatataatatatatttggattttatatttaagtttaatgtattttttggtttttaaatgtgtaattatttttttttttttattcggagtttaagtagaaaatatgtttttttttatttttttggttaatggttgaggttttttggttttttttatattggaaaggagattatattaatttttggatttatgtgaatattttagttttagttttttattttttataggttttaagtttaaggttattttattttttgagagtgtgttaaaattttttttttatttatagaatttatatttttggtatgtttaggtatgtatttatattttgttatgttttatttgttgttttttttttgtttttttttgttttttttttttttgttttgggaacgggagtgagtgtagaatttatatagtttcgttagttttattttaagaatgttttgttttttttttcgttttataaatgaaaaatttgagttttatagatgggagttaatatagttaaatttatagatttatttatggtataggggagattgaagtttattttttaatttttagtagttttatattgtaagttgagtgagtggattgcgtttgtaggttttttaggtgtttagcgagaatagaggataaataaatatttacgaattgtttgttttatttgaaaatggtttatttttaggtttttgatattatggggtgtaatggcggtaaagaagtagttttggttttaggaatgtgattttgatagttatattttagaaaaaattaataaatttttttggttttatgggtttatgtttttttagaagggaagatagggtttttaggtatttttagcgttcgtagaagagtgttgttatagttttatgattagtgtaggggatgtgttattgagaatttttttattgatgttttatgggttttttttattttgttattgggttttatttttttttttttaattttttttttattaataattaattttttgtagataattaatttattaagtgtttgttttgtgatgttcggattgttagaagtggtagggggatttaagagttagatgaagttaagggtacgtttgtttgttttttagggatttttggcgttttttttttttggtagaatgattgttattttttgaggtgaatttagtttagttgttattttttttattaattattttttaaaaatagttaattttttttttaggtttttatcgtagttatgaaagtttatgttgattttttgtttaaatatgtgtatattaatagtaatatatttaagatattttatggtaagggtaatatattgcgttatttttttaaattaaatagttgggtttagttttttatttttgttattggggtatagttaagtttagttattttttggtgagtttttttttagtttttggagttttaaaagaatttcgtggttttcggtagtttagaaatttaggtattgtcgttgcgtggtttacgggagttgttttggtggagttcggatgttcgggggttgtaggaaagaaggtggtagcgttttttacgcggacgtagggcgttgttgtgtttagtagaagggagtaaatgggatggagttttagttattttggaagtcgttttttggcgtttttttttttttttttttttttttaaaattaagttttttttttaatattaagaatttttcgtattttttggattttttagagtttttttttatttattttttttaatgcgttggtttaaaagagtttagataagaatattaagttttggttgtttttttagtaaagagttaggagttaattttttaattttttttaattttttttaaaaaagaatgagttatatattagggtaattattgggaattttattatatatattggcggtatttttttttttcgatagggtgtttttagtattttagattttagtcgagagtttggttgttggcgtttagtaaacggtgcggaaagtaaatcggggttcgcggaaagcgggaggaggggggttttttcgggtttgttttgtttggttggtaagattttcgaagtttggttttttatagttgttattcggtcgttggcgtggaggagggagttcgggaagattggattttagaattgtttcggttttttttcgagtgtttagcgtagtttttggttgagagcgggagcgggttgagtggggataaagaacgtaagggagaggtagagtttggttttgggtagtttttggtttggttagaggcgcgaggtcgagagttcgttcggtggagattgggggtggaggtgttcggagcgtatttagcgtcgggagtatttttcgtttatatttcgggttgtagttttttgggtggtcgtcgagacgttggttcgggttggagggatgggggggcggggacgggggcgggggcggggttcgttacgtggagaggcgcgcgggggcgggcggggcgggggcgcgcgttcggttttttaaaggcgcgcgagtcgagcggcgaggtgtttttgtggtcgtaggcgtaggttcgggcgatagtcgagacgtggagcgcgtcggttcgttgtagtttcgggatttaatatgcgttgttcgtcgggaggcgtttggttggcgttggtcgcgtcgtttttgtacggtaaagttattgttttttcgttttttattttttcgtgggatttcgggtatatttcgggcgtttttgtgcgtttcgcgtttgggttaggtttgggattttttcgtcgtcggggaggggtagcgggggcgttgcgggggttgtttgtttgggttgtatcgggtgggcggcgggggacgtcggtaggagggagtcgggggtattttcgtcggtttgttttgagttttttgttcgggttttttttttttaagt

SEQ ID NO: 1992 - DNA, 5304 bp, Artificial Sequence
  chemically treated genomic DNA (Homo sapiens)
atttaaggagagaagattcgggtagggggtttagggtaggtcggcgggggtattttcgatttttttttgtcggcgtttttcgtcgtttattcggtgtagtttagataagtagttttcgtagcgttttcgttgttttttttcggcggcggggagattttaaatttggtttaggcgcggggcgtatagaggcgttcgggatgtgttcgggattttacggaggagtggagggcggggaggtagtggttttatcgtgtaggagcgacgcggttagcgttagttagacgtttttcggcgagtagcgtatgttgagtttcggagttgtagcgagtcggcgcgttttacgtttcggttgtcgttcgggtttgcgtttgcggttatagaggtatttcgtcgttcggttcgcgcgtttttaaggagtcgggcgcgcgttttcgtttcgttcgttttcgcgcgtttttttacgtgacgagtttcgttttcgttttcgttttcgtttttttatttttttagttcgggttagcgtttcggcggttatttagggaattgtagttcgaggtgtgagcgggaggtattttcggcgttgggtacgtttcgggtatttttatttttagtttttatcgagcgggttttcggtttcgcgtttttggttaggttaggggttgtttaaggttaggttttattttttttttgcgttttttgtttttatttagttcgttttcgtttttagttagaagttgcgttgggtattcgggagaaagtcgggataattttggggtttagttttttcggatttttttttttacgttagcgatcgggtggtagttatagggaattaggtttcggaagttttgttaattagataaaatagattcgaggaagttttttttttttcgtttttcgcgagtttcggtttgtttttcgtatcgtttgttgggcgttagtagttagattttcggttgggatttgaagtgttggaggtattttgtcggggaggagagatgtcgttaatgtgtgtgatgggatttttagtggttattttaatgtatggtttatttttttttaaaggagattaaaaaagattgaaaagttaatttttaattttttgttggaaggatagttagaatttggtgtttttatttaggtttttttgagttagcgtattggaaagagtaaatgaggagaggttttgagaggtttagggagtgcggagagtttttgatgttgaagagggggtttgattttggaaagaggaagggagggaggaaggcgttaaggggcggtttttagggtggttgaagttttattttatttgtttttttttgttgagtatagtagcgttttgcgttcgcgtagggggcgttgttatttttttttttgtagttttcgggtattcgagttttattagagtaattttcgtggattacgtagcggtaatgtttgggtttttgaattgtcgaaaattacgggatttttttaagattttaagaattagggaaaggtttattaaaaggtgattgagtttgattgtattttagtagtaggaatgggggattgagtttaattatttgatttggaagaataacgtagtatattgtttttgttatgaagtgttttaaatgtattattgttaatgtatatatgtttaaataaagggttagtataggtttttataattgcggtaagagtttagaagaaggattagttgtttttggagagtggttaatagaagaggtgatagttgaattggatttattttaaaggatagtagttattttgttaggagaaagggacgttaggggtttttggagagtagataggcgtgtttttagttttatttggtttttgagtttttttattatttttagtagttcggatattatagagtaggtatttgatgaattaattatttataggggattagttgttggtaaagggagaattagaagaagggaaataaaatttagtagtagaatagagaaagtttatgaagtattagtgaaaagatttttagtggtatattttttgtattggttatgggattgtaataatatttttttacgagcgttgaaagtatttaagagttttgtttttttttttagaagagtatgagtttatggggttaagggaatttattgattttttttggagtatggttattaggattatatttttgaaattagaattgtttttttatcgttattgtattttataatattagaaatttagaaataaattatttttaggtgagataagtaattcgtaaatatttatttgttttttgttttcgttaggtatttggaggatttgtaagcgtagtttatttatttagtttataatgtaggattgttggaagttggaaaataaattttagttttttttgtgttataggtaggtttgtgagtttggttgtattgatttttatttatgggatttaggttttttatttgtgaaacgaagaaaagagtagaatatttttggaatagagttgacgggattgtataggttttatatttattttcgtttttaaagtaaaaaaaaaaaaaataaaaaaaaataaaaaaaaaatagtaaataaaatatagtaggatgtgaatatatgtttgggtatattaaaaatatagattttatgggtaagagggaaattttaatatatttttaggaggtaaggtgattttgggtttggggtttatgagaggtggggaattggaattgagatatttatataaatttagaaattggtgtaattttttttttagtgtaaaaaagattaggaaattttaattattagttagggaagtggaaggaagtatgttttttgtttgggtttcggatagggggaaaaagataattatatatttaaaaattaaaaagtgtattaggtttaggtgtggagtttaaatgtgtattatatggtttagaatttaagaattttttcggaggaagatttagtaattttatatatatgggattttaaaaaatgtttttaaatcgtaatatttatgaaaattagtttaaaataaaaaatataaattatttaaggaaataaattttatattattttaggttatcgttaattagggaaagttagtaggtagagtaaataggaaaatgtgtgttttataatttgagataataggatattgaaaaataaattataaaatttgtggtcgggtgtagtggtttatatttgtaattttattattttgggaggttgaggtaggtggattatttgaggttacgagttcgagattaatttggttaacgtggttaaatttcgtttttattgaaaatataaatattaatcgggtatggtggtaggtatttgtaattttagttattcgggaggttgaggtaggagaatcgtttgaattcgggaggtagaggttgtggtgagtttagattatgttattgtatattagtagggtaatagagcgagattttattttaaaataaataaataaataaaaataataaaaataaataaaatttgtacgtttaaaatggtaaagttagttattatagtgggtgatgtttattgtagtgataatttttaatttttattggtttattataatgaaagttttttttttttttatattataattaaaaagtttagatgattttgttgggtggttatttttttttttaggttttttagatataaaagatttttttattaaatggagagttaatgtaagataaaagtattatttaaagaataaattttgagaattttttaatatttataaaagatattaaattataaatttatttggttatggatttgattattgttgaatttaatttgttagtagattttaaaagaattttttatgtatatttatgaaggatattgttttattatttttattttttgtaattttattatttaattttggtagaagattttatgttttttttttttttattttttgaaatagtttgtgtaagatataatttgttttttaaatgtttgatgaaattaattagtggaattatttgtgtttggagtttttgtggaaagattatttttttaacgttaatttaatttttaatagatatgtagtataatttagtttttatttttttttgggaaaagtttattaaattgtatttttttttataaatgtgtttattttatttaagttattgtatttattgatataaagttgtttattatgtgtttttattattttatgtatatatataggttatgtggtgatattttttttttattattgttttaaggaatttgtgtttttttttgtttgtttttgattatatttattaaggtttaacgatattattaatttttttatggtataattttttgtttttttttaattttttttttgaaattttagtgatttttatttttgtgttttttattattttttatttatttggggtttaatttgtttattttttataaattttttgaagtgtaaattgaggttgttgattttagatttattttaaatgtaagtatttaaatatgtaaatttttatttaaatattattttagttgtttttttttaattttgatatgttttatatttataatttttagtttaaaatattttttaatttttttgtgattttttttttgatcgatgatttattttaaattgtgtttttttgtttttaaaatagtatagttttttttagatatatattatttttagatattgttagttttttaaaatatttgttttaattatatttttagtataatgtatgagtgatttagttgttttatataatttatttatttgtttttgatttaattttagatttttttggtttatgggtaatttgattttaatgtggtttttaatttgtatttttttgatgattaaagaagtggagtagttttttatgtgtttattgttattttggatattttttgtgaattgattttttagggttttttgtttatttttttattgtgttgtttgttttttttttatttatttgtaggaattaattttttatttagaaggagttttttgttagatattgatattgaatataatttttagaattttggttttatttaatttttttaatggtattttttggtgaatagatatttttaattttagtgtagtttaatttattaacgtttttaattatagtttgtattttttgtgttgtgttttagatttttttgtttattttaaggtcgtgaaggtaatattttatgtttttttagagttttatggttttattttttatgttgatatttgttatttatttagaattaaattttgtgtatgttatgaagtatggtaggaataggga

SEQ ID NO: 1993 - DNA, 5542 bp, Artificial Sequence
  chemically treated genomic DNA (Homo sapiens)
aaaggaggagtaaagaattgagtatttagaatataaagggaggagaagtgaatgttatagaaggagaaaaggttgtatagagatattttgaaaaatataaaaaataggagaaaggagtagtttattttgatttttataattatttttaggtggttttggaaggagggagggagggagagaagggagttaagattttagtgagaaaggttgtggagttaggatgaggaagaaagagaaaggtgagattatgcgataggatcggagtagaagttagtaggttatgaattatggatgagtagtatattgaatatttggatattatttttattttatgtattatgtatggtattagtaataatgtaaaatatatttgtatgtgttttgttgaagaagttaaagagagtaaaggttgatgagtggaaattaatagtatagtagatattattataaatttaaagtttataatatgttattaatgttattagtgttttgatttaagggttttatttattttttattattttattttatttttattttttgagatagagttttattttgttatttaggttggagggtagtggtatgattttagtttattgtaagtttcgtttttcgggtttaagttatttttttgttttagttttttgagtagttggtattataggcgtttattattacgtttagttgattttttgtatttttagtatagacggggttttatcgtgttagttaggatggtttttattttttgatttcgtgatttattcgtttcggttttttaaagtgttgggattataggtttgagttatcgcgtcgggttttaagggttttattttaatgaatgcgtataaatgtgtataagggttttttaggtaaattttttaattaggtgtttttttttaaatattgagtagtttttagagtagattttttttgttcgagggttttattgttagtattttatataaaagtttttttattttggttatttagttttatttaaggatgatatcgttttttttggattgtttgttttttaaaatttttggatttaaatggaattttgttttttatttattaatgtggagttgttttgtgttttttggagttattttgttttgtttttagatattagttatttttgttttatatttttaattttaggttagtaatcgttttttttatttaaagtttttaatttatttttttgttttgaaatttttttttataggagaaatgattagatatttttgtttttttttgtatttaagattataaagatagttgtgaattttttttgttatttttttttttaaggaatttaaatttaagagaggatataggagggtgaggattattatatttttttatatgatattgataatagtttatatttaatgaatatttattttgtgttagtaatttaatgtgttaaatattttatataattttagtgttgttattatttgtttgttgatgaaaaaataaggttttatggttagtaagtgatggagttagattttgaacgtatataaatgagttttaggttcgtgtttttaatttttaattatgtggttttttttagattggaggttttagagggaagaatttgtaatttattatatttcgtgtttttattattttatagatggttaatatgtaaagggtatatgtagaatattaggggaatgtattttagattagggaagagataggagttttattagttaatgaaagatagaattttaggtttatagaatgtttattttgggagaggagaagaagagaggttatttattatatagatttgaaggttatagattttaaaattattttaatttattttttttgaagtatttttgaatagagtaagtaaatagaatgagtgttaattttttggaaatagtaattgatttttatattgttttttatagagttaatatatgtagatagtttgatttgtttattgatttgagttagagttgagtgaatgagttggatgtaaaattttttaatttattattaaaagttagttagattttgaacgacggttatttttttttttttttttaatatgggtgataatgagtaattgaatgtttagattgggagttgagagattatttttattttgttgagtaataaatatattaattaataaaataggaaaattttgttaaagaggaagtttttattaagattatgttggaggttttttttattgtattggaaagattagttgagtttagtggtttttaagaaagtataattatgaaaatagttacgtttagagtttagagagtttgaattatttttttgattggaagattttagtttagattattttattttattttaaatttgttaaaaattttatattgttaaattttttttttattttatgttaagttgttaagtttttaaataaataaatttattatgataaattttatttttattgatgtaaaggttattggatatttttttttagtatttagtttaatattaaattaatattttgtattattttgatatatgaagatatttataaatatagaagagaaataattttaattagttttattgtgttgtaatttatatttgttaaagattatttattttaattatatagttttatgagttttgataaatttatatagttatgtaattataattataattatgatatagaatatttttattatttttaaatatttttttatgtttttttgcgattaattttttttttaatttttggtttttgatttgttgtttattaattagtgtagttttggtttttttagatttttatatggaattatgtgatatagaattatttaggaagtagttttttgtgttttattgttgtttttgaaaaatatttttaagtaagtaaaatgatttgttataggttggtagaaaaatatttgtaaaatacgtatttgaaaatttttgtatttagaatatatgagtttttataattaataaaagataaataataaaattttaaaaaataggtaaaatatttaaatagatagtttatcgaagaagataaataaatggtaaatatatataaaaagatgtttaatatttttggttattagggaaatataaattaaaattgtaatgagatatttatgttgatataaagatttgtttataaatgtttataatagttttatttataatagttttaaattggaaataatttaagtgtttattaattgatgagtagagaagtaaattgtgggatagttatatgatgaaatattatttaataataaaagggaattaattaatgatatatattatagtatagatgaattataaaagtattatgttgagtgaaagaagtagatataagagatatatagaagaaattgggaaggtttaaaaaaaatttttaaaagtagtgattatttgagtattataagtaaagtttttttttgttttgttttgtttttgagacggtatttcgttttgttttttaggttggagtgtagtggtatgattttagtttattgtaagtttcgtttttcgggtttacgttatttttttgttttagtttttcgagtagttgggattataggcgttcgttattaagttcggttaattttttgtatttgtagtagagacggggttttattacgttagttaggatgttttcgattttttgatttcgtgattcgttcgtttcggttttttaaagtgttgggattataggcgtgagttatcgcgttcggtataagtaaagaattataagttatggtatataatgattttttttttaaagagtttatataagtaagatataaaataagtaaaatataaataggtttgttttgaaagagtttgtatgggtattaattaatgtaatggtaattatttagagattttttttagaagtgaaatttttatagtttttttttaaatttagttttgtttgtgtgtttatggaaagtttgagtgtattaatagttgattttataatcgaaatgtagaatatttttattatttttagtggtttttgtagttttagtatagagtgagtggggatattagtgttttatgtttttaaattatatatttagttggaagggtgtatagcgtagtgtggaaagtgggaatggattttatagtcgtttataggttttatagggatgataaaaagtaaaaagtataaattttttgtatattttggatattaatttatttttatatatatatgatttgtaaatatttttttttattttgggagttgtttttttattttgttgatgtattttttgatgtataaacgtttttaattttgatgtattttaatttatattttttggttgtttgtgtgtttttttttttttgtttatgtttttggtattatatttaagaaattattgttaaatttaaaatttaaggttatgaatttttgttttatttttttgagttttatgttatagttttagattttttgaattattgtgagttaattttatagttttagtttttagatttagatttttgaatttttttgagttaatttttgtatatggtatgaggtaagtttttaattttttttgtatgtggatatttagtttttttagcgttgggtaaaggtggaatttttttgtaagggaggtgaggaaggaggggaatagagaaaggtgtagataatgattagtttatttttgttgaaatttagttattttttaagtaaagattgtttaagtggatgtttttaaagttgtttgttattgttttaaaggttaaatagataatgattaagttgcgtattatttaaggtagattttgattttttataagttgaagagtattgaagatttaagattatttatatttttttggaagaaaaaataatatagttttttagggtaaagaagaaaaaatttaatagttataggatattttatggtttaaagtatatttgtttggtttgttgttttttaaaattttatgtttagttggttggagtggttttatttttatttgttaatttgggaggttgatgatgaatatgtttttattttttttttggagtttgtttattttattaatatttgttgaagtaaatggcgaagttggagaatttgagttgtagagataaaaaagaagtattaatttttaatagtaagtaaatatatgggttatttttgtttagggattaggttaattttttattagtttttttaaatagttagataaataaaggtgtaattttttttgaggaaaattatgttgagaagtaaatagggaaaaatatttagattgaggtatgaaattatttttttatgtataaattattatttgttattttgtaaataatttgtttgtaattgttaggaggtatttttgagaaatgtgtagagaaaaaagtggtagatgagtaggggtagttgggttgagatgattaaaaagtgaagatgtatttggtttgtagttatttagtaagaaattttgttattttggtttaaaaattgtatttgttaattattgatgtattttttcgtttgaattatatagg

SEQ ID NO: 1994 - DNA, 5542 bp, Artificial Sequence
  chemically treated genomic DNA (Homo sapiens)
tttatataatttaaacgagagaatgtattagtaattagtaagtataatttttaaattaaaataataaagttttttattgaataattataggttaaatatatttttattttttgattattttaatttaattgtttttgtttatttgttatttttttttttgtatattttttagagatattttttggtaattgtaaatagattatttgtaaaatgatagataataatttgtgtataggaaagtaattttatattttagtttaaatgtttttttttgtttgttttttaatataattttttttaagaaaaattgtatttttgtttatttggttatttgggaaaattggtgaggaattagtttagtttttgagtaggaatgatttatgtgtttatttattgttggagattgatgttttttttttgtttttgtagtttaagttttttagtttcgttatttattttagtaaatattaataaggtaagtaaattttaaagaaaaggtaaagatatgtttattattaattttttaggttggtaggtaagagtgaggttattttaattaattgagtatgggattttggagaatagtaaattaggtaggtgtattttgaattatggaatattttgtaattgttgagtttttttttttttgttttagaaggttatgttatttttttttttagagggatgtaaatgattttagatttttagtattttttaatttgtgagaggttaaaatttattttaagtgatgcgtaatttaattattatttatttgatttttgaaatagtaataagtagttttgaaaatatttatttaaataatttttgtttaagaagtaattaggttttaataaaagtaaattggttattatttatatttttttttgtttttttttttttttattttttttgtagaggagttttatttttatttagcgttaggaaaattagatatttatatgtaaaagaagttggaggtttattttatattatatgtaaaaattaatttaaaaaagtttaaagatttaaatttaagagttaaaattataaaattaatttataatggtttaaaaaatttgaaattataatataaaatttagaagaataggataaaaatttatgattttggattttggatttggtaatgattttttgagtatgatattaaaagtatgggtaaaaaaagaaaaatatatagataattaaaagatataaattggaatatattaaaattaaaaacgtttgtgtattaaaaaatatattaatagagtgaaaaagtaatttttagaatggaagaaaatatttgtaaattatatatatatgaaaatgggttaatatttagaatgtataaagaatttgtattttttattttttattatttttgtgggatttatggacggttgtggaatttatttttattttttatattgcgttatatatttttttagttggatatatggtttgaggatatggagtattgatgtttttatttattttgtgttgggattatagaaattattgagagtgatgaaaatattttatatttcgattgtaaaattaattattgatgtatttagattttttatgagtatatagataaaattgaatttgagggagagttgtaaaaattttatttttaagaaaaatttttaggtaattattattgtattggttaatatttatgtaggtttttttaggataagtttgtttgtgttttatttattttgtgttttatttatgtaggttttttgaggagaggattattatgtattatagtttataattttttatttatgtcgggcgcggtggtttacgtttgtaattttagtattttgggaggtcgaggcgggcggattacgaggttaggagatcgagaatattttggttaacgtggtgaaatttcgtttttattataaatataaaaaattagtcgggtttagtggcgggcgtttgtagttttagttattcgggaggttgaggtaggagaatggcgtgaattcgggaggcggagtttgtagtgagttgagattatgttattgtattttagtttgggggatagagcgagatgtcgttttaaaaataaaataaaataaaaaaaaattttatttgtgatatttaaatagttattgtttttaaaaattttttttaaatttttttaattttttttatatgttttttgtatttgttttttttatttaatataatgtttttgtaatttatttgtgttgtagtgtatattattaattggtttttttttattattgagtagtattttattatatggttattttatagtttgtttttttatttattagttgataaatatttgagttatttttagtttgggattattataaataaagttgttatgaatatttgtgaataggtttttgtgttaatataggtattttattataattttaatttatatttttttaatgattaaagatgttgggtatttttttatgtatatttgttatttgtttatttttttcggtgaattgtttgtttagatattttgtttattttttaaaattttgttgtttgttttttattgattgtaagagtttatatattttagatataagaatttttaaatacgtattttgtaaatatttttttgttaatttgtggtaagttattttgtttgtttaaaaatattttttaaggataataataagatataaaagattattttttaagtgattttatattatatgattttatatgaaaatttaaaaaagttaaaattatattgattgatagataataaattagaggttaggggttggggaggagattgatcgtaaggaggtatgagggaatatttaagggtgatgaaaatgttttgtattatgattgtgattgtggttgtatgattgtataaatttgttaaaatttataaagttgtatagttaaaatagataatttttggtagatgtaaattatagtataataaaattgattaaaattattttttttttatatttgtaaatgtttttatatattaggatgatataaaatattaatttggtattaaattaaatgttaagaaaagatatttaatagtttttatattaatagagatgaaatttattataataaatttgtttatttgaaagtttaataatttggtatggggtggagggaaagtttgataatatgaaatttttggtaagtttagaataggataaaatagtttgggttagaattttttaattaaaaggataatttaaattttttgagttttggacgtaattatttttatgattatatttttttaaagattattgaatttagttaatttttttagtgtaatagaaaaggtttttagtatgattttaataaggattttttttttgataggatttttttgttttgttaattaatgtgtttattatttaataaagtaaagataattttttagtttttaatttaagtatttaattgtttattgttatttatgttagaaaaaaaaaagaaagtaatcgtcgtttaaggtttgattgatttttagtgatgagttagggaattttatatttagtttatttatttaattttagtttagattaataggtaagttagattgtttgtatatgttgattttgtgaaaagtaatataaaaattaattgttgtttttaagggattggtatttattttgtttatttattttatttagaaatattttaggaaagatgaattaaagtagttttagaatttatgatttttagatttatatggtagataatttttttttttttttttttttaaggtaaatattttatagatttgaaattttattttttattgattagtaaaatttttgttttttttttaatttagaatgtatttttttaatattttgtatgtgttttttatatattagttatttataagatgataggaatacgaaatgtagtaaattgtagatttttttttttgaagtttttagtttagggaagattatatggttgaaggttaagaatacgggtttgaagtttatttatgtgcgtttaaagtttgattttattatttattgattatggaattttgtttttttattagtagatagataataatagtattgaagttatgtaaaatgtttagtatattaggttattggtataaaataagtgtttattaaatataagttgttattaatattatgtaaagaaatataataatttttatttttttgtatttttttttgggtttagattttttaaaagaaaaaatgataaaaagaatttatagttgtttttataattttgggtataaggagaagtaagggtgtttgattattttttttataaaagaggattttagagtagagagatgaattggggattttgagtgaggaagacgattgttgatttggagttaaaggtgtgaggtaaaggtaattgatgtttaagaataaggtaaggtgattttaggaagtatagaataattttatattggtgggtggagagtaagattttatttaaatttaagagttttgaagagtaggtaatttaaaagaaacggtattatttttgagtggaattgagtaattagggtgaggaagtttttatatggggtgttagtaatggagttttcggatagggaggatttgttttgggggttgtttagtgtttggaggagggtatttagttggagagtttatttaaggaatttttatgtatatttgtacgtatttattaaaataaaatttttagggttcggcgcggtggtttaaatttgtaattttagtattttgggaggtcgaggcgggtggattacgaggttaggagatggagattattttggttaatacggtgaaatttcgtttgtattaaaaatataaaaaattagttgggcgtggtggtgggcgtttgtagtattagttatttaggaggttgaggtaggagaatggtttgaattcgggaagcggagtttgtagtgagttgagattatgttattgttttttagtttgggtgatagagtgagattttgttttaaaaaataaaaataaaataaaataataaaaaataaataaaatttttaggttagaatattgataatattaatggtatgttgtagattttaagtttataatggtgtttgttgtattgttgatttttatttattagtttttattttttttgatttttttagtaagatatatgtaaatgtattttgtattgttgttgatattatatatggtatatggaatgagggtggtatttaaatgtttagtgtattgtttatttataatttatgatttgttgatttttgtttcggttttgtcgtatggttttattttttttttttttttttattttggttttatagttttttttattgaagttttagtttttttttttttttttttttttttttttaaaattatttgaaggtggttgtaagaattagaatgaattattttttttttttgttttttatgttttttaagatatttttgtgtaattttttttttttttgtgatatttattttttttttttttatattttgaatgtttagttttttgtttttttttt

SEQ ID NO: 1995 - DNA, 7657 bp, Artificial Sequence
  chemically treated genomic DNA (Homo sapiens)
tattaggagtataatagaaaacgagggttagggggcgtataaagagatcggacgataaaaacgtaatgattatagaacgtcgggattaggattattgggggggtacgcgtttgtattttattttttgggaggttaaggtaggaggatcgtttgggttttggaatttaagattagtcggagtaatatgggggaattttgtttttttaaaaaaaatataaaattagttagggtatggtgatatgtatttgtggttttatttatttgggaagttgaggtaggaagattagattatttgagtttgggggattgaggttgtagtgagttgaaattgtgttattgtattttagtttgggtgatagaacgagattttgttttaaaaaaaaaaaaaaaaaaaaaaaaagaatttggtttttggagtttattagagtattatacgtcgtatttagtaatgatttatgagtatttgttgttatatgataattttgttttaggtagtatagatatacggaggtgttttttgtttttatgtggtagtttggtggagagataattttagataaggaaatatataagtttagagataataagatgttataatgtatgttatgatgtgaaaaatttgggtattatgagagagaagacgagggaagattttgatggggttaggaggttaggagggtttttttgagggtgtgatatttaagttgagttttgaggttggaggaaggaagagttttgtaggcggagagaatagttgtgttaaggttttgaggggggaatcgaaagttaggtagtgtaagggtagattagtaggggaggaagaggggagtagagtgttatgatttgggaaatgtgagtaggtagaggttatattaagaagtttgttttttgattaataaaagttttggaaagattttaattagagtaggtttgttttttagaaagtgatttttgaggtttaggtatagttttgtgtggaagatagtgtgtgaggttgaaatttagagtgtgttattatttggaaataattttgtaaaggtgagaggtttgttatagttatataattttaattaatgtattttttttttcgtaaattttaagttggttgtgaaatatgacgatggagtattttgtatatgttataaaattattgttaatgtttatttatttttggataaagattagtattagttattggaaatatttgtttgggttacgaggtttgttttttgttaggagtggagatttttttatagattttttgtttttttttgttgtttttgggtgatttagtttatgatatttttgttttttttgaaatttttatattttgttttttttaaattttaaggtagtttttgcgtaatatattattttttattgatttttgttttattagggtttatagtggatggttgtatgggggttatgtgattgaatttttgattttcgttttagtttatttatgtgatatgtatggagttttttagtagggatttattgattaggataagagtttgagattttgaggggatttgattgttattgtataattaaggatagtatttttaagagtggatgttgtttaagatagtttaaggaattttatgaagaaaaggattttatagataataaattttggatattttgttttaatatagttaagcggttttttataattataggattttttagaatatttaatatgttaatgtgtattttaaatttttaagaaagaatgatgtatatttatttttttttttaggtgtattttagagattggtgtttgtaagtatatggagtaggaaattttatttcgaagatggagatttcggggttgttagtaggcgttaggtaagtgttttaaaatttttaatttttagtaagagaagttaattgaaggatgagatagggtttttgttttttttgggttttttagtattatatggaggggttggagtgaattttttggaggtggggttaatgatttttggaggtaggggaaagttttttttgattaagttgtatataaagatagaaaacgtgtttgtatgggtattgtttaatttgtttaaaagaatgaaaagattttagtatttttttttttttttgtaattattaaagaagtatatgtttttgtaaaaaaaaaaaaaaattaaataatatataagtatatagagtaaaaagtggaagttttttttttattttttttttgtatttttttttgtattttggagtgttttatattaaggttttggtatgtttggtttagtgggtgagaagattaatttggagttagtattttgagattgaattttagttttgttatatgttagttttgtttttttgggtataagttttattttgtttatttttaaaataaagtagtcgtaggaagggtttggtaggtatgggatgagatgaaatatagaaagttttaatgtagtatttgaatttagttggatttagttaaatttggtcgttagaattttttttttagaatttaggtattttttaaaaggtttaattttatttaatggatgtgttaattcgagaatggggtttattttttaatttgtttatgtgatttttttttaagtttttaagggtagtttttatgtagaaattattatttagaggtttattttatttttttaagtttatagttaaattgttaaagttggaaattaaaaaaaagtagattatttgattttttttattttatatattagttcgtttttaatgttaggaattaagaatttttttaggattttgatggaatgattattattttagaaaatgttatgtttttataaatatatatgtttattatgtatttgtaaaaattaaaaataaaaattttgttaaaagaaaaaaaaaaagaaaatgttatgtttttaagtttagtttataaaagtttttattttttttataaatttagttagaatttttagataaaataaaagttgtttaattgaatacgaattattttaaatttaaatttatttattgttttatatttttatttgttaaatttgttaattttaaatttaataaatttaaataattatttataaggggtttgtggttaatttataaatattttatattttatttaatatgttttatttttttttaaaagttttttaattgtttgaattaataaaaaagttatttttaaaaaatattaaattatttgaattttaataaagtaaataaataaaatattgatgataatttaaagtgtttataaatgttttagaattgtatttagataaaggttttaacgtaaagttatgaatttgaattaaattttattaagtgtatattttataagagagttataagattttttatatagttggtttagtagtttttattaagtttatgaaatatcgtatattttattttaaaatatataaaaagagtatattatggttttgagttttttaaatatttttatattttaattttaaattttttttttggttggaagatgtttatttattaagaaagataattaattattttttagagtttttttttttttgtttttgtattttattgagatggaattttattttgttgtttaggttggagtgtagtggtgtaattttggtttattgtagtttttgttttttaagtttaagttatttttttgttttagttttttaagtagttgggattataggcgtttattattacgtttggttaatttttgtatttttagtagagatagggttttattatgttggttaggttggttttgaatttttgattttaagtgatttatttattttagttttttaaagtgttggggttataggagtgagttattgcgttcggtttagagttatttttattagagatttaattaggtttgaggttttaggttgtagataatagggagatttattgtagtacgaatttaggaaattatttttttttatgtattatttggggttattttatagaatttttggtatgtttgggttagtatgttgtttggatgtatgttggggatatatgtataattttttttgtggttgtggttatagatttattattataagaggggttggtttatagatttcgatgttggtttggagttatttttattttttattttttttatagaattgtttttgttaaagtttattaatatattttgattggattttgtttttttttttaatttttttttgttttatagatttttatagttttttgtttatatttttaaaagttattttgtttgagttgatattttatagtttttataagattttttttttttagggttatataattttcgttaatattaaattaatattagttttaattacgggtttttttatgggttttacgggttatttgttcgtagagtttagggatattttttttatttattttattagatttttaattgttttttttggtaatatatttttagtatttgtacggtaaagttgtttaaaaaaattaagtaatttaaattatttttgattttattttatattattagggtaattagagttatagtttgggtgtgtttgaggatagtaggtcgttaaattttagtgatttagagaaaatcgagtagaattttttatgttttttgttttattgttttttagtagaaggtttcgttattttaggtgttttttagggtggattattttcgagtttatttattgttaggaaaaggtatatggtatgtaatcgtaagatcgatgattagatgttagagttggttttcggttgggatatgagtgattttgtggaggatggcgtttaaatgaggtatgttaatttttgtattagggtgacgaatataagggttttttaaaggttagtttaatgtatttgtatttttttggggattaaaatttatgatttttagttttttagagaattgaaagttgtaaggagaaatttagtaatttttgttatttgtaggttttataagttagtggagtttgcggaagtggttagaatttagtattttaagtattgttgtttttttatagagttttgaagttagagtagcgttaggatgttacgggagttggttttattgttgtttttttttttttttatttatagcgttttggttatgaggatttgtttttttaacgttaggttttttggggaaagtaagtaggaagataagaatgttatggatgttattgtgaaggtgagttttttttttgggaggaggattttagatattttttatatttttttttttgtttgtagattttaagagatttaaggaatttaaagttggtttttagggggaatgtagaagttggtttggaataataattattttaattttttgtattttttgtcgttattttaaaataggggtgataataatggttttttttagggttgttggggggattataggagttggtaaatggaaagtttttaatgtagtatttggtttattatacgttttagataagggttagttattatgatttttattgttatttattgaatgtttgtattaggtattataagtatatggttttattttataatttttatgaagagggattattattttttatgtagaggtgatgaataaagaaagatgaagtaattttatatagttatttttttttattagtaaagtttagttttttttttttttttttttttttttttttttttttttttttttttttttttttttttttttttttttttttttttttttttttttttttttttttttttttttttttttgtttttttttttttttttttttttttttttttttgttttttttttttttttttttttttattttttttttttttttttttttttttttatttttattatttttttttttttttgttttttttttttttttttttttttttttttttttttttttttttttatttttttattttttttattttcgtttacgttttttttgggtgatatatttaatgttcggggatattgtttgttttttttggagttaattgattttttttattttataggttaattaatttttgatgttggtaatttaatttttttttaggattttggaaaggtatttattattttaggaaatttgagatattatggtgtggtaggggggttaggagttttgggtttagattttatttattagatttgtgagtttgggaggttttgtttttttttgaattattagtttttttagtaaaatggcgattatatttaaatattatttgtagtattggttggtgaagagaatttagggtgtttgaggtatttagtagagtttgtagtaaggtgggtatttatgagttagagtcgttgttgttgttgttattgggaaggaggattggagtgaggattggtaggttttgtttttttttggacgagttttttagatttaggtggttttgttttttgggaggtaattaaggttttttagatggtgttgtttagttaggatagtaatgttaagtttgtgggagttatgataagattgtttaatgggaaattttgatatgtaaggtaatgattttttttattttatatatggttcgtggagtttgggtagttattgagtttttatttttttttttattgatgaaattcggttgtttttttgttttttggtgagtttattatgggggtttgaattttgtattttttttgagtagttgtgttttgtagagtatgttcgaagtttttgttaaggttgttttattttttttattttattaagaggttatttttaaaatattgtaagagttattttatagggtatttatagttattcgagaatgttaggtatttagaataggattatttttagcgtttattgattaagtattttttataggtgttaatttttgtatttttagtagaggcgggttttattatgttggttaggttggtttcgaatttttgattttaggtgatttgtttattttggttttttaaagtgttggtattataggcgtaagttatcgtgttcggttgggattgtattttaatagtttaatatggtgggttttgtagttacgtagatttaagtttaaattttgattttattatttattttggttgtatgattttaagttagttatttaattattttgagtttggtttttgtttatgtttaatgggttaataagtatagttattttatagggttgttgtaaggttcggagtaggtttgtagtaaatgttagtttttataattattattattataattatatttttttatttttaatttagtttgttatttttgtttattaagggtttaataaatatttattattattattgtaattatttaagtaaagttaagaggtaggatattgtggggaggttatgagtaaggggttttgggtttgaattatataggtttaaattttgttttcgttattttttagtagggtgattgggagtgtaatttatttaattttttttgagttttacgtttttttttaaaatgtatataataaaagtatttatttattttagggagttttttatttagtttagagaagaaattattttaataagtatttagtgtaatatttaaaaatagtaagtgtttaataaaaggttttatttatttgtggtaaatgattttaaatttttgggaatttttttttttgtagg

SEQ ID NO: 1996 - DNA, 7657 bp, Artificial Sequence
  chemically treated genomic DNA (Homo sapiens)
tttgtaagaaagagaatttttaggggtttgaggttatttattatagataaataaaattttttattggatatttattgtttttaagtattgtattgagtgtttattaaaataattttttttttgaattaaatgaaggattttttgaggtaggtaggtgtttttgttatgtatattttaaagaggagcgtgagatttagagaaagttgagtaaattatatttttaattattttattagaaaatggcggaggtagaatttgaatttatgtaatttaagtttagagttttttgtttatgatttttttataatattttgttttttggttttgtttgaataattataataataataataaatatttattaagtttttagtaagtaaagataatagattggattagaaataaagaggtataattataatgataataattataaaagttgatatttattgtaaatttatttcgagttttataataattttgtggggtaattatgtttattagtttattaaatataggtagaaattaagtttagagtggttgagtgattagtttaaagttatatagttaggataggtggtagagttaggatttgaatttaggtttgcgtgattataaagtttattatgttgaattgttaaaatatagttttagtcgggtacggtggtttacgtttgtaatattagtattttgggaggttaagatgggtagattatttgaggttaggagttcgagattagtttggttaatatggtgaaattcgtttttattaaaaatataaaaattagtatttataggaggtgtttggttaatgggcgttagggataattttattttgaatgtttggtattttcgggtgattgtgagtgttttgtagggtagtttttgtagtgttttggggatggttttttggtaggatggggagggtgaggtagttttgataaggatttcggatatgttttgtaggatatagttgtttaggggagatgtagagtttaagtttttatgatggatttattaaggaataaaaagatagtcgggttttattagtgaggaaggagatgggaatttagtggttatttaggttttacgggttatgtgtgaagtggggaaaattattgttttgtatgttagggttttttattgaataattttgttatggtttttataggtttggtattgttattttggttaaataatattatttagaaggttttggttattttttaaagggtagggttatttgggtttgagaggttcgtttaaggaagaatagagtttgttagtttttattttaatttttttttttagtgatagtaatagtagcggttttggtttatgaatatttattttgttgtaggttttgttgggtgttttaggtattttgagttttttttattagttagtgttataggtggtatttggatgtggtcgttattttattaggggagttggtggtttagggaggggtagggttttttaagtttataagtttggtaggtggaatttggatttagggtttttggtttttttattatattatggtgttttaggttttttaaggtaataagtatttttttagagttttgggaaagggttaagttgttagtattaaaaattaattaatttgtaggataaagggagttaattgattttagagaaagtaagtagtgttttcggatattgggtatattatttaaggaaagcgtaagcgaaagtggaaggagtggggaagtagaggagagggagagaggaaggaaggaggagaagaagaaagaaagataaagagagggagggatgatgaggatgggagagagaaggaaggaaggaaaaaagtaaggaagggaaaggaagaaagaaataaagaaaaagagaaaggaagaagaaagaaaagatagaaagaagaaagaaaaaggaagaaagaaaaaggaagaaagaaaaagaaagaaagaaagagagaaagaaagaaaagaaagaaagaagaaaaggaaagagagagaaaggagttgggttttgttggtgaaaaggagtagttgtataaggttattttatttttttttgtttattatttttatatggggagtaatagtttttttttataaagattatgaagtgaaattatgtgtttatagtgtttgatataggtatttaataaatagtaataaaaattataatggttaatttttatttggaacgtataatgagttagatattatattaagagttttttatttgttaatttttgtagtttttttagtaattttggagggaattattgttattatttttgttttaagatgacggtaggaggtatagagagttgaagtggttattgttttaagttagtttttatattttttttaagggttaattttaagttttttgagttttttaaagtttgtagataggagagagggtgtgaggggtgtttgggattttttttttaggaaaggggtttatttttataatgatatttatggtatttttgtttttttgtttgttttttttaaaggatttgacgttgaaggagtagatttttatggttagggcgttgtggatggagaggaggagaagtagtagtggggttagttttcgtgatattttggcgttgttttggttttaagattttgtgagaagatagtagtgtttggagtgttggattttggttattttcgtaggttttattgatttataaagtttgtagataataggaattattggatttttttttgtaatttttagttttttgaggaattgaagattatgggttttaatttttaaggaaatatagatatattgggttagtttttaaggagtttttatgttcgttattttggtgtagaaattggtatgttttatttaggcgttattttttataaagttatttatattttaatcgggagttagttttgatatttagttatcggttttgcggttgtatgttatgtgtttttttttgatagtggatgaattcggaagtggtttattttagagggtatttggggtgacggaattttttgttgggggataatgaggtaggaggtatgggaaattttgttcggttttttttaaattattgggatttggcggtttgttgtttttagatatatttagattgtgattttaattgttttggtggtgtaaagtaaggttaagagtagtttgaattatttaatttttttaggtagttttatcgtataaatattaggagtgtgttgttagagaaagtaattggggatttgatggaatggatgaggaaaatgtttttggattttgcgagtaaatagttcgtgaaatttatggagagattcgtgattgaagttgatattaatttaatattggcgagagttgtgtgattttgggagagaaaggttttgtaagaattgtaggatattaatttaagtaaaatgatttttagagatatgggtaggaaattatgaagatttgtaaagtaaaaaaaaattaaaaaaaaaagtaaaatttaattaaggtatattaatggattttggtaaagataattttgtgaaaagggtagggaataagaataattttaagttagtatcgggatttgtggattaattttttttgtggtgatgggtttgtggttatagttatagggaaaattatatatatatttttaatatatatttaggtagtatattggtttaagtatgttaggaattttataagataattttaaatagtatatggaaggaaatggttttttgagttcgtgttgtaatgaatttttttgttgtttgtaatttaagattttaggtttggttgaatttttggtaaaggtggttttgggtcgggcgtagtggtttatttttgtagttttagtattttgggaggttgaggtgggtggattatttgaggttaggagtttaaggttagtttggttaatatggtgaaattttgtttttattaaaaatataaaaattagttaggcgtggtggtgggcgtttataattttagttatttgggaggttgaggtaggagaatggtttgaatttgggaggtagaggttgtagtgagttaagattgtattattgtattttagtttgggtaatagagtgagattttattttaataaaatataaaaataaaaaaaaaggagttttagggaatggttaattgttttttttggtgaatgggtattttttaattagaaaaaagatttagaattaaagtgtagaaatgtttaagagatttagagttatggtatattttttttgtgtgttttaagatggaatatgcggtattttatggatttaatgagagttgttgggttaattatatagaaaattttgtaatttttttataaaatgtgtatttggtagggtttgatttaggtttatgattttacgttgaaatttttgtttgaatatagttttggaatatttataaatattttaggttattattaatgttttgtttgtttattttattagaatttaaatgatttagtattttttaaaagtagtttttttgttagtttagataattgaagaatttttaaaagaaaatagggtatattaaataaagtataaaatgtttataaattggttataaattttttataagtaattatttaggtttgttgggtttaggattggtagatttaataaataaaaatatagaatagtaggtagatttgaatttggggtagttcgtatttaattgggtaatttttattttatttggaaattttagttggatttataaaaagaatgagaatttttgtaagttgaatttaaaagtatggtatttttttttttttttttttttaataaagtttttatttttaatttttgtaggtatatagtaggtatatatatttatggaggtatggtattttttaagatagtaattattttattaaagttttagaaaagtttttagtttttagtattaaaaacgagttaatgtgtagaataaagaaagttaagtaatttgtttttttttaatttttagttttgataatttgattatgaatttgaaaaaataaagtaaatttttaaatagtggtttttgtatagaaattgtttttgaggatttaaaaaagagttatatgaatagattaagagatggattttattttcgaattagtatatttattgaatgaaattggattttttaaaaaatgtttggattttggaaggaaaattttaacggttaaatttaattgaatttaattaggtttaggtgttgtattagggttttttgtgttttattttattttatatttgttaagttttttttacggttattttattttagagatgagtaaagtgaggtttgtgtttaaggaaatagagttagtatgtggtaaagttgagatttaattttagagtgttgattttagattaatttttttatttattgaattaggtatattaaaattttaatatggaatattttagggtgtagggagggatgtagggaggagatgaaaggaggatttttattttttattttatatatttgtatattgtttgatttttttttttttttgtaaaaatatgtatttttttagtaattatagaaaaagaaaaaagtgttaaaatttttttatttttttaagtaggttaaataatgtttatgtaaatacgttttttgtttttgtgtgtaatttggttaaaggaagtttttttttatttttaagagttattgattttatttttagaaggtttattttaatttttttatgtaatattggaggatttagggaaggtagaaattttgttttattttttagttggttttttttgttgggaattgggaattttgaggtatttgtttaacgtttgttgatagtttcggggtttttattttcgggatgaagttttttgttttatatatttgtaaatattagtttttaagatgtatttggaagaaaagataaatatgtattatttttttttggagatttagaatgtatattagtatattaaatgttttgaaaagttttgtaattataaaaagtcgtttaattgtgttgaaatagggtgtttaaaatttattgtttgtggagtttttttttttatagaattttttggattattttgagtaatatttatttttgggaatattgtttttgattgtgtagtgataattagatttttttaaagttttaagtttttgttttggttagtaagtttttgttgaagagttttatgtatgttatatgagtgggttgaaacgaggattaggagtttagttatatggtttttatatagttatttattatgggttttgatgggataagagttagtggagagtgatatgttgcgtaaaggttattttggaatttgagaaaagtaagatatggagattttaggaggagtaaaagtgttataggttgagttatttaaaagtagtaagaagaaataagaagtttgtgggaaagtttttatttttggtagaagataagtttcgtgatttaaataggtgtttttagtgattgatgttggtttttgtttaaaaatgaatgagtattaataataattttgtaatatatgtaaaatgttttatcgttatgttttataattagtttagagtttgcggggaggaaggtgtattagttaaagttgtgtaattatgataaattttttatttttgtagggttgtttttagatgatgatatattttgggttttagttttatatattattttttatatagggttgtgtttggattttaagagttattttttgaagggtaggtttgttttgattaaaatttttttagggtttttattggttaaagagtaaattttttaatgtagtttttatttgtttatattttttaggttataatattttattttttttttttttttttattggtttgtttttgtattgtttggttttcggttttttttttagggttttggtatagttgtttttttcgtttatagggttttttttttttttagttttagggtttagtttaaatgttatatttttagagaagtttttttggttttttgattttattagggttttttttcgtttttttttttatggtgtttaggttttttatattatggtatgtattgtaatattttattatttttgagtttgtgtgtttttttgtttaaagttgtttttttattaggttgttatataggggtagggggtattttcgtgtgtttgtgttgtttggaataggattgttatgtagtagtagatgtttataaattattgttgaatgcgacgtatgatattttaatggattttagagattaagttttttttttttttttttttttttttttgagatagggtttcgttttgttatttaggttggagtgtagtggtataattttagtttattgtagttttaattttttaggtttaagtaatttaatttttttattttagttttttaagtaggtgggattataggtgtatgttattatgttttggttaattttgtgttttttttggagagataggatttttttatgttgtttcggttggttttgaattttagggtttaggcgatttttttattttggttttttaaggggtgggatataggcgcgtgtttttttagtggttttagtttcggcgttttgtggttattgcgtttttgtcgttcggtttttttgtgcgttttttggttttcgttttttgttgtgtttttggtg

SEQ ID NO: 1997 - DNA, 6375 bp, Artificial Sequence
  chemically treated genomic DNA (Homo sapiens)
ataatattaaatgttttttggatataaaagaggttgaagatttaggaatgattaataggagattattgatgatagtttaaagatagtagttttagtaaaggaataggagtagaagtaatatttttaggattaagaagagttataaagtggatgtattgagggttggttattttttttgagaaagtggaataaaggaattaggtgattatatgttaatgaatttaaaggaataagaaagtaatattgtttatattttgattattattaatattttaaaatgtttatttaaagtatttgggagattgattagtatgttaagaaaaatattgtgtgaagtgaaaatagaaaaagaaattatatgtaagttgttagaatatgaaaatagtatatgttggtaggaatttaaagtgaggtaaaaatataatgtaatcgaagaaaataaattcggatttattttaatatgttaatgagattatatttggaataatgtatttaatgtgggatatttttaataaaaatgaatatttaggaaattggaaatagtttagagataagtaataagaatgattatgggtttgtaaagattgaattgttataagattaaaaggttttttatttgtttaacgtggttaatatgatttaaaagtgagtatgatatttgtttataaatatttgagggttgagtgtaagtatggaagaaggagtagagttgtttaatatgttattaaaatgatttaattggagagaatttttaagagaaaatttaaaagtaaatataatgaagttgttttttagaaaatgtgtatttttttttttttagaggttttgttaagaatgaggaaatttagtaggttttttgaagatttgatttttttatttttataaattagtagaaatttttttaagtttgatttgtttgtataaaattatttagaaagtgtgtttatttatagattttagaaaatcggtagtataggattttagatttttgggtaattatattttatttttatttatttttgtggtttgttattagtagagaggtagattaaaagattgtttaattttgtttatattaaggttggtttttaaaattttatatttttaaagtttaaatagtttggtttagaatttattaagaaataattgaattattgtatttttgaaaaattgtgtatatttttagttagagtttatagatatattaaaagttgtttaagagatttattttgggattatttttataagtatttagttttttgtatttttttttaataaatgtagtgttttatagtattttttagtttaaaatttgtttttattaaagtgagggtttggttttttttttaaggttgtttttaaatgaaattaaaataaaaattatgttttggattatgagtttttagagcgttttgtttaatttgatttatataaaatttaatgttaagatagtgttatgtacgtttgaaaaataaataaatagtaaatggtaattgtagaggtattttattttagaggagttggttaagggaattgttaataagtgaattttatatttttattgatttattttataaagttttatattttttatttttttattttttttaaaatatatttttttttagattgagttgaatatgtataaatattttgagagtttgatttatgttatgtagggtttattggtgtttttgaattattttaagaatttggtagtaggtttttgattttaattttttttatgtgtttttttaggttttttgcgttttttttattgttttatttttttttttttttttattgtttgtattgtattgtattattgggttaatagatgttagggaagggtaatgagtaatcggtataatattttaggaaagtgatttgttttttaattgtgtatttatgaattgtttgtattttattataaataagatagtaagtaaaataataaataatatatgaattttaaaaagacgttttaattttagagattttaagtatattttagataagaaaagtaataattaaataagtatagaatttaaaaagtaatattttaaagtaaattggatataatattttgtttcggttatgaaaaggggaggtttgaaaatattttttggtgagtttgagggatatatggaatgtaattttttaaattaatgttttttaaattgtatgtgagataattttaggtggtatatgagaaataatttttatttttataatataggtttttttgtaagattattttttatttatggcgggttttattagttttttatttatggtgattataaaaaatgttttttattagataaatttatttaataaaaatagattatttaaagatatatattaagttaataatataggcgatatggttataattataaaagtgatatttaatgtaaatgttggaaataaggttttatttaagtaaataatatatttttgtttttataattttaaaattttgttttttatgttaaatttattttaaatgtgtattgaaaattgacgttttatttgatatttagtggtgtttatgttaatatatgtatatttaagataattattagaaggtagtaatatgaagttaaataattaatatattattttggattttaaaaataatttttgtatatgtatttttatttagatgtataaaaaattatgtaggagtaaagtgattttgaaagtaaggttagtgtaattgaaaaatttgattttagaagggtataaagaaatatgttaagaaaatttattttatatttatgttaataatatgttaaagtatgaatttttattttatttaaattatatattttttatttttatttgtaggtgaaattagtatataatgttttatgttaaaatgaaatttaaaatgttgttgttttttgaggatagtattaaatttattattgtatttaatttttatatgatatttgttatagttatagaatatttttagatattatgatttataaaatatttaaattgtatatttggtttgtaatatattatatatttaaaagaattattatttttttgaatattattaatattaataatagtattatagtgattaagagtggatttaaataaaggttggtttgaaatttaggtttgttatttattagtaagtttttaaaaattttgagtttttagtttttttatatgtgaaatggagaaaataaatttgtaaaattaattaaatttgtttatttatatttttttttttagtgtatattaattggtatttttcgttaggttagaatgtgtttttaattatgttttaaattcgttttgtgttaattttattgttagaattttttttattttgagaattagaaaaggaaatattatgtttggtaatgtttatattttttaaaataaatttgtaggaaagaatatttagtaagtgatgagagtagtaacgattgtttttattattttaaatttataatattattttttttagagttttttaagtattgtagataattttttatttattaaaaaataaattgtaattataagtatttagggttgatattgtttttgaattagatagtgtttatattagttgtataagattaatttaaagtagaggatgaaattttttttttgaattttttttagaacgtaatttagtgaatatattaaaattaaattttttttgaatgggagtaatttttacggattaatttgtaattttttagattatatttaaggtaatgtagaggttgttgtattataggttttgtgattagagattattggatttgtttttggaaaagttatttatgattttttgggttttggtttttttattttttatatcggtttaataatgattatcgtagagttgttatggaagttaaatgaatttatgtattataagtgattaatataatgattgatatttagtgatttattaataaattaaaatatttattattaatatgatagagaaggtgtcgttaaaatagataataggtttttggaagaggtgattaaatggatgtaaaatttatggattgtttatttcgtttatttttgttgtgttttttggttgtggtatatatacgtgtgggtataaaatcgtaaattttatgtagtcgcgtagtgtatgcgtagaaggtttagatacgaaatgttattttagtaatgtgtttagagaagttttgacgtcgttttggaagtaagtcgttgttgtttgatttttgggcgtttgggacggatgtttatatttgtatttagtagtattggaaggggtttaggtttttcgtagtatagtttatttttagatcgtttagttttttataatatatatttttacggaaaagggtattttttttcgttagaaaaagcgttttagtttggtttgggttggtttttattttacgttgttgtaagtaggcgaagttttttttgtttttttttttggggtaagtggaaaggagttcggtagggggttcgtagtggtttgtataggggaattgggtagcgagagagttttaggtaatttcgggggttgttttatagaagtaggtggggatcgatagtggtttttcggtttagggaggagagcgcggtcgcgggtttttttttttagtttggaggttgtagtcgttcgagtcggttcgggtgggggcggggtgggggcggcgcggagggtacggagattacggcggcgttattcgggatatttagggtttcgaggttttgggcggtttttacgcgagatcgtaaattatgataataggtagttattcgaggttaaataaaaacggagtgggtttttcgcgcgtcgtcgtttttcgcgtttttggcggtttttttcgaggttttcggcggttttacgagttcgtagtagtcggtggcgacgtcgttttcgttttatttttttgcgtaagtgcgaggttgtcggtagcgcggcgtacgtttcggtcgttttcggttttcgcgtaaaatttttattttgtttacgtgaagttgtcgttgttttagagagggggaaagagttgcgggaaaagtcggggagtgacgattgcggcggttgggcgcgtttttttattttttttttttttttttttttttttgtcgtagttcggagttttggttttttttttttttttttttttttcggagtcggttttttttttcgtttcgtttttttttcgtttgtgtacgttatttgttgtggggtggtcgaaggggatgttttgtttttattagaggtatagcgcgaaggggaaatttcgatattggaaggaacgagaataaatatttaattacggacgtattgaatcgcggttgggatagatatttcgggaattcgaggcggatcgggcgacgaggtgagtgatttttttttttaattttcgttttagggttttcgggggagtttgagttgagagaatttttaaatttttcgggaaagtgcgcgaggtttcgtcggggacgtcgagcgttgggtattgaggacgcgtagttggacggtgcgtgggcgtttgcgttttcggggggcgtttggaggtcgggtgttttacgtttgagggttcgggtcgttcggatcgtagcggtgttttttgttttagaagacgtttttaagttttaagggtttttttcgagtttgtttgtttttttcggggtcggcgcggagtttgcgcgtaacggagtttatttagtagtttagcgcgcggtttttatttgtatttcgtttttatttggtagaggcgcgagtatcggggttttttttatattttttttatgacgtgtattattttttgatgattttttagatggtttaggcgcgaggatgttgatttagagtttttcggagggttataggcgtttgggttttttcggtgtcgggtgcgtgtgtattttaaaggttcgcgttttaatttttaggtattgatcgggttttttaattgcggcgattttattttaatagtttttatgtggcgtggattgaatgttttttgtagtttgttagggtcggtgaaattagaggcgttttgttagagtagtcgcgtttattggttcgagtagcgggtgttatggaaggtttataatttttttaaaggaagggatttggttgggtagagtaggtttttttttttttttaagtttgttgggtttggggaggtagtggaatttgaaatggttcggatttttagcgtggtgaagcgaggtttggaagtagacgtgtgtgtgtttgttttattttgcgtcgtatagtaattcgaattttcgtttggtagtatttgaaagagttttttttttttgtttgcgagattttgaatagttcggagcgattagggaatttgcggatcgagttcggtggtagagttg

SEQ ID NO: 1998 - DNA, 6375 bp, Artificial Sequence
  chemically treated genomic DNA (Homo sapiens)
tagttttgttatcggattcggttcgtaaattttttaatcgtttcgagttgtttagaatttcgtaaataaagggagaaaatttttttaagtgttattaaacgaaagttcgggttgttgtgcggcgtagaataaaataagtatatatacgtttatttttaaatttcgttttattacgttaaaaattcgagttattttaagttttattgtttttttagatttagtaggtttggaaggagagaaaaatttgttttatttagttaggtttttttttttggagaagttataagttttttatggtattcgttattcgagttaatgaacgcgattgttttgataaggcgtttttaattttatcgattttggtaaattgtaggagatatttagtttacgttatataaaaattattaaagtgggatcgtcgtagttgaaaagttcgattagtgtttggagattagaacgcgagtttttaaagtatatacgtattcggtatcgggaaagtttaggcgtttgtgatttttcgaaggattttgggttagtattttcgcgtttggattatttagggggttattagaaagtaatatacgttataagaaagatgtgggggagatttcgatgttcgcgtttttgttaggtggaggcggggtgtaggtagaagtcgcgcgttggattgttggatgaatttcgttacgcgtaggtttcgcgtcgatttcggaagggataggtaggttcggaagggatttttggggtttggggacgttttttagggtagagagtatcgttgcggttcgagcggttcgggtttttaggcgtggggtattcggtttttaagcgtttttcggggacgtaggcgtttacgtatcgtttagttgcgcgtttttagtatttagcgttcggcgttttcggcggagtttcgcgtattttttcggaaagtttgggggtttttttaatttaggttttttcgggagttttggggcgggggttggaagaaggggttatttatttcgtcgttcggttcgtttcgggttttcgaagtgtttgttttagtcgcggtttagtgcgttcgtaattaagtatttattttcgttttttttagtgtcgaagtttttttttcgcgttgtgtttttggtgaaaataggatatttttttcggttattttataataaatagcgtatataagcgggggagaagcggggcggagggagaagtcggtttcgagggggaggaggaaaggagaggagttaaaatttcggattgcgataggggggaaaggagaagaaaagaaaatgagagagcgcgtttagtcgtcgtagtcgttatttttcggtttttttcgtagttttttttttttttttaaggtagcgataattttacgtggataggatggaagttttgcgcggaagtcgggaacggtcggagcgtgcgtcgcgttgtcggtagtttcgtatttgcgtagggaggtggggcgggggcgacgtcgttatcggttattgcgggttcgtgaggtcgtcgggggtttcgggggaggtcgttagggacgcggggggcggcggcgcgcgggggatttatttcgtttttatttgatttcgggtgattgtttattgttatggtttgcgatttcgcgtggggatcgtttagggtttcggggttttggatgtttcgggtggcgtcgtcgtaattttcgtgtttttcgcgtcgtttttatttcgtttttattcgggtcgattcgagcggttgtagtttttaggttgaggggagggattcgcgatcgcgtttttttttttgggtcggagagttattgtcgatttttatttgtttttgtggggtagttttcggaattgtttggaattttttcgttatttagtttttttgtgtaggttattgcgggttttttgtcggatttttttttatttattttaagggaggagatagaagggatttcgtttatttgtaataacgtgaaataaaaattaatttagattagattggggcgttttttttgacgggaggaaatattttttttcgtggagatatatgttatgaaggattaagcggtttggggataggttgtgttgcgaagggtttgggttttttttagtgttgttgggtgtaggtataggtattcgttttagacgtttaaaggttaggtagtaacgatttatttttaaggcggcgttagagtttttttaggtatattgttgaaatgatatttcgtgtttaagttttttgcgtatgtattacgcgattatataggatttacgattttatatttatacgtgtgtatgttataattaggggatatagtaaaggtagacggaataaataatttataaattttgtatttatttaattattttttttaaaaatttattgtttattttagcggtattttttttgttatattgataataaatgttttaatttattgataaattattgagtgttaattattgtattggttatttatggtatatgagtttatttaatttttatgataattttacggtggttattattaagtcggtataaaagatgaggaaattaaagtttaaagaattatgagtgatttttttaaagataaatttagtggtttttaattataaagtttatgatataataatttttatattattttaggtgtggtttaagagattatagattaattcgtagaaattatttttatttaaagaaagtttagttttaatatatttattaagttacgttttgaaaaaggtttagaaaaaagattttattttttattttaggttggttttatgtaattgatatgagtattgtttaatttaaaagtagtattaattttgaatatttatggttataatttattttttaatgagtggggaattatttataatgtttaagaggttttagaaaaggtggtgttgtaaatttaaaatgataaaggtagtcgttgttgtttttattatttattgggtgtttttttttgtagatttattttggagggtgtaggtattgttaggtataatgtttttttttttggtttttaaggtagaaagggttttggtagtggggttggtataaagcggatttggagtatggttgagagtatattttggtttaacgaggaatgttagttaatatatattggagagaaaaatatgaatggatagatttaattaattttgtagatttattttttttattttatatgtgagaaaattaagggtttagaatttttagaagtttgttaataaatggtagatttgagttttaagttagtttttatttaagtttatttttagttattgtgatgttattattagtattaatggtatttagaaaaatagtaatttttttaaatatgtaatatattataagttaaatatgtaatttaaatgttttgtgaattatagtgtttaagaatgttttgtggttatagtaaatattatgtaaggattaagtataatgatgaatttaatattgtttttaaaaggtaataatattttgaattttattttggtataaaatattatgtgttagttttatttataaataaaggtgggagatgtatgatttgaataaaataaaaatttatattttagtatattgttaatataaatatagggtgggtttttttagtatgtttttttgtatttttttaaagttagattttttagttatattgattttgtttttaaggttattttgtttttgtatagttttttgtatatttagataagaatatatgtatagaaattatttttaaaatttaggataatatattagttatttgattttatattattattttttaatagttgttttaaatatatatatattaatatggatattattaggtgttagataaaacgttaatttttagtatatatttgaaataagtttaatataggaaatagaattttagggttataaaggtaaaaatgtattgtttgtttaaatgaggttttatttttagtatttatattgaatattatttttataattatagttatatcgtttatattattgatttaatatgtatttttaaataatttatttttattaaataagtttatttgataaaggatattttttatagttattataaatggaaaattaataaaattcgttatgaatagaagatgattttgtaaaggaatttatattgtagaaataaaagttattttttatgtattatttaaaattattttatatatagtttgagaaatattggtttaaagaattatattttatatgttttttaggtttattaagagatatttttaagttttttttttttataatcggaataaaatgttgtgtttaatttattttgaggtattattttttaaattttgtgtttatttaattattgttttttttgtttaaaatatatttgaagtttttgaagttgaggcgtttttttaaaatttatgtattatttattgttttatttattattttatttgtggtaaaatgtaaataatttataaatgtataattaaaaagtaaattatttttttgaaatattgtatcggttatttattatttttttttagtatttattagtttagtagtgtaatatagtatagataatgaagaagagagggaaagtagaatagtgggagaaacgtaaagggtttagaaagatatatgggggaaattgaagttagagatttgttgttagatttttgaagtgatttaaaaatattagtgggttttgtatgatatgagttaggtttttagaatatttgtatatgtttaatttagtttgaaaagggatgtgttttgggaggagtggggagataaaaaatataagattttatagggtaaattagtggaaatataagatttatttattagtaatttttttaattaatttttttggaatgggatgtttttgtagttattatttattatttgtttattttttaaacgtgtatggtattgttttggtattagattttgtataagttaaattaaataaagcgttttaggagtttataatttaaaatataatttttgttttaattttatttaaaagtaattttaagggaaaaattaggtttttattttagtaagaatagattttaggttaaaaaatgttataagatattatatttattgaaaaagaatgtagagaattggatgtttgtagaaataattttaaagtaaattttttgagtaatttttggtatatttatgaattttagttggaaatatatataattttttaaaaatataataatttagttgttttttagtaaattttaagttaaattatttgagttttggaagtatggagttttaaagattaattttaatgtgaataaggttgaatagttttttaatttatttttttgttgatgatagattataggaataaatgaagataaaatatgattgtttaagaatttagagttttatgttgtcggttttttaaaatttataaataaatatattttttgagtaattttgtgtagatagattaagtttaaaaaggtttttattagtttgtgaaagtgaagaaattaaatttttaggggatttgttaaatttttttatttttggtagggtttttgaaagaaaggaaatgtatattttttgggagatagttttattatatttatttttagatttttttttgaaaattttttttagttgaattattttagtagtatattaggtaattttatttttttttttatgtttatatttagtttttagatgtttataaatagatattatgtttatttttaagttatgttagttacgttaaataaatagaaggttttttaattttgtggtagtttagtttttataaatttataattatttttattgtttgtttttgaattatttttaattttttagatgtttatttttgttagaggtattttatattgaatgtattgttttaggtgtggttttattaatatattagaatgagttcgaatttatttttttcggttgtattatatttttgttttattttgaatttttattaatatatgttatttttatattttaataatttatatgtaatttttttttttatttttattttatataatattttttttggtatattaattaattttttaagtattttgaatgaatattttaaaatattaataatagttaaaatatgaataatattatttttttgtttttttgaatttattagtatatagttatttgatttttttattttatttttttaaaaaaagtgattagtttttagtgtatttattttgtgattttttttaattttagaaatattatttttgtttttatttttttattgagattgttgtttttaagttattattaatggttttttattagttatttttgaatttttagttttttttatgtttaggaagtatttggtattat

SEQ ID NO: 1999 - DNA, 17594 bp, Artificial Sequence
  chemically treated genomic DNA (Homo sapiens)
tatatgtatttatgtttatggtaaaaatgggatgattattatttttgtagttttttttttttttaataatatgagattatgttatataaatttttttatatttagtttatttttttttttagtaatgtattttgaaattttcgtatattaataaatatttttttatattataatttttaaataattgttttgatttttattataggaatgttttttataataatatggtttgtttggattaagatttaaatgagtattgtttattgtatttgattgtaattcgttaaaagtttttttgagtttagattagggttttttaatagtggtgttgttgatattttgaaattgttaatttttgttgtttgtgtacgtgtgtgggtgtgaggtgagttaggaggggagatggttttttgtgttataagatgtttagtaggattattggtttttatttatttagaggatagatgttagtagaatttttttttttttttttattgtattggaaaaaataaaaaatgtttttaaatattattaaatattgtttggagggtaagggtattttaatattttattgtttttatattttaaaaagttttatttatatattaaaaagttaggttaaaattttattttttagatggtatttatttatagtattattaaatttgttatattttttgtattttttataaattggaaattagttttaaaggtttaattagatttaggtttagtttattaaattatattagatatattaaattggatatattataatttgtaatatagtatattaaattatggattatattaaattatatataaaaatatatataaaatttggtgtatatattagtttaatatatatataaattataaatttgataattaagtaaagttgtttgatttaataaaaatataggatatttagttaaattttaattttaaataaatagtataatttttaggataagtatgttataaatattgtatggaatatataaaataaattatttattgttttttgaaatttaaatttagtgtagtattttgtattttatttgggaattttaattaggagatatatattgttttgttgttttattttaagtaaagttgattttaaaatattatattgtattttataaatataaataattattatttgtttattaaaaaataaaatttaatttaggtattgtggtttatgtttgtaattttagtattttgggaggttaaggtagttggattatttgagattaggagtgtaagattagtttggataaattaatatggtgaaatataatttttattaaaaatataaaaattagtaggacgtggtggcgcgtttttgtaattttagttatttaggaggttgaggtaggagaattgtttgaattcgggaggtagaggttgtagtgattcgagattatgttattgtattttagtttgagtgatagagtgagattttgttattaaaataaataaataaataaataaataaaatttaaatgtatgtataaaagttaattgattaatattttaggtggtaatagtttgtttttttatttaaatggattttattaatttttattatttaatttattgataaattttgtttaaattattttttttttgagataaagtttttttttgttgtttaggttggagtgtagtggcgtagtttcggtttattgtaagtttcgtttttcgggtttatgttatttttttgttttagtttttcgagtagttgggattataggcgttcgttattacgttcggttaattttttgtatttttagtagggatagggttttattatgttagttaggatggtttcgattttttgattttgtgattcgttcgttttggttttttaaagtgttgggattataggcgtaagttatcgtgttcggtttaaattatttaaaattaggagttgtaaaacggtgtttttttaattatgttattttttttatatttagttaatggaattattttatatagaaggttttttttattatttagtttggggtgtaagttaaaaatgagtaaaattggaatttaagttttaattttttaattttgatttagtgtatattttattatatttagtgaaagaaattattttgattataaatagttataatttagtaagtttatgttttataattagtagatatatgagatgttaggaatatattatagggggaggaggtagtatttgtaaattgaagtaaatttataagtgattttttaagtaaaaaagattaattttttagaaataaggagtaaacgatggtgtttaaaagagaaaagaatgatgtataattgaaaaatttagggtatttttttatttttttttatgttggttataaattttgaataacgtatgttagaataatttatgtttttaattatatagttatgtatgtgttatgtaaaattaaattgtttgtggtttttgagaggataagaattttggtttataaatatattgtaaaaggtagggtaaagaagatttttttttttttagttatgtgattaaggtggtataaagaattttagtttttttttatttattgattttattatattgtatttttagttaattaaatttatagttaaatattttgtggttagaattgtagaaagagtattagaagtttattttttttttatattttatatatttttaagaggattggtaggttatcggttataaaagaaaatattttgtgatattaattattatagaaattaattaaagaatatgttttggatgttggtttttttaagtatagatgtaaagataagattggtggtttttataaaggatgaataattggagataaggagttgtttagtattagtattttttagtgtttttttagaaatatgtatatataaatatgtatatgtagataaatatatttatatatgtttatatatatattgttatatatattattttatatattgtatattatatataaatatataatgtattatatatgtatataggtatatttatatatgtatgtatatttatatataaatataaaattatatattatatatgtgtgtagatagataaagatttgtttttgaggaaggaaaggatgatttattaggttgtaatattttgatataataattaatgaattaattgtttatttgtttttttaataaatatatattaaaaatttaagtatgttttttgttgtgttgagtattagataaagagtagtgaattaaattaatatagttattgattttaatgaggatgtgataaggagttagattaggaaagatgtaatttttatatattgtgatatatgttatgataaggtaagaatggagtaatatgggagtaataagtaattttttggtatgtattttaatatatgaattgtttatatttattagaaagtgaaagttatatagaaatgattggtttggtatatttattgttaaaaatgaatatatttatatattaagttattttgtaagtttgagtaatgttttagagattggttagttttagtgagtttattattgagatttagggtttgtatggtagagatatagattttggattatgggggttatattaagatttttttaattattaaatttatcggattatttttggttttttttttattttataattgaaatatttaatattattaattatttttttttttgaaatgtttttttgttttggttttgtgatattattattttttggtgtttttgttagagtttattggatgtggttatttagtgtgtagtgtgtatttgttagtttgtattgtagaagcgatggtgaatgttatttattttggtaatttagttaatttgggttattaatagagttttattgtatttttattattttagtatgtgattaatttaaatattttaattatttattaattttattttattattttaatttaattttttttgtgttattatttggtatattttgtttaataatttgtttattttttaattgattttttttttatgatgaattataataatttttgagggtatttgtttttttattttttttttggttttgtatttttaattaaagtagtagtagaaataataataggagttttataatttagtattgtattttttattaattaattgtttagatatataatttttataaaatattttgaggggttcgggttttttaatttttaaaatgaagaaatttaaattggttatgattatgatttttttttttttaatattttttttatattttaagatttatgataaaaatttattaggaaattagaaataatatgttttttttaagttatttttaataaatattttatggttatcgttagttttgttatttttttattattttgtttttaatttttttttttttttgatttttatttttaaatttattacgattttttgttgtttttttttttttgttagtttagagttagaggtatagaaggtaaggttattgtagattttgaattgttaatttggtaggtaagataggagagtgaaggatttattaattagttagtagtagttattgttttttagaagttattttaggattaaattgtttaagtaattgaattgttatttttttgaatttttgtaattttaattgttagaaaatatttagatgttgggtttgtagaggattttagtatatttgtagtataatttttttattttatatatataattgtgttgaaagaagttttaatttgtgaggtgtaaatatgaaattattatttttgaaattattattattgttgtggatttattttttttgggtagtagttttttttaatgattttttagattaattttataattttttaattattttatgttattaaaatagttttattggagttattaggtataattaaatttaattaattttgattttataaaattaattaatttaattttattttttgtttaaaattttttttagtttttagtattttttatttgtttattatcgagtatggggtaagtttatggttttagtggtttgttatgtgttgggaggtaaagggtgatggttatattatttatattttttttttttttagatattagttttttttttgagagtaggaagaagaaagtaattttttatgttgtagtagttgtcggttttttgttttgttttaattgttatttttgtgtgaatattattttataagtggaggttagattgtggtagtgtaatttttttgttagttgttattatttttttagtattatttattgtttttttttatttgtagtgatttaaatataggtgtttttatgggaatatttttgtaggttttttagaagaatttatgttttatgtatttgtatagtaaaaagaatgatttattaatttatggtttaattaattttatttttttttgtttttattgtaggtcgtttattttagagttttttgttattagagttttttttatttagagagtgttttttttgagggagagggataatatggtttaagtttttgttatttttttttatgtttatttaatttaggggtatttaagtaggtgttatataatggaggttaattttagtatttttttttttaggtttattatttttaatttgtttttttttgtaaattttagtagtgttagattttttattagtattttagtagtgttagattttttattagtattttgttttataaattttaagttaaaagatgattataaatttttaatttattggagggaataattaagttattttaaatgttgtggttaaagtgttggagtattttgttgaatgttttttttttttatgtttaagatttttattatttagatttttaagttttaaattttggttttgttatttattagttgtataatttaaatttttttattttattaaaaataaggatgttgatagtatttgttttataggatttttgtgagtattaaataggataaagtataatgtttgaatatagttagtgtttaaaaaatattaatagttatttgtgtttatatttttattagaatatattttagtttttttattattttttttgtttatggaaattaagtttttaataaagttattgtggtttggatgaattttttttttttgtatttttgtattttacgtagtattttatatattgttatgtatatggtaattgtttaataaattaagaaatatattgtagtttttttgatataatgtatttttttgtaatgtaaattagtttatatgttataggtaagttaaggaataatgttaatataatattgaagttggttgaaataagatttttttttagtaagttaatattttgaattattaaggaatagttaatataaattttattagtatagtagaatatggtaaggaatagaatattttgtatagtaattatttattttaaggtttttttttggtttagttttattataagtgtattttgagtatgtttgttttttggtttttttttgtttttgtgtattttttttttgttatttttttttattaatttttgaaagtgattaagttttagatttattgttaattttatttattataaatttaatatatttttttaattgtatagtttatttggtagaaatattaatgtttatgttattgttttgatggtaggtttttatgatttgtaatagtttttttttttttttaaagatttgttagttttagttatttttgtagaatgtaaaataatttaaaaaaataaatgtatgttatatgttatggtagaaatatttgtgttatgtttaagaaagatttaaattgaatgagtgaaagttatttttttttttttgattatgtaagggtttaatttttttaattatttaatttatattttttttattttttttttgtttattgaattatttttgttagttaataaatataatttagtattttatataaaataagaatttttttttaattttatatttttttatattattattttatagtaaaattttttagaatattgttcgtatatgttgtttatgtttttttaatttttatttatttttttagtttattttagtttgttttttatatatattattttattgttattgttaaagttttaaaaatttttatattgttagatttagaggataattgtattttttattttattttattttttaataagatttaatgtaattaacgattttttttagaattgtattttttttttggttttagtgatataattttttgtgagtttttttattttattagttgttttttttagtttttgttttgggttttttgatatttatttttaagatattgaaattttttagagttttgttttgagattttttttgttgtttaatttttttttttttttttttagttgattttattttatttagtggttttaaagtatgttagtgattttttattttttttattttatatttttaatatagatatttttattggttttttaatattttttttgtaattgtttatttagtatagatttttagatataataaagatgttttaaattaaaatattttttaatcggaatatttggttgattttttttttaattttagtattttttttaaatatagtatttttttagtttttattatgtaattattgtttatttagttattatagttagaaatttaagaattatattttatattttttgtgttttttaatttgttagtaagttttattaatatatatattttaaatttattaatttttttttatttatattattatttttttagattatttattattatattttgatttttaagtattttttaatatttgtttaaaaaatttatagattatatgacgatatatttatttatatatagatagatcggtagacgttgagagaatgtgggtgtatatatatatattatatatatatatgtttatggtttgagtgtttattttttttaaatttcgtgatgaaatttaatttttagtatggtagtattgagaagtaggatttgtaagaggtaattggtttatatagattttgtttttatgaatggattaatttaattatgaattaatagattaattgaataatgggttattatgggagtgagattggtggttttaaaagaagtggaagagagattagagtttataggtttaagttttttttgttatgtgaatttcggtgttatttcgggaatttgtagagagtttttattaagaaagaatgtttttattagatagattttttgattttgaattttatagtttttagaattttaagaaataaatttattttttttataaattttagttttaggtatttagttataattatagaaaatagattaagatatatatgaagagttattaaattgtattaagtaggggaatatatatatatatatattgtgtgtgtgtgtgtgtgtgtgtgtgtgtgtatgtgtatttttttgttttatatagttcggtggtttttttttagtttttaaataaaattttaatatttttttatgtttttttaggtttttatgatttggtttttatgtgtatttttaatttcgttttatgttattggttttttattcgttatgttttagttttaatgttttttttttaattttttttttttaaattttattattattatattttaagttttagggtatatatgtttaatgtgtaggttagttatatatgtatatatgtgatatgttggtgtgtcgtatttattaattcgttatttagtattaggtatattttttaaagttattttttttttttttttttattttataatagtttttagagtgtgatgtttttttttttgtgtttatgtgtttttattgtttaatttttatttatgagtgagaatatgcggtgtttggttttttgtttttgtgatagtttattgagaatgatgatttttaattttatttatgtttttataaaggatatgaatttattattttttatggttgtatagtattttatggtgtatatgtgttatatttttttaatttagtttattattgttggatatttgtaatttatttatttgataaagggttaatatttagaatttataatgaatttaaataaatttataagaaaaaaaataaataattttattaaaaagtgggtaaaggatatgaatagatattttttaaaagaagatatttatgtagttaaaaaatacgtgaaaaaatgtttattattattggttattagagaaatgtaaattaaaattataatgagatattattttatattagttagaatggtaattattaaaaagttaggaaataataggtgttggagaggatgtggagaaataggaatatttttatattgttggtaggatggtaaattagtttaatttttgtggaagttagtgtggttattttttagggatttagaattagaaatattatttgatttagttattttattattgggtatatatttaaaggattataaattatgttgttataaagatatatgtatacgtatgtttattgcggtattatttataatagtaaagatttggaatttttttttaatttttataattttttaaagtttttttttttatggggatttttaattttttattgtttgaaaatttttgttttagtttttgttttgttttattttatttcgtattttaagtttttatttaaaagttattttttattaaatggttttttttaattttatttaaaatagattgtttttgtacgtttatggagtaatattatttattttttataaacgttagttataagttgttattgttttgtttatttatttattttttgttttttttaatagaaagttttttttttaagggaaaagattttgtttgtttattattttttttgtattattagtaaatgatagagtgtttggaatataaatatttgttgaataaagaaatgaaaatatatgatgaagaatgtttttatgttgaaattaaatttttgtgttagttttagtgatagaaagattaagtaataggtttgtatttatatttaagttatttttttatttgtttataataatttaagtttagagattgtttgtttggaaaagtatattataaaaaatattattaataaattttaagatatagtttgtttattttgaaaaattagaaaatataattagttaaaattttattagtaaattatgattaaatgttaattttaatgagatagtttttgataattttgaagttatttttttttttttaaagataaattggtattatgagattattgaaatatatggttgattagtataaatttaatttaggaattgagaatataaaaaattatttattttatattttttgttatagatttttaattaatttttgttttttgggttatgtagagaagattttttttatatatttttttgtaacgtgattgtgttattatttatgataaagagggttgttttgtgtttggtagtttattttagggtgggttttgtgttagtttttttttttgtttatttgtttttgaataatataaaatttttatttataggtgtagtatgatttaatttgtcggttattagatgtagttgtaaattgtaaataaaaaaatggaaatgtagatgttgaaataaagatgtaatttttggttatgaaatggttatttgaatgatttatatttatatttatttatttattattaatgaaaaacgtataaattttttaattaaaaaatttataaatttttaattataataaatattattttacgggaatggttattaaaatgttttaaattttatgttattgaatttatttttaatattcggtttaatagtttaattatagatatttaatatttatttgtttttttgaatttttatgataatttgtaagtgtttttcgttttggaagagataaaggaaaaagttgtgatgaatattattggaaattgcggattagggtttttattttatgtttttttggttttttttttttttttagaatttagtagtggtttttaattttattagattatatttgatagtatgtatttatttttgtgtttgtaaggtataaatttgtaattatattataaatagtgagaatattgttgtgaaattgtatattttatgtatttttaataattaataatagaaaataagtggtgtttaatgatgttagagaaaagaataaattatatttttagtttgtttataaaaatgatattataatatttttgtttgaggaagaggagattaaataatatgtaataataatattttgaaaaggaagaggatagtggaatatttgtttattttttgatgaattttataatgtttatgttatttgttagttggtatatttttaattttttgtgattaatttttttgttttaaatagtaattttaatatttaatattgtatttaaaaatttttattggattttttaaggaagtttttttaaattgtttaagttttagggttttaaattggatttatttttgttatttatatatatatatattttttaattagtaaaatttttagttttaatataaagaagaaataaagggaaataatattataataggaaaatatgttttttatgaatatgagtgttataaaaatagattgatatgagaataaggtattggtgatataaatattatgaatagtgtagttataggtgatttgattttttgaaatagtgaaaaatttaaggatgtttttttagtaaaagttaaggataatttttttttaatatatatggtagttttttttttgtaaaatatagtatgtatgagaaatgtaaaagatgtttttgtgttttttatagtcgtgtttaaggtttagataattataaaatatttggttgtatattgaaaagatgtgtagaattaggttaattatttagtatgtaaggttgtttttagtattgtagggtatttgtttgtttgttaatgttataaatgttttttgtatatttattattgaaataagtaatttttaatatatatatatatatttttatgtataaatttatattttttaaaggttttttgtaggtggtaatatagagtatgatgagaaagttttagaatgcgttttgttttttttattgtttttatttttatttatatttttttttacgtattagaaatatacgggttatagaattgtttagttagagttttgaaaaattaggtttttaaaagttgtttattaaaatgtaaatgttttggtttgggttaagattttttatttttgtttgttaacggttaaaaaggatttttttaagagattttttttttcgttttgaaattgtgtaattttgtaaggaagtataaaataaatttggtttatattatattcggtttgagggttgattttgtataatggggatttttttgtttcgtattatatttgaaaatgatttttaaattttttaacgttatttttgtagatatgcgtgtgttggaggtgtgggtgtggttatgtgtgtgatgatgtttgttttattgatatgattattgttgtgtgattttggttgtattttgtgagaataaggttttgttttttggatttattagtggttttttaggttttttatttttaggatagattaggaggatgggaaaggaggttttttttttgttgtttttaagtttaattaaaggttttttgtaaaataattatagtatttatgaaaattagtatatgttttgttttaattattttattatattaatttattttatgttgataattatttttaaggtaggtattattattatttttattttattggtgagaaggttgaggtaaaaagagtttgagtggttatagtcgagatttaaattttagagtttgtttttagtttgaatttttaattaattttgtatttaatttttttaaattatttatggttaaatttttatttttatttttttaatttttaaaaatttagtgtgatattttggtattttttttagttgggtatggtggtatatttttataattttagttttttgggaggatgaggtgggagggattatttgagtttggtagttcgagattagtttgggtagtatagtaaaatttagttttaaaaaaaattttttttaaagaaggaaaatttttttatattataattttttttaaggattttttttagtgggtttataatattgttttttttattatgaagaaaatgttagtttatttaatatttgtatttgttggaagatatgaaggtaagtttgaagttttttgggttttttggttgaaatatattatttataaggtagaggttatgattaatttgtttgagtttattttatggtttagattgtatttttaattataagatattataaagatgttttatcggtaaagtgtgagtggttgattatatattttgaagataggtagtttgatatttagatgtttatatttatgtattataaaagagtgtagattatgtttagtgatacgttttggatgtttttttttttttaaattttatgttgaaatgtggtttttaatgttggaggtggggtttagttggaagtgtttgggttatggaggtagattttttataaatggtttggtgttttttttatggtaatgagtttatatgagagttggttgtttaaaggaaattagaatttttttttttatttttttttttagtagttttgggagtttttatttattttttttggatttattatttttagatttatttaggttaagataagaagtaaaaaatattaaagttattgatttttttgtgaaaatttaataggtagttagtatttgttattgatgtttttttttgagtagaaatttttgtttagggtagtaaaagaaagtaaatgtagttgatatttttttggttttaatatagaggaaaaaggaaagaatttttttttttttttttttttttaggtatgtttatgaaatatatatagttaatatattaatagtattaatattgtgtggttgtgagttgagatgttatggtttgaattaagaaagggaatttatagaatagaaagttggtttagattagtgattttttatttgtgggttatggaatttttgaatttaaggaatttttgtatgaggattatgaatttatgtgtatttaattataaagtgtagatttaatgaataaagatatttttatttatttatttgttaattaattatttatttatttggttatgagtatgtgtttttaagatatattgttaggtttaaattttaatttttttatatagtaattgtgtgttttgggataagttatttaattttttatgttttgatttttttatttttaattatatagagttggtagtaggaggaaaatagataggatatgttgtatagttagttttgtatttgatttttagggagagattaatatttgttaggtatataaatattacgagtagataggtattttgtatttttatcgttttatatttaattttatatggattttattttgttttagagaattttgagagtgagaaggaagttagtagattgatttggtttttttgttttttagttttggagaaggatataaaggttaatatattgtataggttgagttttgattttttttttgttaggtacgtttcgaaatataaaagtttttgtttaaagttttttacgttggatttagttgtaggggtattttatagtttttaggttttgtagtttatgtatagttatttgttttatttttttattgttataaaatgaaatatagattaaggtttttaatattaaataataggtttaagtttgggtatagtgatattttttgtgtattgagtatttttgtatttagaattagaagtaagaattgaaatttagatacgttttattgattttagtgaacgtgtgtttttgatgtggataggttgggtatgagaaattagtagtagtttattttatttagataatggatatgaaatttgaaggatttttttttttatatataagataaaaaatttgtggtatttaattgtgtattagttcgtttttttagggaggaatagagtttttgtttaatgttagtgttaatgtgttttttttgtgtttttgttttgtttttttgggtatttgtagttatatgttatggaaattagggtatggtttttttttttcgatgttgttaatggtttgtttttttggggtgggggtgggttgggaagatgggtagtttggttgttttttaggttttaatgagttgtttttattggattgttatatttttgttgttattgttattaaagtattttttttattttaatatcgggtatttaagtaaaagttttagaatgataaatttaaagttttagaaagttttagaaatgaaagtggtttttttaattttaaagtttatatttttcgaattaggaatagtatttttcgatgagttttgttttattttttatttaagtaggagttatttagataacgattttagaggaagtttttaaatagattatttgagttatggtaaaatgattttttttgagggataatttgattgtaggtttattgttttaggaaaaaggaatttaaattttttttggtaaagttttaataaattggtaaagtagaattttttttcgttttttttagggtttagggttttaaatattgttttttgatagtattttaaaaattatattttttttattttttttttttttttttttttaattttatttaataattttttgtattttgtttttttttgattatgtttttttttttgtgattgtggagaggattgagattgcgtagatatattaaattagtataagatgttgtttattaaattaaatatattatgtaggttgataataattttaatttagttaaaatttatattttttttataagtttttaataaataatgataataaagaagataaaaaatgtatttattgattatattttatatgttagatgttgtgtaatgtattttattttttttttattttattaaattttataatataattatgatttggatattattattgtttttattatataggtaatttttaattatataaaaattaggaatatttgaatttagagtttaaaatataaataatttgtattttttaaaataatttgttgttatttttaaggtttgttattaaaatatagtatgttttgggtttagtatttaattttttttatttgaaatttaaatttttatttattaatttttttagttttatattttttaattttatagaaaattaaaggttttggttagatttttatgtggaatgattggttttatttaatagatttaatttagtagtttgtggggaagagtaaggtatgatagaatggttttttaagtgttttagatgtgaagtgggtttaaatatattgtttttgttttttttagagttttggtaaagataaaataggatatttatttaaaagtaatttttgtaaatgataagttattatagatattaatagagtttttatttttagtattattattaatattagattttggaagaaggttgagttttgatttagagtaaaaaaatagaagaattagtaaaggaattttggagaaagtttttgttgtgtatttaaaggagaaagggagattatgttgggaaattataatattaaaagtaaataaaagttaggaagtaaaataaaataaattatatggtttagatttttataagtaatggtttaatttttgtttttttgtgttttgagttagattagggtatagtagagaaagaggagtttttgaaaatgtttttaatttcgttggttagatagcggattattagtgaattagatgaaaatttgtggatttatgtattaattgattagtaggaaattaaataagaaaagcgttggtagttttggtgaattttaaaagaatttggtagttgttagttatgtttttgaatatgtataaatagtatattatatgattaagagtttgatttaggggttagattttatgtgtttgaattttaaattagttatttaatagttggtattttaaaataagttatttaattttattaagatttagtttttttgtttataaaatgtagatagtgatagtatgtattttataggattattgtgaaaaataaatgaaatattagatttatttaggataatatttggtatatgtttggtatttagtaattagttgttgttgttttattttgtttttttttgtattttatttttttaagttgtaaattaaatagttgtatatagattgatagattaagaaaggtttgtgattgtgttagatttatgttttttttttattagattttaggtgtatatgtggaggtgggatagggagtggagtaagtgggtaaatattaaattgtttagttgggtattattttgaatattatttttaaagaaagaagtaaaattaggtatagttgatgggttaattagatatgatatagaaaatatttttttttgttttttggttttaagt

SEQ ID NO: 2000 - DNA, 17594 bp, Artificial Sequence
  chemically treated genomic DNA (Homo sapiens)
gtttaaaattaaaaagtagaaggaaatgttttttgtgttatatttggttaatttattagttgtgtttggttttgtttttttttttagagataatatttaggatggtgtttaattgggtaatttaatatttatttatttattttattttttattttatttttatatatatatttggaatttggtgagagagaggtataggtttagtataattataagttttttttaatttgttaatttgtgtataattatttagtttataatttagaaaagtgggatgtaagggagggtagaataaaatagtagtaattaattattgaatattaaatatatgttaggtgttattttaaataaatttgatattttatttattttttataataattttataaagtatatattattattatttatattttataaataggaaaattgaattttagtgaggttaagtaatttgttttggggtgttaattattaaataattaatttggggtttaaatatataaaatttaatttttaagttaaatttttagttatatgatgtattgtttatatatatttaggagtatggttagtaattgttaaatttttttgggatttattagagttattaacgttttttttgtttaattttttgttgattagttagtgtataaatttataaatttttatttgatttattgatgattcgttgtttgattagcgaaattggaaatatttttagagatttttttttttttattgtgttttaatttggtttagaatataggaaggtagaagttaaattattatttatggggatttaggttatataatttattttattttattttttagtttttgtttatttttaatattataattttttaatatgattttttttttttttttaaatatatagtaggggttttttttaggatttttttattaatttttttgtttttttgttttaggttaaggtttaatttttttttaggatttgatattaatgataatattggaaatgaaaattttattaatgtttatagtggtttgttatttgtaaagattgtttttaaatgagtgttttattttatttttattaaaattttgaagaagatagggatagtatatttaaatttattttatatttgaagtatttgaggaattattttattatattttgtttttttttatagattgttgaattaagtttattgaatgaaattagttattttatatgaagatttaattaaaatttttagttttttatggaattagaaaatatagggttaaaaaggttaataaataggaatttaagttttagataagaaagattaggtattgagtttaggatatgttatgttttaatgatagattttaaaggtaatagtaagttattttgaaaagtataagttgtttgtgttttaagttttgaatttaaatgtttttaatttttatgtgattgaaggttatttgtataatagggataataatggtatttaggttatggttatattatgagatttaataagataaaaaagaagtaaaatgtattgtatagtatttgatatgtgaaatatggttaataaatatattttttgttttttttattattattatttattaaagatttataggagaaatatgaattttgattggattaaagttattgttaatttatatagtatgtttaatttgataaataatattttatgttagtttaatatatttacgtaattttaattttttttatagttataaagaagagagtataattaggaaagaatagaatgtagaaagttgttggataggattggagaagagaaggaggaggaaatagggaagatgtagtttttaaggtgttgttagagggtaatatttgaagttttaagttttggaagagacggggaaagattttattttattagtttgttgagattttgttaggggaaatttgggttttttttttttaggatagtgaatttataattaaattgttttttagagagagttattttattatgatttaaatagtttatttaaaggttttttttgaagtcgttatttaaatagtttttatttagatgggagatggagtagggtttatcgagaggtattatttttagttcgaagagtataagttttggagttagggaggttatttttatttttaaagttttttgaaattttggatttattattttaaagtttttgtttaagtgttcggtattgaaataaaggaagtgttttggtagtagtaatagtaaaaatgtagtagtttaataaaagtagtttattaaagtttaaaaagtaattaaattatttatttttttagtttatttttattttaaaaaagtaaattattaatagtatcggaaagaaaaagttatattttaatttttatagtatataattataggtatttaaaagaatagaataagaatatagaaggaatatattaatattaatattaaataagagttttatttttttttggaagaacgggttgatatatagttgaatgttataggttttttattttatatataaaaaaaaaagttttttaagttttatatttattatttgggtggagtgggttgttattaattttttatatttagtttgtttatattaggaatatacgtttattgaaattaatagggcgtgtttaaattttagtttttgtttttgattttgggtataggaatgtttaatatataaagagtattattatgtttaaatttggatttgttatttgatgttgggagttttaatttatattttattttgtagtagtggaaaaatgaaataaatggttgtatatgagttatagggtttgaggattgtgaggtgtttttgtaattggatttagcgtgagaggttttgggtaggaatttttgtgtttcgggacgtgtttggtagagggaggattaaggtttagtttatatagtgtgttagtttttatgtttttttttaaaattgggaagtagaaaaattaaattaatttgttggttttttttttatttttaaagttttttaaaataaggtgaggtttatataaaattgaatatgaaacgatgaaagtgtaaaatgtttgtttgttcgtgatatttatgtatttaataaatgttgatttttttttgaggattaaatataaggttaattatgtaatatgttttatttattttttttttattattaattttatgtagttaagaataaggaaattaaagtatgagaggttaagtaatttgttttagggtatatagttgttatgtaaaggaattagaatttgaatttggtaatatgttttaagagtatatgtttatgattagatagatagatgattgattgatagatagatagataaagatgtttttatttattgagtttatattttgtgattaagtgtatatggatttatagtttttatgtagaaattttttggatttaagggttttataatttataaataggaaattattgatttaaattaattttttgttttataagtttttttttttaatttaggttatgatattttaatttatagttatataatgttggtattgttggtatgttagttatgtatattttatggatatgtttaaaaagaagaaaggagagagggattttttttttttttttttatattagggttaggaggatattagttgtatttatttttttttgttattttgaataggagtttttgtttaagaaagagtattaatagtagatgttgattgtttgttagatttttataagaaagttagtgattttaatattttttattttttgttttgatttgaatgggtttaaaagtaataaatttaaaggaaataaatggaaatttttaggattattaaagaagagagtgaaaagggaggttttagttttttttaaataattagtttttatgtgaatttattattatggggaaggtattaagttatttataagagatttgtttttatgatttaaatatttttaattaggttttatttttaatattggggattatattttaatatgagatttggaggggagaaaatatttaaggcgtattattgagtataatttatatttttttatagtgtataggtgtgggtatttagatattaagttgtttgtttttaagatatgtaattagttatttatattttgtcgatgaagtatttttgtggtgttttgtagttaagggtataatttgaattataaggtggatttaaataaattgattatgatttttattttataaatagtatattttagttaagaagtttaaagggttttaaatttatttttatgttttttaatagatatagatgttaagtgagttgatattttttttataatggggagaataatattataagtttattgaggaagatttttaaggaaagttgtagtataaaaaagttttttttttttaaaaaaaattttttttgagattgggttttattatgttgtttaagttagtttcggattgttaggtttaagtgattttttttattttatttttttaagaagttgggattatggggatgtgttattatatttagttaaaaaaaatattagaatattatattaaatttttaaaaattaaaagaataaaaataaaaatttagttatagataatttaaagaaattaagtgtaagattaattaagagtttaggttaggaataagttttaaagtttgagtttcggttgtgattatttaaattttttttgttttagtttttttattagtaaaatggagatagtaatagtatttattttaagggtggttattagtataaaatgagttaatgtggtgaggtggttagaatagaatatatattagtttttatgaatattataattattttgtaagaagtttttggttagatttgagagtagtagagagagagtttttttttttatttttttggtttgttttgaggatgaagaatttggaaggttattggtgggtttagaaggtaaaattttgtttttataggatgtagttaggattatatagtagtaattatgttaatgagatagatattattatatatataattatatttatatttttaatatacgtatgtttgtagaagtggcgttaggaagtttgaagattatttttaggtgtggtacgagatagagaaatttttattgtgtagagttagtttttaagtcgaatgtagtgtaggttaggtttattttatgtttttttatagaattatatagttttaaaacggaaagagaaattttttaaaggaattttttttggtcgttaatagataaggatgagagattttagtttagattaggatatttgtattttaataggtaatttttgaagatttaattttttaggattttggttaaatagttttgtgattcgtgtgtttttagtgcgtgaaagagggtatgagtgaggatgggaatagtgggaggggtaggacgtattttgaaatttttttattatattttgtgttattatttataaaaggtttttaggaaatgtaagtttatgtatgagaatgtatgtatgtgtattgagggttgtttgttttaatgatgagtatataggagatatttgtagtattagtaggtaaataaatgttttgtaatattgaaggtagttttgtatattaaataattggtttgattttgtatatttttttaatgtgtagttagatattttataattatttgagttttaaatacgattgtgaaaaatataaaagtattttttgtattttttatatatattgtattttatagaaaagaaattattatgtatattgaggaaagattatttttggtttttattggaaaaatatttttgaattttttattgttttagaaaattagattatttgtagttatattgtttatgatatttgtgttattaatattttatttttatattagtttgtttttgtagtatttatatttatgaaggatatatttttttattataatgttatttttttttattttttttttatattaaaattgggaattttattgattaaaaaatatatgtgtgtgtaggtagtagaggtagatttagtttgaggttttgaaatttaaatagtttaagggggtttttttaaaaaatttagtagaaatttttgaatataatattagatattaaaattattatttaggataagaaagttaattataaaaggttaaaaatatattagttgataaatgatataaatattataaaatttattagaaagtaaatagatattttattattttttttttttttaaaatattgttattatatgttatttgatttttttttttttagatagagatattgtaatattatttttatagataaattagaaatataatttatttttttttttagtattattgagtattatttattttttattattgattgttgggagtgtatagagtatgtagttttatagtaatatttttattatttgtagtgtggttataggtttatgttttataaatataggaataaatgtatgttattaaatgtgatttgataggattgaaaattattgttaaattttgaagaagaaaaaagggttagagaaatatggaataggggttttgattcgtagtttttagtgatatttattatagtttttttttttgttttttttaaaacgggaaatatttgtagattattatagaggtttaagaaaataaatgaatattgagtgtttgtgattagattattagatcgaatattagaaatagatttagtgatataaaatttgggatattttggtggttattttcgtagaatagtgtttattataattaggaatttgtaagttttttaattagaaaatttgtacgttttttattgataataaataaatgaatataaatatggattatttagatgattattttataattaaaaattgtatttttattttaatatttgtatttttatttttttgtttgtaatttataattgtatttagtgatcgataaattaagttatgttgtatttatgaatgagggttttatgttgtttagagataggtggataaaagaaggaattgatataaggtttattttagaataggttgttaaatatagaataattttttttattataggtaatagtatagttacgttgtagaaagatatatgaagaaaattttttttgtatgatttaaggggtaagagttaattagaagtttatagtagagaatgtaaaataaataattttttgtatttttaatttttaaattgaatttatattaattaattatatattttaataattttatgatgttaatttatttttaagagaaaaaagataattttagaattattaagggttattttattaaagttagtatttgattatagtttgttggtagaattttggttaattatattttttaattttttagaatgagtaaattatgttttgaagtttattaatagtgttttttataatatatttttttaaataggtaatttttgagtttgaattattatggataaataaagaaatggtttaaatatggatatagatttgttatttgatttttttgttattaaaattaatataaaaatttagttttagtataggaatattttttattatatatttttatttttttgtttaataagtatttatattttaagtattttgttatttgttggtgatataagagagataataagtagataagatttttttttttggggagaagattttttattggagaaaatagaaaataaataagtaaatagaatagtgatagtttgtgattaacgtttgtaaaaagtaaataatgttgttttatagacgtataaggataatttgttttaaatagggttaagaaaggttatttgatgaaaaatgatttttaagtagagatttaaagtacgagataggatgaaataagataaaggttggaataagaatttttaagtagtgggaagttgaaagtttttataaaaagaaagattttggagaattgtagaaattaagagaaggttttaagtttttgttattgtgaatagtgtcgtaataaatatacgtgtgtatgtgtttttatagtagtatgatttatagttttttgggtatatatttagtaatgggatggttgggttaaatggtatttttagttttagatttttgaggaatggttatattgatttttataagggttgaattagtttattattttattaatagtgtaaaagtgtttttatttttttatattttttttagtatttgttgttttttgattttttaatggttgttattttaattggtgtgagatggtattttattgtggttttgatttgtatttttttgatggttagtgatggtgagtatttttttacgtgttttttggttgtataaatgtttttttttgagaagtgtttgtttatgttttttgtttattttttgatggggttgtttgtttttttttttgtaaatttgtttgagtttattgtagattttggatattagttttttgttagatgagtaggttgtaaatgtttaatagtgatagattggattaagaaaatgtggtatatatatattatggaatattatgtagttataaaaagtgatgagtttatgttttttgtagggatatggatgaaattggaaattattatttttagtaaattattataagaataaaaaattaaatatcgtatatttttatttatagatgggaattgaataatgagaatatatggatataggaaggggaatattatattttggggattgttgtggggtggggggaggggggagggatagttttaggagatatatttaatgttaaatgacgagttaatgggtgcggtatattagtatgttatatgtatatatatgtaattaatttgtatattgggtatatgtattttaaaatttaaagtataataataataaaatttaaaaaaaagaaattaagagaaggatattagggttgaagtatagcgagtagaaggttaatggtataaaacgagattggagatatatataggggttagattatgagggtttggaagaatatgaaaaagtgttgggattttatttgaaagttaagaaagagttatcggattgtgtgaagtaaaagaatgtatatatatatatatatatatatatatatatatatagtgtgtatgtatatatatttttttgtttaatatagtttgatggttttttatgtatgttttagtttattttttgtggttataattgaatatttgagattgaaatttataaagaaaataaatttattttttaaagttttggagattgtgaagtttaaggttaaggggtttatttggtgaggatatttttttttaatggggattttttgtagattttcgaggtggtatcgagatttatatggtaaggggggtttgagtttgtaagttttagttttttttttattttttttagagttattagttttatttttatgataatttattatttaattaatttattaatttataattaggttaatttatttatgagggtagaatttgtatgaattaattattttttataggttttgttttttaatattgttatattggaaattaagttttattacgaagtttggaggggataaatatttaaattatagatatgtatatgtatagtatatgtgtatatatttatatttttttaacgtttatcgatttatttatatatagataggtatgtcgttatgtaatttgtaggttttttgagtagatattgggaaatgtttaagagttaaaatatgatgatagatagtttagagaagtggtagtatagataaagaaaagttgatgggtttgaggtatatatattaatgggatttattgatagattggagggtatagaaagtataaaatatgatttttaaatttttggttgtaataattgggtagatagtaattatatggtgaagattggggaagtattatatttaagggaagtattagaattgggggagaaattaattaagtgtttcggttgggaagtgttttagtttgaagtatttttattgtatttaagagtttgtgttaaataggtagttataaaaaaaatgttgagagattagtagaaatgtttatattagagatataaagtagagaaagtagagaattattggtatattttaaagttattgagtaagatgaggttagttgaagagagagaaaaagaaattaagtaatagagaaagttttagagtagaattttaggaaattttaatattttgaagatgagtattagaagatttagaatagaggttagagaaaatagttgataaggtaagaaaatttatagggaattatgttattaaaattaagaagagagtataattttagaggaaatcgttaattatattgaattttgttgagaggtgaagtaaaatagagaatataattattttttgaatttagtaatatggaagtttttgggattttagtaatggtagtggagtaatatgtgtaaaaagtaaattgaagtgggttaaaaaagtgaataggaattgaggaagtataggtaatatgtgcggataatattttgagaagttttgttgtgggatggtggtataggaagatgtggggttaagggaggatttttgttttatataagatgttggattgtatttgttagttaataggaataatttagtaagtagagagggaataagggaagtataagttaaataattgaagaagttaagtttttgtataattaagaagagagaagtggtttttatttatttaatttaaattttttttgaatataatataggtgtttttgttataatatgtaatatatatttatttttttaaattgttttgtattttgtaaaaataattaaaattaataagtttttgagaggaaaaaaagattgttatagattatgaaaatttattattagagtagtaatataaatattagtatttttattaaatgaattatgtagttaaaaagatatgttaaatttgtaataaataaaattaatagtaaatttaggatttgattatttttaaaggttggtggaagaagatgataaagagaaaatatataaaagtaggggaaaattagagaataaatatgtttaagatatatttgtggtaaaattaagttaagagaaaattttgaagtgaatagttattgtgtagaatattttattttttgttatgttttattgtgttagtaagatttgtgttagttgttttttggtagtttaaaatattaatttgttagaaaaaaattttgttttaattaattttaatgttatattgatattattttttggtttgtttatagtatatagattaatttgtattatagaaaaatgtattatattagagaaattgtaatgtattttttgatttgttaagtagttgttatgtgtatagtaatatgtggaatattgcgtagaatataaaaatgtagaagaagggagtttatttaaattataatgattttattaaaaatttgatttttataagtaggaagaataatggagaaattaggatgtgttttaataaaaatataagtataggtaattgttaatattttttgaatattgattgtatttaggtattgtgttttattttatttaatatttataggaattttatgaaataggtattattagtatttttgtttttaatgaggtagggaggtttagattatataattagtgaatggtaaagttaggatttgaagtttagaggtttgaatggtagggattttaaatatgaggaagaaaggtatttaataaggtgttttagtattttggttataatatttgggataatttaattattttttttaataagttgagagtttgtggttattttttgatttaaaatttatgaggtaagatattgatggagaatttgatattgttagggtattgatggagaatttgatattgttagggtttgtaggaaaaggtaggttagaagtaatggatttgagagagagggtgttagagttagtttttattgtgtggtatttatttaagtatttttgagttaggtgggtataaaggaaagtgataagaatttaagttatattgttttttttttttaaaggggatattttttgggtgaggggaattttaataataagaggttttggagtgggcggtttgtaatgagagtagaggaaagtagaattgattgaattataagttaataggttattttttttgttgtgtagatgtatgggatataggtttttttggagaatttataaaggtatttttatgagagtatttatatttgaattattgtaaatgagaaagaataatgaataatgttagagaaatggtgataattagtaaaaaggttatattattataatttgatttttatttatgaggtagtgtttatataggaatagtagttaaaataaaataaggagtcgatagttattatagtatggagagttgtttttttttttttatttttaaggaaggggttgatatttggaagagggagggatgtgagtagtgtggttattattttttattttttaatatataataagttattggagttataaatttattttatgttcggtggtagataggtggaggatgttggagattgaaaagaattttgaatagaagataaaattaaattgattaattttataaaattaaaattaattagatttgattgtgtttaataattttaatgagattgttttagtagtataaagtgattaaaaggttatggaattagtttaagaagttattaagggaggttattgtttaagaagaatgggtttatagtagtagtagtaattttaaaaataatgattttatgtttatattttataagttgagattttttttaatatagttgtgtgtatgaaatggaaagattgtattataagtgtgttaaggttttttgtaggtttaatatttagatgttttttggtaattagaattgtaggagtttaggaagataatagtttagttatttgaataatttggttttaaggtggtttttaaagagtagtgattgttattggttagttgatgagttttttatttttttattttgtttgttaggttgatagtttaagatttatagtaattttgttttttatgtttttgattttgagttggtagaaaagaaagagtagtaggaggtcgtgatagatttgaaagtggaagttaaagaaagaaaggagttggaagtagaatagtggaaagatggtaggattgacgataattatgggatatttgttagaagtgatttggggaagatatgttatttttagttttttaatgagtttttattataagttttaaagtataggaaaaatgttaaaaaggaaaggattatagttataattaatttaaatttttttattttagggattgagaagttcgaattttttagaatgttttgtgagaattatatatttaagtaattaattagtggaaaatgtagtattaaattgtgaggtttttgttgttgtttttgttgttgttttagttgaagatataggattaaggaaaggatgagagaataggtgtttttaaggattattatagtttattatggggagaaagttaattaaaaagtgaataaattattgaataaaatatattaggtagtaatatagagagaattaaattagaatgatgagatagagttagtggatggttaaaatatttaggttaattatatattgaaatgataagagtgtagtagagttttgttgataatttaggttaattgaattattagagtaaatgatatttattatcgtttttgtagtgtagattgatagatgtatattatatattaaatgattatatttagtaaattttaatagaaatattaggagatagtagtgttataaaattaaggtagaagagtattttaagagggagagtgattaatagtgttaaatgttttagttatgaagtagggaaagaattaagaatagttcgatgaatttggtaattagaaaaattttggtgtagtttttatgatttagggtttgtgtttttattatgtaagttttagattttaatggtaaatttattggagttgattagtttttgagatattatttaaatttataaaataatttagtatgtgaatgtatttatttttaatagtaagtgtattagattagttatttttatatggtttttattttttggtgaatgtaagtaatttatatattaaaatgtatgttagaagattatttattgtttttatattattttatttttattttattatagtatgtattataatatatgaaaattgtattttttttggtttagttttttattatatttttattgaagttaatgattatattagtttagtttattgttttttatttgatatttagtatagtagagagtatgtttagatttttaatatgtatttattagagaggtaaatgagtaattaatttattgattattatattaagatgttataatttaataaattattttttttttttttagaggtaagtttttatttatttgtatatatatataatatataattttatatttatatataaatatatatatatatataaatatgtttatatatatatataatatattatatatttatatataatatataatatatgaaataatatatataataatgtgtatatagatatatataaatatgtttatttatatgtatatatttatatatgtatatttttaaaagagtattagagaatgttggtgttggataattttttatttttaattatttattttttgtggaaattattaattttgtttttgtatttgtatttaggaaaattagtatttaggatatattttttagttaatttttatggtaattagtattatagaatatttttttttatgatcgatggtttgttagtttttttgagaatatgtaaagtatgggaaagagatggatttttaatattttttttataattttaattatagaatatttgattgtaaatttaattaattagaaatatagtataataaagttaatgagtaaaaggaagttgaaattttttgtgttattttagttatatggttgaagaaaagagagttttttttgttttgttttttatagtgtgtttgtgaattaaaatttttgtttttttagaagttataagtaatttggttttatatggtatatgtatggttatgtagttggaagtatgggttattttgatatgcgttatttagaatttgtggttagtatggagggaaatgaaaaaatgttttagattttttaattgtgtattattttttttttttttgggtattatcgtttattttttatttttagagaattaattttttttatttaggaaattatttataaatttgttttagtttgtaggtattgttttttttttttataatatgtttttgatattttatatatttgttaattataggatataggtttgttggattatgattatttgtagttagaatagttttttttattggatgtaatagaatatatattggattagaattagaagattgaggtttaaattttaattttatttatttttagtttgtattttaagttaaatgatgaaagaaattttttatataaaataattttattgattaaatgtaaaagaaatggtatgattaagaaagtatcgttttgtaatttttaattttaaatgatttaggtcgggtacgatggtttacgtttgtaattttagtattttgggaggttaaggcgggcggattataaggttaggagatcgagattattttggttaatatggtgaaattttgtttttattaaaaatataaaaaattagtcgggcgtggtggcgggcgtttgtagttttagttattcgggaggttgaggtaggagaatggtatgaattcgggaggcggagtttgtagtgagtcgagattgcgttattgtattttagtttgggtaatagagagagattttgttttaaaaaaaaaatgatttagataaaatttattaataaattaaatgataaaggttgatgggatttatttgaatggaggagtaagttgttgttatttgaaatattgattagttagtttttgtgtatgtatttaaattttatttatttatttatttatttattttggtggtagggttttattttgttatttaggttggagtgtagtggtatgatttcgggttattgtaatttttgtttttcgggtttaagtagtttttttgttttagttttttgagtagttggaattataggggcgcgttattacgttttgttaatttttgtatttttggtagagattgtgttttattatgttggtttgtttaggttggttttgtatttttgattttaagtgatttagttgttttggttttttaaagtgttgggattataggtatgagttatagtgtttggattaaattttattttttaatagataaataataattgtttgtatttatgaggtataatatagtattttgaaattagttttgtttagagtaagataataaaatagtatgtgttttttgattagagtttttagataaaatatagaatgttgtattgaatttgaattttaaaaaataataaataatttattttgtatattttatgtaatatttgtaatatatttattttaaaaattatgttatttatttaaaattaaaatttaattggatgttttgtatttttgttaaattagataattttatttgattattaaatttataatttatatatatattaaattgatatatatattaaattttatgtgtgtttttatatatagtttaatatagtttatagtttaatatattatattataggttatagtatatttagtttaatatatttaatataatttaataagttgaatttgaatttaattaagtttttaaaattaatttttaatttataaaaagtatagaagatataataaatttaatgatattatgagtaaatgttatttagaaagtaagattttgatttggttttttaatgtgtaaatgagattttttaaaatatgggggtaatgggatgttgaaatatttttgttttttaggtaatatttggtaatgtttagagatattttttattttttttaatatagtgggaaaagagagaaggattttattggtatttgttttttgggtgggtagaggttagtgattttgttaaatattttgtaatatagaagattatttttttttttaatttattttatatttatatacgtatataaataataaaaattagtagttttaaagtgttaatagtattattgttgagaaattttagtttagatttaaaaaaatttttaacgagttataattaaatgtaataggtagtgtttatttgaattttgatttaaataaattatattattataaagagtatttttgtaataaaagttaaggtaattatttaaaaattataatgtaggaaaatgtttattgatatgcgaaagttttaaaatgtattgttaagagaaaaagtaaattggatataaggaagtttgtatagtatgattttatattattaaaaagaaaaaaggttataaaagtaataattattttatttttattataaatataaatatatgtg

SEQ ID NO: 2001 - DNA, 6255 bp, Artificial Sequence
  chemically treated genomic DNA (Homo sapiens)
gattttaggtgatttattcgttttcgttttttaaagtgttgggattatagatgtgagttatcgtattaggttataaagggatttaagttggtagaggaatataaaatttatagtttatatcgtataatatattgtataatagttttgttttgagtgcgtaatgttgatttattgaagtaaagtttttaattttgaaaagttttttgtattttgtttggtatttaatttagtgaaagtttatttaattaatatgtgaaaaatatatattttaatgttggatatttatagggttttttgtagaagggatttgaaattgtgaggattatagttatttgatttattttggaatgtagatattttttatatattttttggtattttttaatagtgtattttgagaaattttttttttatattggatatattatttattttattttggttttagttttttttttgttatttgagagtaattttgaatttgagttaggtattaattttaaattttggtaaatgaaattgagatttaaatagttggttttatatttaattttaaagtaataaattttttaagagttataaggatagtatttgtttatatatatatacgtgatgtatgtttataagcggttgagttttaaattttatttgtaaattgaatattttttgtagtttttatatgaattttagattattaagtatttatgaattgaatataattgttaatttttttagtttataattagtaaattataattaatgttttaaaataattcgttttaaatttttatatagaaagtaaaatttaaataatttatttatagttttttttatagattttttaatagggtaataatattatttttggttatttattttttaggttatgtaaatgttaatatttttatttgtaaaaagtaaaattatattttaagagatgtatgcgtatattttagtattttttattttgtttgaaatagttttgtgataagggagtattaagaataataaatttatacgagtataagatagagtgggaattaggtttttagatgattggatatttttgtgggaataattggtttagaaagaagtaggtgttttatttagggaaaataaagaagttataattaagagagaagtagttttaaaggtgaaggtgaagagttgttagttttagcgaaggttttgtaattagagaatgaatttttagggtagagttaacggtagattttaaattgttttaataattaaaattattattgtattttgaagggggtgtttgaatttagttgtaaaatgtttgatatttgtgaatttttttaatgttatatttgaaattgttttggtgtatgtataaggtgtttaattatgattttatattttattgttaaattttatgtgattcgtttttttggagaagtatgtgtgcgaagtataggtttagtttgttatataggtaatatgtatttgtttttgagaaattttaaattgtgtttatgagagaattaatttttttagggaaatagttttattaacgattgttttatgggagaggatgtgtggggatatttgtattttgttatttggagaaaaattgagttgttggtgagatattgaattaatagttttggattgagaagtgaaaaatagagaatatttgttttttttttattttgatgttaatttaagtaatttcgaaggtattttggaagttttagaaaagaaaattttagtgattcgatttagaattttggaaattagagtggtaattttgtgtttggtatataataggtatttgatagaaatttattgaaagaaagaaagagaagaaggaaagaaagaaaaagaaagaaagaatagagaagaaggaaagaaagaaaaagaaagaaagaaagaaaagtaaaaaaagtaataaattttgtagtattttgaagtattaagtggtatatttaaaaggttgggttattttatcgttagaggttattaataatataattattttttttttttttttttttttttttttgagatagggttttattatgttatttaggttgtagtttggaatttttgggtttaagtgattttttcgttttagttttttaagtagttaggattataggtatgtattattatttttggttaaatttttttttattttttgtagagatgggagttttattgtgttgtttaggttggttttgaatttttggtgttaagtaatttttttattttaattttttaaagtgttgggattataggcgtgagttatcgcgtttagcgtaatgattttattttttataaataagagtatgaatatttatatggtttggaaaataaataaaaagtaagtaattgttaatttaagtagatgttgatattttttttagtacgtaggttgtatattgttggtttgattttgtaattttttttgaaaatttaaagggtagtagatgtgaaaagttttgttaagaattttttaggaataaagtaaatataattttatagaatgtgaaaatgttgatagtatttgtgttatttattgatatatttttaaatgtgttgacgttaattatttttaaatagttttttttttttttttttttttttttttttgggacggagttttaatttgttatttaggttggcgtgtaatggtatgattttagtttattgtaatttttattttttaggtttaagtagttttcgtgttttggttttttgagtagttgggattatagatacgcgttattatgtttggttaatttttgtatttttagtagagacggggttttattatgttgtttaggttggttttgaattattgtttttaggtgatttatttatttcggttttttaaagtgttgggattataggtgtaagttattatatttggttttaagtaggttttaatagtgttttttgtttttaaaattttaagtgaggtttaaatgttacgttttagtaatatttttgagaggagagaatatagttgattgaaagggaaggggagtgttatgcggtggtgaagcgtggattttgaaagtagatgttagttggattttttgtttttttaatttttggttgtgaaatttgaagtatataatttaattttttcgggtttattttttttttttttgttaatggtaaaatgagaataatattatttattttatggggttattgtaaagattattatgtaaagtgtattgaatagtgtttggtatagagtaagaattttaatgttttttaaatagttaaaatttaagttaaaatgggggaaatgtgtataaatttttaaaattaagtattttgtaaatatattgttttttaagagataaattttagagaaattggttttcgtgtagttttttaaataaaaataattaatttagaaaataggtttagtgtggtggtttatatttataattttagtattttgagaggttaaggtaggaggatcgtttgagtttaggagtttaatattagtttgggtaatatagcgagattttgttttaaaaaaagaaaaagaaaaaaaattaatttagaaaataaatttgatggtgagtaattaatttatggtttttagggtattattcgatttatgtaatttattaggtatgaaatattttagtgttgaattattgtttatattttttttataaaattgtattaaatttgagtatgagatatttatttggaatttggtgtgaatatttcgaaagtttttttttttttttttttttttttttttttgatagaattttgttttgtcgattaggatggagtgtagaggtatagttatagtttattgtagtttcgaatttttgggttgaagttatttttttattttagcgtttttagttttttgagtagttaggattataggtgtattattgcgtttggttaatttttttattttttgtagagataaggtttcgttatgttaattaggttggtttttttatttttaatggagatttaaagtatttgtgaaaattggggtattcggttgttagttataattggaataaattttgttttttagttttaaagttttaatgttttgcgttaagtaatttagttataaatttaatttagtttaaatatttattgattggttgttatgtttatgtaatatatattatatttaagggtcggaaatgaaaggatgtaagttatttgtgttggtattatttaaagtttttattttttgagaaaggttgacggtaaaggaatagatttatgttgttatgtgtcggtatcgcgcggagtagaggtggtttggatgggtaatttttagtataggtttttaaagaaggacgggtatattttcggtaatagttttattttttttcgtttttcgggggaaggggggcggttagtattgttgatggtatcgtttgatattatttgtttcggaggataggagagcgtgggtttgcgtggtttattttattcgtggtttgattgcgttaatttttcggttttttgtttttgttacgtgaggtgtttaaatatggtcggatttaggaggagttagggagcgtttgttttttttttgttaatggggaggaggttggaataaatgtttggagttaaatataatttgtaggaaagtaaatggggattcggattcgtttttgggcgagttgaaagtcggttgtagtagaagtttttgttttgggtgatttattatttaataaattttagagaatttagtgttttcggtaggttttttgtttttttgtttttttgttttttgaggttttgggtcgttttcgtagttttagtcgttttgttagaaacgggaggcgttcgagggtcgggtgggcggttgtttggatttgggttggcgcgtcgtagcgtttttggtttcggtagtttgggggtagatgttgttgtagggcgtgtttggggttgtgtttatgtgatgaagcgagggaaaaatcggggggaggggggcggaggttaagaggtggttttttttttttttttttttttttttaaggagtttgtcgcgagcgcgttttttttattcgtaggttgggcgcgttcgtagtcggttggcggcgaaggaaggcgttttcgggatttcgcgggcgcgcgttttttggtttttgtttttgtttttgcggtttggggaaggcgtaattcggcggttaggcgcgggagaagtgcggaggagttatgggcgtcgggagttttatcgagtagcgtagttcggagtagtcgttcgaggggagttttacgtcggttgagttcgagtttagcggcggcggtttttgggtcgaggcggcgttagattttttcgcggttttaataatcgttgtttgggatttcgttattaaggtacgggcgtgtcgggttatttgcgtcgggaggcgcgggtttttgtcggttttttagtttatttagtcgtatttgtaaatttagagtgcgaatttttttttggcggttttttagggtttttcgcgtcggggcggggttagagtagcggcgagcgcggcggggggtttgtatttttgtcgcgggtttttaggggaggcgattgcgttatgcgtaataataaaattcgcgttttgtttacggcggttgagtttttttgcgtattttttcggtgggagttatgtagttcgaggcggaggagttgcgcggagggggattcgtggagaatggatttcgggtcgggttttcggagtttcgagatgcggaaagttagttgtgaggttaggattcgtggtggagttcgtcggggagtttagttattttcgggtttttcgtcgcgtatcgttttggatgttagcggtgtttggagcgagcgggtttggtatttagtttttttgcggtagcggttcgagtaggtatcgttttttcgaggtagagaaagtttggggtgtagttcgtttagagttaggaaaaatttgggtaggcgttgcgtttttagaaggaatgataggtttcgtaaattagttagcgttttcgcgttcgtttagcgttttgtttgtagatttagttggttaaatatacgttagagtggttagaagtttttaaaggatggggttagtgtaacgagtatttcgggtatttttttttggacgtagtgttgaaacgattgtattttatcggttttagtttttaaggttggaatattttttgtgggttaggatagtcgttaagattgtggtttgttttggtcgtggtattttagatttattttttagcgtatgtgtttattagtaaggttttatt

SEQ ID NO: 2002 - DNA, 6255 bp, Artificial Sequence
  chemically treated genomic DNA (Homo sapiens)
agtgaagttttgttaatgaatatatgcgttggaaaatagatttaaaatattacgattagaataagttatagttttggcggttgttttggtttataagaaatattttagttttgaagattgaagtcgataaaatgtagtcgttttagtattgcgtttagggaagagtattcggaatgttcgttatattgattttattttttgagaatttttagttattttagcgtgtgtttggttaattgagtttgtaggtaaagcgttgagcgaacgcgagggcgttggttggtttgcgaaatttgttattttttttggaaacgtagcgtttgtttaggttttttttggttttgagcgagttatattttaggttttttttgtttcgggaaggcggtgtttgttcgggtcgttgtcgtaggaggattgggtattaaattcgttcgttttaggtatcgttggtatttagggcggtacgcgacggggaattcgagggtggttgggtttttcggcgggttttattacgagttttggttttatagttgatttttcgtatttcggagtttcggaggttcggttcggggtttattttttacggattttttttcgcgtagttttttcgtttcgggttgtatggtttttatcggaagagtgcgtagaaaggtttagtcgtcgtgggtagggcgcgggttttattattgcgtatggcgtagtcgttttttttggagattcgcgataaagatgtaagtttttcgtcgcgttcgtcgttgttttggtttcgtttcggcgcgaaagattttgaaaagtcgttaaagaggggttcgtattttgagtttgtagatgcggttggatgggttgggaaatcgataaagattcgcgtttttcggcgtaggtggttcggtacgttcgtattttggtggcggggttttaggtagcgattgttggggtcgcgggggggtttggcgtcgtttcggtttaggggtcgtcgtcgttgggttcgggtttagtcggcgtggagtttttttcgggcggttgtttcgggttgcgttgttcggtggagttttcggcgtttatggttttttcgtatttttttcgcgtttagtcgtcgggttacgttttttttaagtcgtagggataggggtaagagttaaaagacgcgcgttcgcgaggtttcgagagcgttttttttcgtcgttagtcgattgcgaacgcgtttagtttgcgaatgaaggagacgcgttcgcggtaaattttttaaaagaaaaggaaaaaaaaaaaaaggttattttttagttttcgttttttttttttcggtttttttttcgttttattatatgagtatagttttagatacgttttgtagtagtatttgtttttaggttgtcgggattagaggcgttgcgacgcgttagtttaggtttaggtagtcgtttattcggttttcgggcgtttttcgtttttaatagggcgattagagttgcggggacgatttagggttttagaaggtaagagagtaggggagtaaaaagtttgtcggggatattggattttttggggtttattaaatgatggattatttaaggtaggagtttttgttgtagtcgatttttagttcgtttaggagcgagttcgagtttttatttgtttttttgtagattgtgtttaattttaaatatttgttttagttttttttttattagtaggagaaaggtaagcgttttttggttttttttgagttcgattatatttgggtattttacgtggtaagagtagggaatcgagaggttaacgtagttaggttacggatgaggtgggttacgtaggtttacgtttttttatttttcggaataagtgatgttaggcgatgttattagtagtgttagtcgttttttttttttcggggaacggggggaaatgaggttgttatcggaaatgtgttcgtttttttttgagggtttgtgttggaagttatttatttaggttatttttgtttcgcgcgatgtcgatatatgatagtatagatttgtttttttgtcgttagttttttttaaaagatgaagattttaaataatattagtataagtggtttgtatttttttattttcgatttttgaatataatatgtattatatgagtatggtagttaattaataagtatttgaattaaattaaatttgtagttggattgtttggcgtaaagtattaaggttttggggttgaaagataaaatttattttagttgtaattagtaatcgagtgttttagtttttataaatattttgaatttttattaagaatgaagaaattagtttggttaatatagcgagattttgtttttataaaaaataaaaaaattagttaggcgtagtggtgtatttgtagttttagttatttaggaggttggggacgttggggtagaaggatgattttagtttaggaattcgaggttgtagtgagttatgattgtgtttttgtattttattttagtcgatagagtaagattttgttaaaaaaaaaaaagaaagaaagaaggaagaaattttcggaatatttatattaaattttagataaatattttatatttagatttagtataattttgtagaaagggtgtaagtagtagtttagtattaggatgttttatgtttaatgaattgtatgaatcgaatggtattttgggaattataggttagttatttattattaaatttgttttttgaattaattttttttttttttttttttttgagataaggtttcgttgtgttgtttaggttagtgttgaatttttgagtttaagcgatttttttgttttggttttttaaagtgttgggattataggtgtgaattattatattgggtttgttttttgaattaattatttttatttaaaggattatacgaaggttaatttttttggagtttattttttaagaaatagtatatttgtaaaatgtttagttttaggaatttatatatattttttttattttgatttaaattttgattatttaggaaatattagaatttttattttgtattaggtattgtttaatgtattttatataataatttttataataattttatgggatagatagtattatttttattttattattggtaggagggggaggagtaggttcggagaaattaaattgtgtgttttaggttttatagttaggagttggaagagtaggaagtttaattggtatttgtttttagggtttacgttttattatcgtatggtatttttttttttttttaattaattgtgttttttttttttagaggtgttattgaaacgtggtatttggattttatttaggattttaagagtaaaaagtattgttaaaatttatttgaggttaggtgtggtggtttatatttgtaattttagtattttgggaggtcgaggtgggtggattatttgaggatagtagtttaagattagtttgggtaatatggtgaaatttcgtttttattaaaagtataaaaattagttaggtatggtggcgcgtgtttgtaattttagttatttaggaggttaagatacgagaattgtttgaatttgggaggtggaggttgtagtgagttgagattatgttattgtacgttagtttggatgatagattaagatttcgttttaaaaaaaaaaaaagaagaagaaaaaaaaaattatttgagaatgattaacgttagtatatttgaaaatgtattagtaagtagtataaatattattaatatttttatattttgtgagattatatttattttgtttttgggaaatttttagtaaagttttttatatttattattttttaaatttttagaaaggattgtagggttaagttaatagtgtataatttacgtgttgaggaagatattagtatttgtttagattagtagttatttgttttttgtttattttttaggttatgtaaatgtttatatttttatttgtaaaaagtaaaattattgcgttgggcgcggtggtttacgtttgtaattttagtattttgggaggttgaagtggaaggattgtttgatattaggggtttaagattagtttgggtaatatagtgaaatttttatttttataaaaaataaaaaaaaatttagttaggagtggtggtgtatgtttgtagttttagttatttgggaggttgaggcgggaggattatttgagtttaggagttttagattgtagtttggatgatatagtgagattttgttttaaaaaaaaaaaagagaagaaaagaaaagtggttgtgttattaatgatttttagcgatgaaatagtttaattttttgggtatgttatttagtgttttagaatgttataaagtttgttattttttttattttttttttttttttttttttttttttttttttttttttttgttttttttttttttttttttttttttttttttttttttttttttttaataaatttttattaagtatttattatgtgttaagtataaagttattattttagtttttaaggttttaaatcgagttattgaggtttttttttttagggtttttaagatgttttcggaattgtttggattggtattagggtagaggggaggtaggtgttttttattttttattttttagtttaaggttgttggtttaatgttttattagtagtttaatttttttttaaatagtaggatgtaggtgtttttatatatttttttttatggggtagtcgttggtagagttgtttttttgagagggttaatttttttataaatatagtttgagattttttaaaaataaatatatgttgtttgtgtagtaggttgaatttgtatttcgtatatatatttttttagaaagacgggttatatgaggtttaataataaaatgtagagttatagttgggtattttgtgtatgtattaaaatagttttaaatataatattaaaggaatttataaatgttaaatattttataattgagtttagatattttttttaaagtgtaataataattttaattattaaaatagtttaaaatttatcgttaattttattttaaagatttattttttagttataaagttttcgttgagattggtaattttttatttttatttttgaaattgttttttttttgattataatttttttgttttttttggataaaatatttatttttttttaaattagttgtttttatagagatatttagttatttaagaatttaatttttattttattttgtgttcgtgtgaatttgttatttttaatatttttttattatagagttgttttaggtagaatagagagtattagaatgtgcgtatgtattttttaagatatgattttattttttataaataagaatattaatatttatatggtttggaaaataaataattaagaataatgttattattttgttgagaagtttatggaagaaattgtgagtaaattatttgaattttattttttatgtgaggatttgagacggattattttagagtattaattataatttgttaattataaattagaagaattaatagttgtatttaatttatgagtatttaataatttaaaatttatatggaagttatagaaaatgtttaatttatagatgaagtttaaagtttagtcgtttgtagatatatattacgtatatatatataggtaaatgttatttttgtaatttttaaggaatttattgttttggagttaagtataaagttagttatttggattttagttttatttattaaggtttaagattggtgtttgatttaaatttaggattatttttaagtaataaaggagggattggaattaagatagagtaaatgatgtgtttaatatggagaaagaattttttaggatgtattgttagaagatattagaaggtatgtggaaggtgtttatattttagggtagattaagtggttgtaatttttataattttaaattttttttataaaggattttataagtatttaatattaaaatatatattttttatatattaattaaataaatttttattgagttgagtgttaggtaaaatgtagaggattttttaaagttggaaattttgttttaataagttaatattgcgtatttaaaataaagttattatataatatattatacgatgtgaattgtagattttatgtttttttattaatttaaatttttttgtggtttggtgcggtggtttatatttataattttagtattttgggaggcggaggcgggtggattatttgaggtt

SEQ ID NO: 2003 - DNA, 6048 bp, Artificial Sequence
  chemically treated genomic DNA (Homo sapiens)
  unsure 5543, 5575: n is a or g or c or t
gtgggttaaataaaatgttataggttatagttttagtttggtggttgttgatttattgattttgttataatattggaggttaggattttgggtaaatgaaagagaaaaggaggtagattgagaatgtgattttataattttagtttttttaggggttgggtggttagtgtttttttagtagttttttttcgtaggaagtagaattgtttgtaacgttgatggagttatagtaatttttattttattgagtttaggatttgtagagttattaagattttggagtaattgtttttagtatttaatagaagttgttaaaaggattatgggttaatttattttagatattttttttagatgtttttatggaaagttagggtttaaattagtggtttttatttttggtagtatttgagttttatttggggaattgttagaaagtgaaatttggacggtatttatattagtttagtttttgggtggggtttggatattagtatttgtagaagttttttaggtggttttggtgtagttaggttggaaattattgatttaattaatagaaatgttaggttgggatttttttcgaggtatttttttaggataggttgtgtatgatagttttatagtgttagggttttaagatgttttaatggtttaggtattggttttaattttcgttttttcgttttttttgagattttaataaattttatagggttgggtataatggtttacgtttataattttagtatttttttttttttttttttttttttttttttttttttttttttttttttttttttttttttttttttttttttttttgagattgttttattttgtcgtttaggttggagtgtagtggtataattttggtttattataatttttattttttaggtttaagcgatttttttgtttaagttttttaagtagttgggattataggtttttgttattatgtttagttaatttttgtatttttagtagagatagggttttattatgttggttaggttggtttcgaatttttgattacgtgatttttttattttagttttttaaagtgttgggattataggcgtgagttattgcgtttggttaattttagtagttttagaggttaaggtaagaggattttttgagtttaggagttcgagattagtttgggtaatatggtaagattttattttaatttaagaaaaaaattaaaatatttaagttttataatttttatatttttattgattgattaagtgtagataatgatatttgtttttttaattttattaggttgttattaggagaaatgaagtaataaatgagaaattgttttgtaaattgttaacgttatgtaaatattgttatttagagtgtgtttttaggtgcgggaggtatagttgttatttgttggagattatttttgaagtaatatttttagtgttatgggttagatgggaattggtatagatattttaatttagaaggtagtttttattgttttataagtaggtgcgttttttggggtggtagtttggtattggttattttaattttaatttgtgtaggaggtattatagtaaatgagtagagagagtttaggggatttgaagggaagtggagggttatttggagagggagggaattaaggattttttgtgggttggggtttttttgaggatttagggagtaattgttaaggagttttagtagggatttaagagttatgtaagagtaaaaagaggtaaattattaaggaaattagtgaagttagtattggaataatagagaggggatatagtagtgtagtatgggttttggttttaggaagttgtttgattggggtagataggattagttttttagaagatagttatttatattagttaggtagttatgatttagtgttatttatttgaggtttaggttgtatgaggggttgggggtgggatggatagagtattggttgggtattaggattaggttggagttttggtttaaaattttattataatttgatattgggtaagatggtttatttgtggtattttaggtttttgttttgtaaagaggagtttgggtgtatatttagatggattgtgagtatagtttgagtttgttttgtcgaggtgttgaggtttgggagattggggtgagtagttgtggtttagggaaggttggtaagttgggttttagatgagaggggatgtttggttaggtagaggtgagtggagaaggtagggtaaggaagggaatatgagcggcgaataaatggagtggatatggtgggggtagaggatggtgggaagtggttttgttgcggttagagtggaggaagagataagtgggaaagagtggagtcgattatagaaggtttcggaaattaggtagagatgtttaaattggtttttttaggaaggagagggttatgaagggatttagggaagggttatgatatgattatgttgtattttagtaggattaatgtgatttggtgtttagaatgatttggatggtatgaggttaggagtcgaggaggatagttagaagatttttgtaatatttttggtatagggagatggattgggagttgggaggtggtaataggttaggtttagagatattttttaggaaatattgataggttttggggtttggttgtatttatggagtggggaggaatgagttattttgagaagtagttttttttttaaaggttagggaagataaagtagaggtagtttttttgtttgtaaataggatattttagggtaatttggtttttttaagcgttagtttttttttggttttagtttagataggagttgtaataacgggttgggtatgggtgatggtatcggttggtggttgggttaagggttatgtttttgattatgtattaggtttatttagtttgttaagtgttaggttttgcgtttgtgtaggagatagagtaattagtaaaatatagttttttatttttaaggagtttttagttttgtgagtttggtagatttgtagaatttaaatgaaatggtagttgagaataattattttgtttttatttattttattttgtttaacggttatgtaggtagttttaaatgtttgatgtgtattagaaaatttttttttttttggtttataattatgatttagggtaaatttaggttttgttgggtttgaaaattaaataaattggtattttttatggaaaataatttaaatataaatatataaatattatattgttaggtttttttagggttagtaagggtaggaatgaaagtgagagtttttgaagttttaatcgtattaattttttagttagttttatgatatttgttattttttaagtgtgtattatgtgtacgtattttgcgtatagtattatataataattaaggggaggtgaggtgggtattagtgtttttattttatggatgaagatatagttttagaggtgatttaagatgtttttttgtataggttttaaggtaaggggtggggattgtgatttggataggaagttggggttttaggattgtatttaagtttttttttttttgtgggtgatggtggttgttaggttttgaatttacgttatttttttttttgatttgattgtatttttgttaggtttggttaagggttagggatttttaaagttaagagttagggtagaggttgggggttggattttagggtattatatggtcgagatttggttgtaggaaagtgatttatttaggtagaggggttttatataattgggattatagtaaattttagaggtgagtatttgttttaaagatttatagatttaagttgtgattttagatttataattttttggttgtataaagtttagtaagattgaggttttattgagttttaatttttttatttgtttaattagaatagtaataatttgtttgtatatttgagtttattatatgttattttgtaaggtattaaagtttttggaggttttcggaatatagaaataattaatttaagaattttaaagtggttgttttggtagtatttttagggagtttttttattttacgtaattttttttgggaaagtagaaaatacggtatttgggaaggggcgttgaatcgtgttttaagttttagtgggtttggatgtttaagagtaagaggaggtttagaggatggggataggttacgatttgtggtttaagtttcgtttagagggagtgcgttttgagggagagttatcggagttggtgattcgggggcgggtgttttggggtgtcgttttgggtttagtaatataaatttgttagttggagattaggcggggtacgtcggggagaggtgatgtattgtcgttgaagatttaggtaggtcggtgcgttcggtttgggtgaggaaggcgcgggattcgggtgcgaggattgcgtagcgttttcggttttcgttttcgttcgttttttacgtttatttttgtaagtttttttcggtatttcggcgtttatcggatttttagggcgagtttttattttcgaggaatgggatcgttttcgtttttcggggttgttagtttttagattacgtttaggggttttttcgattcggagtcgggcggtgttttttgtttgcgtttcgtattttttcgtttggtacggttattcgggtacgcgtcgttacgcgtgaaggttcgtatcggttttttacgtgggggacgtgtaggatgatgcggggtcgggggggatttcgttcgtcgttcgtttttttttcggcgtaggagggagcggtcgattcgttttcgtttttcggtcgggacgttatcgtcgggcgttgtagaggcgcgtcgtaattaatgggcgtggaggaggtgggtcggttggcggttgttattttttaggggacgggagcgcggagatcgggcgaagacggagttgtcgtcgcgtttcgggtcgagggggaggagtcgggggaggaggaggaggaggagtcgtcgagtagtcgtcggaggattacggttcgttagggttgcggaggatcgatcgtttttacgtttgtcgtttcgcgatttcgatcgttagtatgatcgtcgcgtagtttttggtttattattttacggagttgaaggatgattaggttaaaaaggtgagttttcgttcgcgtcgtcgttggttttggtcgtagttttgcgtttcggtattcgttcgtcgttttcgttgtttttatttttcggcgttcggtttttttcgggttagtatcgagttggattgtagggcgtaaggaaagttttcgttttcgattttatcggtattgttagtgtttttgtgtgtgtgcgtttttgggaggggggtaatcgggcggaagatttcgagatcgggttgtttgttgtagtgtttttgaaacgggttttggatgttagataggttttcgggttgtgcggggaggtggtcggtggttttttcgtaggtttgttcgggagggttcgagcgtcgtgggaggaggtgtgttatggagatgttggggaggtgatcgagtagtaggcgngggtgttggttggaggtagttttttatatttngggttttggcggaggtgtcggtgttcgaaaaaaaaattaaaatgtttttaggtatttgttgttattttaaatgaagttttaaagtggtgtttttttggaaaggtattgtagttggggagtttatgaatttggggtgggttatttttggttgtgtggttttgtgtaagttttttaatttcgttgagttgtagtgttttttaaatatagaatgaagataattatatttattttttagaattgtttgggggatttaataagataatgcgtataaagtatttggtatagcgcgaggtatagtgttaaaatcggaggtacgtgtttttattattattattgagaaagatgttggtgggtatttaatatagataaatgataaaattttggatggataaattattcgtttatatttttcgttgttaagttattaagaaagtatgtgtatttaatttttaaagttgaatgaatttttatag

SEQ ID NO: 2004 - DNA, 6048 bp, Artificial Sequence
  chemically treated genomic DNA (Homo sapiens)
  unsure 474, 506: n is a or g or c or t
ttgtgagaatttatttaattttaagaattaaatgtatatgtttttttgatagtttggtagcggagggtgtgaacggatggtttatttatttaggattttgttatttatttatgttgaatatttattaatattttttttaataataatgataaaagtacgtgttttcggttttgatattgtatttcgcgttgtgttaaatgttttatgcgtattattttgttaaattttttaaataattttaagaggtagatatgattatttttattttatatttgagaaatattgtagtttagcgaggttaagagatttgtataaagttatataattaagagtagtttattttaagtttataagttttttaattatagtgtttttttagaaagatattattttagaattttatttaaaatggtagtaggtgtttgaaagtattttgatttttttttcgggtatcgatattttcgttagaatttnaaatatgagaggttgtttttagttagtatttncgtttgttgttcgattatttttttagtatttttataatatatttttttttacggcgttcggattttttcgaataggtttgcggaagagttatcggttattttttcgtatagttcgggggtttatttgatatttagggttcgttttaaggatattgtagtaggtagttcggtttcggggtttttcgttcgattgttttttttttaaaaacgtatatatatagagatattgataatgtcggtagaatcgaaggcgaaggttttttttgcgttttgtagtttaattcgatgttggttcggagaaggtcgggcgtcggaggatggaggtagcggaggcggcgagcggatgtcggaacgtaaggttgcggttaggattagcggcggcgcgggcgggggtttatttttttgatttggttattttttagtttcgtgaagtaataggttaggagttgcgcggcgattatgttggcggtcggggtcgcggggcggtaggcgtggggacggtcggtttttcgtagttttggcgagtcgtggtttttcggcggttgttcggcggtttttttttttttttttttttcggtttttttttttcggttcggggcgcggcgatagtttcgttttcgttcggttttcgcgttttcgttttttggagggtgatagtcgttagtcgatttattttttttacgtttattggttgcggcgcgtttttgtaacgttcggcggtggcgtttcggtcggggagcggggacgggtcggtcgtttttttttgcgtcggaaagggggcgggcgacgagcgaaatttttttcgatttcgtattattttgtacgttttttacgtagggagtcgatgcgggtttttacgcgtggcggcgcgtgttcgggtggtcgtgttaggcggggaggtgcgaggcgtaggtaggaggtatcgttcggtttcggatcgaagaagtttttaggcgtagtttagggattggtagtttcgggggacgaaggcggttttatttttcggaaatgagggttcgttttaggagttcggtggacgtcgaggtgtcggaggggatttgtagaagtgggcgtggaaagcgggcggaagcgggagtcggggacgttacgtagttttcgtattcgggtttcgcgttttttttatttaggtcgaacgtatcggtttatttgggtttttagcggtagtgtattattttttttcggcgtgtttcgtttaatttttagttggtagatttgtattgttgaatttaaagcgatattttagagtattcgttttcgagttattagtttcggtggtttttttttagggcgtattttttttgggcgggatttgggttataggtcgtggtttgtttttattttttgggtttttttttgtttttgggtatttaggtttattgggatttggggtacggtttagcgtttttttttaggtgtcgtgttttttatttttttagaggaagttacgtaggatgggaggattttttagaggtgttattaggatagttattttaggatttttagattaattatttttgtgtttcggaagtttttaggagttttagtgttttataaaatgatatgtaatgagtttaaatatataaataagttgttgttattttggttagataggtaaggaaattgaagtttagtgaggttttagttttgttggattttatatagttaggaagttgtagatttaggattatagtttggatttgtgagtttttgaagtaggtgtttatttttagggtttgttgtggttttagttgtatagagtttttttgtttaaataggttatttttttgtaattaagtttcgattatatggtgttttgagatttaatttttaatttttattttagtttttgattttaggagtttttagtttttgattaggtttagtaaaggtatagttaaattagagggagggatgacgtaggtttagggtttgatagttattattatttatagaaaaggaggagtttagatgtagttttgaggttttagttttttgtttaggttatagtttttattttttgttttagggtttatgtagaggggtattttgaattatttttgagattgtgtttttatttataagatgaagatattaatgtttattttatttttttttgattgttgtgtaatattgtacgtaaaatacgtgtatataatatatatttaaggaatggtaggtattatagaattgattgaaaagttaatgcggttaaagttttagggatttttatttttatttttatttttattagttttgggagggtttagtagtgtgatatttgtatatttatatttgaattattttttatagagagtgttaatttatttaatttttaagtttaataaaatttggatttgttttggattataattataaattaggaagagagagattttttggtatatattaaatatttggaattatttatatggtcgttaagtaaaatggagtgaatgagaataagatggttgtttttaattgttattttatttgagttttgtagatttgttaagtttatagggttggaaattttttgaggatggaggattatgttttgttaattgttttgttttttatataagcgtagggtttggtatttggtaggttgaataagtttaatgtataattaaaaatatggtttttaatttagttattagtcggtgttattatttatgtttaattcgttgttataatttttatttgagttggagttagggagaagttgacgtttggaagagttaggttattttgaaatgttttgtttgtaggtaggaaagttgtttttgttttgttttttttggtttttgagagggaaattgttttttaaggtgatttatttttttttattttatgaatgtaattaggttttaaggtttgttaatattttttgagaaatgtttttaggtttgatttattgttattttttaatttttagtttatttttttgtgttagaaatattataagagttttttaattgtttttttcggtttttggttttatgttatttaagttattttgagtattaggttatattaattttgttaaaatgtagtataattatgttatgatttttttttaaatttttttatggtttttttttttttgagagagttaatttaaatatttttgtttggttttcgaggttttttgtaatcgattttatttttttttatttatttttttttttattttggtcgtaataaggttattttttattattttttgtttttattatgtttattttatttgttcgtcgtttatatttttttttttgttttgttttttttatttatttttgtttgattaagtatttttttttatttaaggtttagtttgttaattttttttggattatagttatttattttaattttttaggttttagtatttcgatagggtaaatttaggttgtgtttatagtttatttggatatatatttagatttttttttatagggtaggaatttgggatgttataggtgggttattttgtttagtgttaggttgtggtagagttttgagttaggattttagtttagttttgatgtttagttagtgttttgtttattttatttttaattttttatgtaatttgggttttagataagtaatattgagttatgattgtttaattgatatgggtgattgttttttagggggttggttttatttgttttaattagatagttttttgaggttagggtttatgttgtattgttgtgttttttttttgttgttttagtgttgattttattaatttttttaataatttgtttttttttgtttttgtatagtttttagatttttgttaaggttttttgatagttattttttggatttttaggaagattttaatttatagggagtttttagttttttttttttttagatggttttttatttttttttaagttttttgaattttttttatttatttattgtggtattttttatataagttggggttggagtgattagtgttaggttgttattttaggaaacgtatttgtttataagataataaaggttgttttttaagttggaatgtttgtattaatttttatttgatttatggtattaggaatgttattttaggagtgatttttaatagataatagttgtatttttcgtatttgggagtatattttgaatagtaatgtttatataacgttgatagtttgtagagtaattttttatttattgttttattttttttgataatagtttggtgaggttagaagggtaaatattattatttgtatttaattagttaatgaggatgtgaaggttatagagtttgggtgttttggttttttttttaaattgaaatgaggttttgttatgttgtttaggttggtttcgaatttttggatttaagggatttttttgttttgatttttaaaattgttggaattggttaggcgtagtggtttacgtttgtaattttagtattttgggaggttgaggtgggaggattacgtggttaggagttcgagattagtttggttaatatagtgaaattttgtttttattaaaaatataaaaattagttgggtatagtggtaagagtttgtagttttagttatttgggaggtttaggtaagagaatcgtttgaatttgggaggtggaggttgtggtgagttaagattgtgttattgtattttagtttgggcgatagagtgagatagttttagaaaaaaagaaagaaaagaaaagagagaagagaagagaaaagaaaaggaaagaagaaaaagaaaaaaagaaaaaaatgttgggattatagacgtgagttattgtgtttagttttatagagtttgttaaggttttaaagagagcgaaaaaacgaaaattaagattagtgtttaaattattggagtattttagaattttgatattatgggattgttatgtatagtttgttttaaagagatgtttcggaagagattttaatttagtatttttattagttggattagtggtttttaatttggttgtattaaagttatttagggagtttttataaatgttgatgtttaagttttatttagagattggattaatgtgaatgtcgtttaagttttattttttaatagttttttaggtgaaatttaggtgttgttaggaatgaggattattgatttagattttagttttttatgggaatatttggaagaaatgtttaaaatgaattgatttataatttttttagtagtttttgttggatgttgaaggtagttgttttagggttttagtggttttgtagattttgagtttagtggggtgaaggttattgtgattttattagcgttgtagatagttttgttttttgcgggagaaggttgttgaggagatattggttatttagtttttggagaggttggagttgtaaaattatatttttagtttgttttttttttttttttatttgtttaaagttttgatttttaatattataatagggttagtaaattagtaattattaagttaaaattgtggtttgtaatattttatttggtttat

SEQ ID NO: 2005 - DNA, 4255 bp, Artificial Sequence
  chemically treated genomic DNA (Homo sapiens)
tggttttttttttaaaatttatttagaagttgatattttgtttttattttggtttaagttattagttttttattaggatagttgtggtggtttttttattggttttttatgtttgtttttttttagtttttttgttatattgttataagagtgattggaaaatttaagttaagattatgttttgtttttggtaaaagtttttaattattttttttataatattgatttttagaagattttttaattatgattttaaatttagaaggtatagaagataaaagagtttagttagttaaaaataaatttttcgtgtttaaaaaatattattaaattaatgaaaaacgaggaaaagtatttgtattgtataatataaaggggtatttttttttatatatggaaggtatttaggattttatatattatttatttatttatttgagatagagtttcgttttgttatttaggttggagtatagtggtacgatttcggtttatcgtaattttcgttttttgagtttacgttatttttttgttttagttttttgagtagttgagattataggtgtttattattacgttcggttaatttttgtatttttagtagagacggggttttattatgttggttaggttggtttcgaatttttgattttaggtgatttgtttatttcggttttttaaagtgttgggattataggcgggagttattgtatttgatcgatttttagataaaaaaagattaataagaggttaaggtaggaggattgtttgagtttaagattttaaaattagtttgggtaatatagtgagattttgtttttattaaaaaaaaaaaaaaaaaaaaaataaagaagattaataatataattaatgggtaaatgttaggaatagatagtttgtaggagaaataaaatgtatatagtttttaaatatgtgaaaagagaaatataaattaaaaattatattaaggttaaataaaaatttgtacgtgaatgtttatagtagtattatttataataatagtcgaaaggtaggaatatttgaaatgtttatttatggatgaatagataaataagatgtggtgtatatagataatggattacgatttagttagttataaaaagtaagttatgaattttaaaaatatgatgttaagaaaaataagttagatataaaaggttatgtattgtatgattttattgatgtgaagtttttagaatagtttaatttattgaaacggtagattagtagttgttagggtttggggagtgggggaatggggagagattgttgaataattaattacggggtttttttttggggatgaaaatgttttagtagagagaggtaatggttatataataatgtgaatgtattaaatgttattaaattgtaaattttaaaatggttaatggttatttttttgttatgtgaatttttttttagttgaaaaaattaaaaatataaagaagaaataaaattttatgttgagaaattatgtttttattttagtttggtacgcgttttttggcggcgagtgagggtattgtgtgggtaaggttgggggagtcggtttttattttgtttatgaggttgttaagtgggtaggttttaaggagtggagttggttaatatttgttatgttgattttgtagttgaagagagaatgagggtttttatgtatttatgtggaaagatgtcgagtattgggatatatcgttaatggatattatattatacggtgtcgaatagtatgtaagcgtaatattttttatgcgagaaaggtgagggttaggaggagtagtcgtaggagtttgtttttgtttagagaaagagaataggtaagtaggtagtgaagaaaagtatatttttgttggggatattgtaggaattggtttttatgttgatatgggaatcgtttgaatatatggtttttgttggatagtgaagatgagggaaaaaggtagtttttttttgttttagtttagtttattttttttttttttttttttttttttttttgagacggcgttttttttttgttatttaggttggaatgcggtgtcgtgatttcggtttattgtaatattcgtttttcgggtttaagcgatttttttgttttagttttttgagtagttgagataataggtatttgttattacgtttagttaatttttgtatttttagtagagacggggttttattatgttggttaggttggtttcgaattttcgattttaagtgatttattcgttttagttttttaaagtgttgggattataggtatgagttattgtattcggtttttagtttatttttgatttagatttggtgttttttttgtttggaatattttttttcgtatcggaatggttgattttttgttatttggatgttagtttaaatgtttttacgttataaaggttagtttattttgttttatattttgttttgtttgtttttttttttgttttttatatatatagtttttaggaacgaggttcgggtgagtaaagtgggtgattatttttggtatatattgatttttggtgattttatttggttttagagtattaaatagtttatttagttaaatatagtggtttatatttgtaattttagtaatttgggaggttgaggtggtaggattatttgagtttagtagttcgagattagtttgggtaatagagtaatattttatttttataaaaaaaatttttttttaattttgttttaatttttatgtatataaaaataaaaatagttgggtattgtggtgtatatttgtagttttagttatttaggaggttgaggcgggaggattatttgagtttaggaggtgggggttgtagcgagttgagattgtattattgtattttagtttgggagatagagtaagatttagttttaaaaaaaaaaaagaaagaggaaaggaaggagaggggaggggaggggagggaagaaagaaggaaggaaggaaggaagaaggaaggaaggagggaaggaaaagaaaagaaagaaaatattagtttatttttatttttatttttagtgacgttaggtggttatttttcggttacgttgaatgagatattgggtttttgtattatcgggtattattagatttttatatttgttaggaaggggaggttagatttagggttggggtgattttggttagtgaggggttattttttgttttttttttttggttttaggttaggggaggaaatagggagttgttagttggttttttttagttttttggagttaggtttgtttgttttagtttagttaagtggaatttggggaattagttgttgaggtggtagagtaggggttttggatttattttcgatttggattttgttttaagggttgtttgagtagggttagttagggtagggtaggtaagtgtcgagtatagggtattatagtagaacgattgtgttgggacggtttatagtaaggaaggtaggatgggttttcgtggttataggacggttacgtttttacgggaaatttaataggagtttaagggtttgggagagaggtttggggaggaattttttttttatttattagagttattatcgtttaaggataggtgtttacggttaagaagtatagtgttataaagatattttagggatggtggggttgttacggtgatagattttttaggtacgtatgatacgtttagaataggttaatttatggagatagaaagtatatgagagtttggtggggggatgtgaggggaggagtttgtttatggttatagggtttttggagggatgagaatgttttggaagtagattagggtgatgattatataatatggtaaatgtgttaaatgttattaaattgtatagttttaaatggttaaaatgataaatgaatttggttcgaatataaatggttttttataatgtaggcgttttagttttgatacgtgtatttttttattggaaaagaataaagtagttattgatgtggtaggggtaggatacgagtagttgtcgttttttttttagcgtgtttggtatggtcgtaggggagcgggtgtttggagtttcggtgatattacggggtatattgagggagttgaggagtcggggtcgcgtagttttttggatgtttagcggatttagtgtgaggataaggtgggtagaggagataaggaaggcgaggggtgagtaggggttggttgtcgtttttaatttggaggggtttttgttagtttttttttatt

SEQ ID NO: 2006 - DNA, 4255 bp, Artificial Sequence
  chemically treated genomic DNA (Homo sapiens)
ggtgaggaggggttggtagggatttttttaagttggggacggtagttagtttttgtttatttttcgttttttttgttttttttgtttattttgtttttatattagattcgttgagtatttaggaggttgcgcggtttcggttttttagtttttttagtgtgtttcgtggtgttatcgggattttaggtattcgtttttttgcgattatgttaggtacgttgggaggaggacggtagttgttcgtgttttgtttttgttatattagtgattgttttatttttttttaataaagaagtgtacgtgttagagttggagcgtttgtattgtgagaaattatttgtgttcggattaaatttatttgttattttgattatttaaaattgtataatttggtggtatttagtatatttgttatgttgtgtagttattattttggtttgtttttaggatatttttatttttttaaaggttttgtggttataggtaggtttttttttttatatttttttattaggtttttatgtgttttttgtttttatggattgatttgttttggacgtgttatacgtgtttggggagtttgttatcgtggtagttttattatttttgaggtgtttttgtggtattgtgttttttgatcgtgggtatttgtttttgggcggtggtggttttggtgggtgggaagggggtttttttttaggttttttttttaggtttttgggtttttgttgagtttttcgtagggacgtggtcgttttgtggttacgaaaatttattttgttttttttgttgtgggtcgttttagtatagtcgttttgttgtggtgttttgtgttcgatatttgtttgttttgttttagttagttttgtttagatagtttttggggtaggatttagatcgggggtaggtttaggatttttattttgttattttagtagttgattttttaagttttatttggttaagttgaggtaggtaggtttggttttaggaggttgaggaaggttagttgatagttttttgtttttttttttggtttgaagttaagaagaaagggtaggggatagttttttattggttaggattattttagttttgggtttggttttttttttttggtaaatgtggagatttgatggtgttcgatagtgtagaggtttagtgttttatttagcgtggtcgggaagtagttatttggcgttattaggaatagagatgagagtagattaatgttttttttttttttttttttttttttttttttttttttttttttttttttttttttttttttttttttttttttttttttttttttttttttttttttttttttttttttttttgagattgggttttgttttgttttttaggttggagtgtagtggtgtaattttagttcgttgtagtttttattttttgggtttaagtgattttttcgttttagttttttgagtagttgggattataggtgtgtattataatgtttagttatttttatttttatgtatatgaaaattggaatagaattaaaaaaaaattttttttgtagagatgggatattgttttgttgtttaggttggtttcgaattgttgggtttaagtgattttgttattttagttttttaaattgttgggattgtaggtgtgagttattgtgtttggttgagtaggttatttgatgttttggaattagataaggttattaaggattagtgtgtgttaggggtggttatttattttgtttattcgggtttcgtttttgggggttgtgtgtgtagaaaatagagagggaaataaataaaataaaatgtagaataagatgagttggtttttgtggcgtggagatatttaagttgatatttaaatgataagaagttagttatttcgatgcgggagggagtgttttaggtagagggaatattaagtttgggttaaaagtgagttggaggtcgggtgtagtggtttatgtttgtaattttagtattttgggaggttgaggcgggtggattatttgaggtcgggagttcgagattagtttgattaatatggtgaaatttcgtttttattaaaaatataaaaattagttgggcgtggtggtaggtgtttgttattttagttatttaggaggttgaagtaggagaatcgtttgaattcgggaggcggatgttgtagtgagtcgaaattacggtatcgtattttagtttggatgataagagagaaacgtcgttttaaaaaaaaaaaaaaaaagaaagaaaaaaggtgagttgggttggaataaggggaagttattttttttttttatttttattgtttagtagaagttatgtatttaggcggtttttatgttagtatggaagttagtttttgtaatgtttttaatagagatgtgtttttttttattgtttgtttatttgttttttttttttagataaagataagtttttacggttgttttttttggtttttatttttttcgtatgaaaggtattgcgtttgtatgttgttcgatatcgtgtgatatagtgtttattagcgatatattttaatattcggtatttttttatatgggtgtatagagatttttattttttttttagttgtagagttagtatggtagatattggttaattttattttttagggtttgtttatttggtagttttatgggtaggatgagggtcggtttttttagttttgtttatatagtgtttttattcgtcgttaggagacgcgtgttaagttgagatggagatatggttttttagtatggggttttgttttttttttgtgtttttaatttttttaattgaggaaaaatttatataatagaaaagtagttattaattattttaaagtttataatttggtggtatttggtatatttatattgttgtgtgattattgtttttttttattggaatatttttatttttaaaaggagatttcgtggttggttatttagtagtttttttttatttttttattttttaggttttggtagttgttaatttatcgttttaatggattggattgttttggaagttttatattaatggaattatataatatatgattttttgtgtttggtttgttttttttagtattatgtttttgaggtttatggtttattttttataattaattgagtcgtagtttattatttgtgtatattatattttgtttatttatttatttatggatgggtattttaggtgtttttatttttcggttattattgtaaataatgttgttatgaatatttacgtataagtttttgtttgattttagtgtggtttttaatttgtatttttttttttatatgtttaaaaattatgtgtattttattttttttgtaaattgtttatttttggtatttgtttattaattgtattgttggttttttttgttttttttttttttttttttttaatagagataggattttattatgttgtttaggttggttttgaaattttgggtttaagtaatttttttgttttggttttttgttggtttttttttatttagaaatcggttaggtgtagtggttttcgtttgtaattttagtattttgggaggtcgaggtgggtagattatttgaggttaggagttcgagattagtttggttaatatggtgaagtttcgtttttattaaaaatataaaaattagtcgggcgtggtggtgggtatttgtaattttagttgtttaggaagttgaggtaggagaatagcgtgaatttaggaggcggaggttgcggtgagtcgagatcgtattattgtattttagtttgggtgatagagcgaaattttgttttaaataaataaataaataatatgtagaattttaggtattttttatgtatgagagagagtatttttttgtgttatatagtgtaaatattttttttcgttttttattgatttgatggtgttttttagatacgagaagtttatttttagttagttggatttttttgttttttatgttttttgggtttgaggttatagttagaaggttttttggaagttagtgttataaaggaagtgattggaggtttttattaggagtaagatataattttgatttaagttttttagttatttttgtagtagtgtggtaaagggattgggggagggtaagtatgggaggttagtgaggaggttattatagttattttgatgagaggttggtggtttggattagggtggggatagaatattagtttttggatagattttggggggaaagtta

SEQ ID NO: 2007 - DNA, 6608 bp, Artificial Sequence
  chemically treated genomic DNA (Homo sapiens)
atcgtatatagtttaattgtattttgattttttttatgaaagttgtaaaagtttaatataaaattatgttttttagtaattagattatattgaaggtttgttgattttgatgttaattaaaattaataagtatttttttattaaatgtttttagtttcggtgatttaaatttgtgtagagaagtttgatatttaaattgagtattttatatttattattatttattattattaagttttattttggtcggtttaaattgttatgatttttttgtatgaagggttaatttggtaaaatattttttatatttgtatttaggttattgaaaaattcgagttttagaagtttagttttttttgattatttattttaattttttgtataataataatggtagttattattgttgtttatattttttgtgcgaagtattaggatagttgtggaaaaaaggagaagagaagtttatggttaaatgtttttttttgagatttttataatttggttgagggaatagtttttataaaaagaaaagaagggattcggtagtaatgagtgatgttgtgatttatttgaaataatgtaatgatattgatttatagattagagaaattaagtttattattttattttagatataatttcgaaataaggaaatgtttggttgtatggttatagttttaattattatagaaatgggaagtagaaattataatggtttgaaagagttagagtaagatatatgggtagtaagattattgggttttagcgattagtagttttgagttaagaatgaataagaaattattgtagttttggatttttaattttagtttaatttaaataaaaggttttaattgttatttttgttattttaaattggaagagtgaaatgtatgtttataatataaaatgtattcgttataatacgaatgcgttttaagataatatatatttttttatagaattgatgttaaagtagtttttagtttttttttttttttgaggttataagattttatttttaatttttatttaaatttgtatgtatgttgttatttttttaaatatatatttggttattggaaattatataaaatatatattgtattattagaaggatgttagataaaattaattaaatacggttttttgtataaaagaaataagtatagatttttaattgtgatatatttttttttttttttagacgtggtagaaatatgtgatgggaatttttaatttttttttttaaaaagtttttagttttttttttttttttttaatgggaatttttaatttttttttttaaaaggtttttagtattttttttttttttttaatgagagcgttagagaattagtgttgattgttgtttttttttaaaatagaagatttttttaaatagaagttttatttatagagattgatacgattagagattgttttttgtttttttatatagtatatagagttttattgcgttatttttttattaaaaataattttattaattttaaaaagattgtgtataataagttatttatgtttaagatttttttttaagtttatgattatgtttgaggtatagtaagggaaaagttaattgtgttcgatgttataaaagtttatttttaggtgtggtatgttttaacgatggatattatggatttgatgttgggtttttacgattaagtagtaatagcgaatgttgaaaatataatttgatataattgtattattattaaaaatatatttggttatgataatttgttttaaaattgaaaaaatatgggtagaagtattattaaaattttttgtatttatgttttgtggtaaataagaaaaaaaaaaaaaattttcggtagaatttttgtgtagttttttttgatttgtgaaaatatttgttttcgagaattttgttagaattttgttatttattttttaaatttgtttgttattttttaggtgtgttaaaatagggttttttggttaagagggggaaataataatgagtagagaagtaaattttttagttagtttatttttttaaaaagtttttaaagttttaaatgatgaggaatttttttttacgtagtaataattttttttaattttttttcgaatttttaaattagtagttttggaaatatatgtatttgtagtaggaggaaatcgtttcggttcgaaagttgtaaaaataagtttatagttttagaaatcgggaaatatttggaaatcgtgtttcggggggtattggggattttaattaaatttgaggaatttattgtaaataatttttttttttagggataatttttatatatttgaggaacggaaaggaaagtagtgaaaattttgggttgattttttaggtttcgttaggtaggggttttagaaaatttttttggtaatgatagagcgatagaaagcgttagtatgtgtttgttttgagtttgtttttttagttttaaagtgcgttttaaatttttttttatattaaattttttggtttggtgttgttaaaatttttaaagttcgtcggattttgtagcgttttgtcgagtcgtagtttagagaatttgaagaggtagtacgcgtcgtaaatgttaagaaagtagagttttcggtttcggcggaattcggtatttcgagtttcgtcgcggatcgtttcggtttagttttataggttttgggtcgttcggcgagcgtcgtttaaaggttaacgtgtttgtttgtttttattcgattttcgaagtttagacgtgttttagtaagtcgcgtggttagtaaattttttttttgttgttgcgggaatttttttaacgattacgtgggttttatttttggtcgttttcggtatttttgttttttataaggagaaggagagaatagtttttagagcgaaatatataataataaaaattattattattattatttttatttttataattgttattattatggttaatttttttaagtcggttttttcgggagtcggggagcgagaataggttttggcggatgttaatttttattcgttgttcggtagatttattttggtttagtaaaaatattatagggatttatatttatattttttgaagtaatataaatgttttagtttttgataaaataaatacgagtttcgttagaaaaggtaagattaagtattttatatttatagagtaaggggatatttggggagtttttaaagatgagtgtttaattatttaaagagaagatatacgtttttttttttatatttataaattattgttcgttattaaagtatttttaaagatgcgagcgttgtgtagtcggtggatttggtagcgttgtcgtagttatttgtgcggtattatatagtagtatttaatagatgttttaagaaaattgcgatgggtttttgtttttcgaaatagaatttgggtgtcgatagtatgtttattgttaaattaaattttaaagtttgaatttagtggcgatggagggaattagaggatttttaaaatgttttttttggaatagattggatagttttttttataaatatggaaatagaggtatagagagaaatgattgtttttagggtatttagaataaggaaggggtttgatttttattattgtttttatttttttttttatttttaatttttggggttattgaggtaaatttcggtttttagaatagtcggtagtttttattttttttgcgttttgtcgggttaggttttttaagtttttttttgtacggtttttttgtagttttttttatatattcgttgcgttgtcgttcggttttaagtagttaaatcggaggttcgattttttgtttcggtttagttattttcgataggcggggagttaatttttattttttttatttcggttttcggtatagggtcgagaaatttcggtcgcgattcgagattattattttcgttcgttttttcgtttttttttaggagagatttgtttttgtttttatttttcgtgggattatttttattatttagtttggttttggtgtttttgagttaagggggtttcgtttatttttttttgcgttgtcgttaggatatcgtaggtatttgttcggttgcgtttgggagtttgtgaaaaagagttttgtttgatcggttagagttttgtttgatcggttgtagttcggtattttagtagttgttaaaagagagtttttgtggtttattttttgttgttttgattttgtattgatagtattttttttttttttataacgattgggtaatcgattggttgtgggtttaaggttttgtgttagagagatatgtttatttttttggaaattcgtaagagttgtttttaagttgtttttttaatgaggtttgtggggttaagaaaggaattaaattgtgttttttcggggttcgaaggttaagagttttttttttttttttggggttagggaaaggatggggagataaggatggggaagtgggttttataataggattgtggtttttgcgtatttattaaatgtttgattttgtgagtgttttagttgttattgttggaagaatgggtaagagtcggaatagagatttttgaagggagttttaaagtttgatgaaatttgtaagatttgagaatgttgtttgttgaaatgaaatgtataggggtgtgtgtgtgtgtgtgtgtgtgtgtgtgtgtttggggaggggtatgttatgaatttttgagggtatatttttgagaaagttttttttttttttttattcggtgttatggttgattttggttttttttattttttaggttttgtgaattagattaattattatttttatttttatttttattatggggtttcgcgttttttgttagtaggttttagatgtattaagagatcggtttaaataggttcgggggttacgtaatgttgagtgttgattggttgtttttggtttttttttttatttcgtttttggtttaagagcgtggtgtagatttattcgcgcgaggtaggcgttttggtgtttgcggaggacgtttttttttttagatgtatcgattttttcgatattgtttttggagcggttagattgttagttttggttgttttattggtttgttttgttttttatttgtcgattgtatatgaattttttttttgtttgtatatcgttgtcgtcggagtcgtcgcgatcgtcgtggcgttcgtgtgatggttttcgttcgtttagagtagtgtagttagttaggggttaacgaagaagaaagaagacgcgattagtgtagagatgttggaggtggttagttattaagttagagtaagatagcggagcgaaaagagttaaatttagtcggggggcgtacggttatttaaaggaggtcgattcgtcggcgttttttatcgcgtcgagttttttttattttttttttttcgtcgaggcgcgaggttgcggcgcgtagcgtagcgtagtttagcgtatcgattgtcgcgggtttcgttgggcgattgtagtcgagttcgtttttcgtttagttgtcgtcgcggcgatcgttgtttggtttttttttcggacgttagtggtaagttggagtttcgggcggtattgttagtcgagattttaacgatttaggcgggggatggggtggggagcggggataggtttcggatggttgtagtttgtaggatcgtattggttttagcggaggttggggggagggattttgaacgcgtaaatcgcgaggagattgagtttttggaagaagagaggagtttaggttttacggaaggagtatagaagtttttaaggggattgggagcgggggttcgagatgaagacgttgggcggaggcgggggtttagagaatttggcgcgggggaagtcgagatagaaacggaaggcgggggtggggttttaagaagtgaggagtgggaggagagaaaggagggaaattgaacgtaatgtcgttgagtagagggtcgggttgcggaagatgtaattgagttgtaggatcgattataattttaagaaattcgatagtaggtaagtgggagggggcgtaaggtttgggatagtgtgtgtagagggggaattaaggattttttattatgtttttattgaaaagcgattttaatttttttggcgggttttagcgaatattcgtaattttggggagataatatattgcggatttgtgtttggtttaatagttgttagttgaatttgaatagcgttgttggtgattacgtaagtttaagaggagaggataaaggtatttagtgaatttttttttaaataattaattagtttatttaagttatttggttattgttttatattttgaaaaggattgcgaaaaagtttttagcgttgttttttatttttgtatttagttttatttgataagtagtttttatagcgtttttcggaattgttaaatatgagaataggttgtcgtttttgatgttatataaagttcgttattgtaaaacgtgtttgtgtgtttgttttttttttgcgttatgttttttgttttttgttttttgttgggtagtatgcgatttgaggtgataaatatttgtattgtgtttgagaattttgtatttta

SEQ ID NO: 2008 - DNA, 6608 bp, Artificial Sequence
  chemically treated genomic DNA (Homo sapiens)
taaaatatagggtttttaaatataatgtaagtgtttgttattttaagtcgtatattatttaataggaagtaaaaggtaaagggtatggcgtagaaaagaaatagatatatagatacgttttgtaatgacgaattttatgtgatattaggaacggtaatttgtttttatgtttagtaatttcgaggaacgttgtaaagattgtttgttaggtaaaattgagtataggaataagaggtagcgttggagattttttcgtaattttttttaaaatatagaatagtaattaaatgatttagataagttaattaattatttaaaaaaaggtttattggatgtttttattttttttttttaagtttacgtgattattagtagcgttgtttaaatttagttaatagttgttagattaaatatagattcgtagtgtgttatttttttagagttacggatgttcgttgagattcgttagaaaaattagggtcgttttttaatgagaatataataaaggatttttggttttttttttgtatatattgttttaaattttgcgtttttttttatttgtttgttgtcggattttttaaaattgtagtcggttttgtaatttagttgtatttttcgtagttcgattttttatttagcgatattgcgtttagttttttttttttttttttttttattttttattttttgagattttattttcgtttttcgtttttgtttcggtttttttcgcgttaggttttttagattttcgttttcgtttagcgtttttatttcgagttttcgtttttaatttttttagagatttttatgtttttttcgtggaatttaagtttttttttttttttagagatttagttttttcgcgatttgcgcgtttagagtttttttttttaattttcgttagggttagtgcggttttgtaggttgtagttattcgggatttgttttcgttttttattttatttttcgtttaaatcgttggggtttcggttagtaatgtcgttcggggttttaatttattattagcgttcgggaggaagattaggtagcggtcgtcgcggcggtagttagacgagaaacggattcggttgtaatcgtttagcggagttcgcggtagtcggtgcgttgagttgcgttgcgttgcgcgtcgtaatttcgcgtttcggcggagggagaggaatggagggagttcggcgcgataggaagcgtcggcgagtcgattttttttgggtgatcgtgcgtttttcggttaggtttggtttttttcgtttcgttattttattttagtttagtaattgattatttttagtatttttgtattaatcgcgttttttttttttttcgttggtttttaattaattatattattttaaacggacgaaggttattatacgagcgttacgacgatcgcgacgatttcgacgataacgatgtatagatagaagaagagtttatatgtaatcggtaggtaaggggtaaggtaggttaatggagtagttaaggttagtaatttagtcgttttaaaggtagtatcgggaagatcggtgtatttgaggaaggaagcgtttttcgtaagtattagagcgtttatttcgcgcgggtgaatttgtattacgtttttgggttaaaagcgggatgaggggaggagttaagagtagttaattagtatttagtattacgtggttttcgggtttgtttggatcggttttttagtgtatttggagtttgttggtagggggcgcgagattttatggtggagatgggggtgggggtgatgattaatttgatttataaggtttagagagtagggggaattaggattagttatggtatcggatagagagagagggaaggtttttttaagaatgtatttttaaagatttatagtatatttttttttaaatatatatatatatatatatatatatatatatttttgtatattttattttaataaatagtatttttaagttttgtaaattttattaagttttgaaattttttttaagggtttttgtttcgatttttgtttatttttttaatagtagtaattgaggtatttatagggttaaatatttggtgagtgcgtaaaggttataattttgttataaggtttatttttttatttttgtttttttattttttttttaattttaaaggagaaagaaaagtttttggttttcgagtttcgggaaggtatagtttagttttttttttgattttataggttttattagaaagataatttgagggtagtttttacgggtttttaagggggtgaatatatttttttggtatagggttttgggtttatagttagtcggttgtttagtcgttgtgggggagggaggggtgttgttaatgtaaggttaaggtagtaagaggtgaattataaaggtttttttttggtaattgttgggatgtcgagttgtaatcggttaggtagagttttaatcggttaggtagagtttttttttataggtttttaggcgtaatcgggtaggtgtttgcggtgttttggcggtagcgtagagaagggtgaacggggtttttttggtttagaggtattaaaattaagttgagtaatggagatgattttacggagaatggggatagaagtagattttttttaagagggaacgaaggggcgagcgggggtggtggtttcgggtcgcggtcgaggtttttcggttttgtatcgaggatcggggtgggaaaagtggagattggtttttcgtttgtcggaggtagttggatcgaagtaaaagatcgagttttcggtttggttatttaggatcggacggtagcgtagcgagtgtatagaagaggttatagagaggtcgtatagagagaggtttggaggatttaattcggtagaacgtaaaaggggtgggagttgtcggttattttgaaggtcgaagtttgttttagtagttttaaaagttagagatggagaaggaagtggaagtaatgataagggttaggttttttttttattttggatgttttaggaatagttatttttttttgtgtttttgtttttatatttgtgaaaggagttgtttagtttattttaaaaggggtattttgggaattttttgattttttttatcgttattgaatttaggttttgaaatttaatttggtagtgaatatattgtcggtatttaagttttgtttcgaaaagtaaaaatttatcgtagtttttttgaagtatttgttgaatgttgttgtatgatgtcgtataggtggttgcgatagcgttgttaagtttatcgattgtataacgttcgtatttttagaaatgttttggtagcgaatagtaatttataaatatggaagagaaaacgtatgttttttttttaaataattaagtatttatttttaaaaattttttaagtgtttttttattttatgaatgtggaatgtttagttttgttttttttggcgggattcgtatttattttgttagaggttgagatatttatattattttaaaaaatgtaaatataaatttttgtgatatttttgttaagttaaaatggatttgtcgagtagcgagtggaagttagtattcgttaaaatttgttttcgtttttcggttttcgggggaatcggtttggagaaattgattatgataatagtaattatgaggatgaggatgatggtaataatagtttttattattatatatttcgttttaaaggttgttttttttttttttttgtgaaaggtaaaagtgtcgagagcgattaggggtgaaatttacgtggtcgttgggaaggttttcgtagtagtagagagaaagtttgttagttacgcggtttgttgaagtacgtttgggtttcggaggtcgggtagaaataagtaggtacgttagtttttgagcggcgttcgtcgagcggtttagagtttgtaagattgagtcggagcggttcgcggcgaggttcggggtatcgggtttcgtcgggatcgaaggttttgtttttttggtatttgcggcgcgtattgtttttttaggttttttaggttgcggttcggtagagcgttgtaaggttcgacggattttggagattttggtaatattagattagagaatttagtgtaaggagaaatttagggcgtattttaggattggggaagtaaatttaaaataagtatatgttggcgttttttgtcgttttgttattgttagagaggttttttggaatttttgtttaacgaggtttggggagttagtttagggtttttattgttttttttttcgttttttaggtgtatggaaattgtttttggaaagaggagttatttatagtgaattttttaggtttgattaaaatttttagtgtttttcggaatacggtttttaaatatttttcggtttttaaggttgtggatttgtttttataattttcgaatcggggcgatttttttttattataaatatatatgtttttaaaattattgatttagaaattcgggaaagaattaaagaagattgttattacgtaggaaaaagttttttattatttgaaattttgggaattttttaaaaaaataaattgattagaaagtttatttttttatttattattattttttttttttgattagagagttttattttaatatatttaaaggatgatagataggtttaaaaaatgagtgataggattttagtaaaattttcgaaggtaggtatttttatagattaaaagaagttatataagaattttatcgggagtttttttttttttttttatttattataggatataaatgtaaggaattttgataatatttttatttatatttttttagttttaaagtaaattattatagttagatatgtttttggtagtaatataattgtattaaattatatttttagtattcgttattattatttaatcgtaaaaatttagtattagatttataatgtttatcgttgaggtatgttatatttagaaataaatttttatgatatcgaatataattgattttttttttattgtgttttaaatatggttatagatttagaaaaaaattttagatatagatagtttattatatatagtttttttaaagttggtaggattatttttaataaaaaaataacgtagtagaattttgtgtgttgtgtaggaaggtagggggtagtttttgatcgtgttagtttttgtaagtgaaatttttgtttggaaagattttttgttttagagaaaaataataattaatattggttttttgacgtttttattgaagagaagagaaaaatattggaagttttttgggagggggagttggaagtttttattgaagggaagagaaaaagattggaagttttttgggagggggagttggaagtttttattatatatttttgttacgtttaaggaaaaaaaaaggtatattataattaaaaatttgtgtttattttttttatgtaaaaaatcgtatttaattaattttatttaatatttttttagtaatataatatgtattttgtgtagtttttagtaattaagtatatgtttgaaaaaatagtaatatgtatgtaagtttgaatagggattgggaatggaattttgtagttttaaaaaggagaaagagttaggagttattttgatattagttttgtagggaaatatgtgttgttttggagcgtattcgtgttatgacgaatgtattttgtattataggtatgtattttatttttttagtttaggataataaagatggtaattaggattttttatttaaattaaattgagattgaaagtttaggattatagtgattttttgtttatttttagtttaagattattggtcgttgaagtttagtagttttgttatttatatattttattttgatttttttagattattatgatttttattttttatttttgtaataattagagttataattatgtaattaaatatttttttgtttcggagttatgtttaaagtaaagtaatgggtttggtttttttggtttgtaaattaatattattatattattttaaatgagttataatattatttattgttatcgaatttttttttttttttttgtaagaattatttttttaattaaattataaggattttaggaggaagtatttaattataagttttttttttttttttttttataattattttaatatttcgtataaagaatataagtaataatgataattattattgttgttatgtaagaggttaagatgaatggttaagaagggttggatttttaaaattcgaattttttaatgatttgaatataaatgtaaaagatgttttattaaattggttttttatgtaaaaagattatgatagtttgaatcgattaagatgaaatttaatagtaataaatagtaataaatgtgagatgtttaatttgagtattaaatttttttgtataaatttaggttatcgaagttgggaatatttggtgaaaaaatatttattgattttagttgatattaagattaataagtttttagtgtgatttggttgttgggaaatataattttatattgagtttttgtaatttttataaaaagagttaaaatgtagttgggttatatacggt

SEQ ID NO: 2009 - DNA, 8049 bp, Artificial Sequence
  chemically treated genomic DNA (Homo sapiens)
ttgtattttatttagtttgggtgatggagtgagattttgttttaaaaaaaaaaaaataaaaaaaatattatatttggttatagtagtatttttaatgtttgttatatagttggtgattagtaagtatttattttaaaaatgatttgggattttaatttatatttgtataatttaaaatatttatgttagtgatttttaatgtatgatttagggttgtttgtttgaatgggtttgattttaagaattagagtttttggttggttataattttggatttattttttttagtttagtaataggtttatagtgtaatttgggttagttttttttttttaggttttagtttttttatttgtaaaagtaagggttttttggggtgaggagttgtttatttatatgattagttttgttttatgggggtttttggtattttaagatacgtaatttttaagttataaaggatcgttattgacgttattatttttattttgtaagttcgtatgttttagggtttatgtgtgtgtgtttgtgcgtgtgcgtatataggtatacgtttagatttgtaggtgatgtggtttggggagaggttgttataaatattaaatttttaattttaaagtattttgtagagatttagaattgaaggaatttataatattatttttttttaagagttagtgtttttaggagtgtgggtatcgttatagaaaattatcgaaaaggagagtgaagcgttagagaattgttgagtttggagggaattcggagtttatttagttttttgttttcgaagttttaagtataattcgtggttagtagtattatttttattagggagtttgttaaaatgtagaggtttagttttaagaggaatatgatggattaagatttgtatttaaataagatttttgggggatttgtttgtacgtttttgtttttgaaaagttgttttagtttttagtttttatttgtatttgggggaaatatgaggaatagagaggggtggagtttgttttaggttttttagtttattaggagtagggttttgataaaaaatttgtatagattttggaaaaggatttaaagttttttgcgagaggtaggcgtttgtataaaagatgaataagtgtagaagaaatgtttagtgttgttaattgtgtttaatagggtttaggtaagaaaagagaatttaattgtattggtttttgggatttgattaaagtggttatttttagagttgggggataagtttgaggaaattaattagggattgttttttttaaggtttaagtagtaaagaaaagtatttgggtattttagtttaaggagataataggagttaaggataaggttttattaggagggatatagttaattgttatatttgtgatttagagaagatagtagggaaaagtgttttgatatttgattttttgttatgttattttttggttgaatttaagtagagatgaggaaattgagttataaagtgtttaaagttatttcgtgggggagttaggatttaaatttaggttatttggttttagagtttataaagataaatataaggtttgtttatttttttggtaattatttattatttgttgtttagtattttagatattatggattttaaattttgggttttttaaaatttttttagtaatatttttgtagtgagaatattatcggtggcgagttcgtaatatttttagtttttgtttttttagaggaaagaatttaattgagagacgtaggtaagttttaaagtagaggtaaaggtttattgaaagaagtaaagtataattgagagattaagtgtttcgtttaatttttggttcggggtttttatatattggtttggttttggggtttttttttttttttgattttttttttcggtgggttgttgcgttttttttgtatgcgtaatggtttgttagtatttgggaggggtcgtatgcgtagtgtgtttattaaggttgtgcgtatgtttatttggggtgatttttttttattggttcgtcgtcgtaagaaaaaggttatatataagttagattttaatatttgtttttttgttcgattttattagggaattgtggtttgttggttttagatgatgttaattatttgttagggaattttttttttttttggcgttattcgtggttatttattatgttagagggatagttttatgatcgtttgtttattatttgatgtattgttatttttgggggtttttttttgtataagaatataataaatagttttgttaaaagagtttttattttattgtaataagattgagtggtggttagagtggtagtagttgttgtttttgtggaattggatggatagtttggtaggagaaaggtttaggggttttgattagtagtggggtcgtgttgttttttgaggtttttgttgggttttgggttattagtagggattttagttagtagtgggtatttgtaggggtggaggttaggtttgggttatgtggtagttttaaggtttaaagattgttgttgtgggaaatttttatttttgtaaatgatttttagttagggatatttttaaattgttgttagaggaagagtgatatttatgtttttataagatttttatgttttagaatgtttttttttatttttttttttttttgggtaggttgaggtttaggaagtaaaggtttttaggtatattggggatgtatttgtgagtttttttttgttttaaagttttttaaaggttggttttttattttgaggtttttgtttagtttgttgttttttaagagaattttgttttgattagagttttggaatggtattttgtagatttggatttaaatttttgttgggtgattgtagtttatattattttattttgttaaattttagtttttttattttaagataagattaaaatatttatttggggttgttgatgtaaggatgagaggagacgtgtagtttaattagtatagcgtttgtatatagtaggtgtttaataaatattagtttttttttaatttttgttgggtgttgtaaggattttaggaaatggaagatttagtcgtgtttgtaaggagttattagattggtggtgtggggattgaggggagggacggatgaggattttaataaattttagttttagtgataggagtaatacggtatagaggagtagagaggtttggattgtggggttttttgtgtttaacgtgggatattttgattttaattttagtgtttgttagtgttgtttgtgatttattgggagttattttgttaattttattatatttagttggttgaggttattatgaaaatttgtttaattttaagggaagggggtagaaatattattttttgatggaaggaatattaaagaattcgtgggtatatttttaaaggattataattattaaaaagtagagtggttaatgttgtggtggggaaagcgtaaagggttttgggattttagaggggattttttttagaatttagagaagtatgggagtggttagggaaggttttttgggggtgagggtaaagtagaatttataaatgtaagtagggttggggtaaaattttaaaaattaaatatagtttgtattataaattttgttttttagaatgaaattttattatttttatttattgcgaatatatgttcgggattatatttttaagaaaataaaaattttagaggttgggtatggtggtttaagtttataattttagtattttggaaggttaagcgggaggtttatttgagtttaggagttcgatattagtttgggtaatatagtaagatttcgtttttattaaaatataaaaaattagttggatatggtggtttatatttgtagttttagttatttagggggttgtggtgggaggattatttgagtttaggaagttgaggttgtagcgagcgatgtttatgttattggatttttgtttgagtaatagagtagattttgttttaaaaaatgaaaaaagaaaaaaaaattgtacgtattaataagtaaaaatttttttaatatttataattttatttttataattagagataatgttttatgattttttgttaaatattttttagattgttgaatatagaagtttattttgaattttttaaaatagaattttattttatggtgttattggaaacggatgttttatgatatttttttttttgttaagaaatatttttatttttgtagttttattttaagggatatgttataatttatttaattaatgtttttttggtggatatatgaggttgggttttattttttttgttttgttttttatagtatagtagtggtattttggagtagtgatttattggtatattgatttaattatgtatttaagggtaagtttttgaaattgaatttttgggttatagggtatgtaattgtttaaatatttgttaattgttttttagaaaattttattattagtaaggtttgagaaatattgtttttttattgggggaaatatttattttttaaataaacgagttaatatattttaaaaaagagagtttggttggtgttagatgtagttttatttttaattttgtcgtttgttgggggtgagattttaagggagttatgtggtttttttgaattttagtttttttatttgttaaattaggtttttttagtcgagtttttaagagattggttgagatgaggtaagatgaatagtgatgaatatggggtttttttgtggggagggtggatagggatgattataggagttaggtttttttatttattgatttaggtagtgaaaattggtttttaagtatgattttatgattttagtgatgtcgtaagtaggttttagtttttgtgtttttttttttcgtttttaggaatttatttagttttaggaattgtttttagttatcgagttttggttatttaagggatttgggtttaatttatagttgggatagttttggtttattgtattgggaatttaggatgggggttttggttagagttttgtcgtttatattgttggtattgttgtttacgtttattttagaggttttgggtgttaatttcggtttggtcgttaggattatcgataagggattgtagtatggtaagaagttatatttgttggttggatttggtaaatttacgttttaggttgttttgggtatagtggggatagggagtggggatatagatcggattttttttttggggtagtgttattttttgggttaggtggttttggtttttattttggttttattgtttattagttgagtgttttgggtatgttatttgtggtagtgaggttttttattagttaatagaatatagttttgcgtgtaagtagttgatttgggaaatgattttaggaaatattgtagggaatcggtattgagatgaggaagggagggtagttaggagagagtgtgtaattaaattagttattatttttgatgatgggaattatttagttgggaaaattttgcgtaaagtttggaaatatatgtttttgaattggaagttagaattgtggttatttttagaggtaggtagagattttgaagggtatgagggaggtttgtcggggtgttggaagttgttatattttgatttaggtggtgattatatttttgtataaatattaaaaattatttagtaatatttttaaaatttgtgttcgttaggtattttatgtatattattttttaattttaaagaatgggtaggttaggtatagtggtttacgtttgtaattttagtattttgggaggtcgaggtgggtggatagttttaggttaggagttcgaggtaagtttggttaatatggtgaagtttcgttttttttaaaaatataaaaattagttagttttggtggtagttaattgtaattttagttatttgggaggttgaggtaggagaatcgtttgaattcgggaggtagaggttgtagtgagtcgagattatgttgttgtattgtagtttgggtaatagagggagattgttttaaaaaaataaataaaaataaaataaagaatgagtaaaagtaggagtatttttttttaaatattgaaataaagtttttcgattatttaggtggtatgggaattgggatatttatatattatagtgattgattgagggtttttgggtcgggggtttgttaattttttagtatttttgttttgttgtatgtatttgttttttgtagttttaggataaaaagtttcgggatatataggtttagggaggtagatattggtagttgggagttaattgttatttattggaaagatttaaggatatggataggtattgattatatgtttttttatatttttagagttttaattgttttatttattaaatgagataataatatttttttagatagggttgttgggagtttagattggttcgagataggtagagggaaattagggaaggattttaggatatagtaaaatggaaaagatagtgggaattatttagggataaggggtagcgttttaggcggaaggattttaatatgtgcgtttgttagagggagaagagtaaattggaaagaggtgaaaggggaggttgttggttatttgtgtatttatgtttgttttggggatagaaatttgggttttttagatttcggaatagtgggatttggtaattgttatttgtattgaaattgtaaattagggaagttttttttttgtttttttgtattgtgtatatatattatgtttatgtaattagttttttgaggttggatattttggttttttttatattttttttttttttgaaacggagttttattttgttgttaggttggagtgtaatggtataattttagtttattgtaattttcgattttttggtttaagtgatttttttgttttagtttttcgagtagttgggattataggtatatgttattacgtttagttaatttttgtatttttagtagagatagggttttattatgttggttaggatggtttcgatgatttattcgtttcggttttttaaagtgttgggattataggcgtgagttattgcgttcgatttttttttatatttttaataatataaattttatttgttgttttaggtatttattgagtgtttgttgtgtgttaggtattaagttaggagtgtttgttatttttatagttttttttttgttttgtagttttaatggtatgttaatgaggaaagtttagtttagtttagtttagtttagtttagtttagttttgttttgttttgttttgttttgtttgagatagagtttgattttgtcgtttaggttagagtgcggtagtgcgatttcggtttattgtaatttttgtttttcgggtttaagtgatttttttgttttagttttttgagtagttgagattataggtgtttgttattatgttcggttaatttttgtattttttagtagagatgaagttttattatattggttaggttggtttcgaatttttgattttaggtgatttgtttttttcggttttttaaagtgttgggattataggcgtgagttattacgtttagtaaatgtattgttgttattgttatttgatagatgaataaagtgaaggttgtttggggattttgttaaagttatttagttagaaagatgttttttttttttagtttttagatttttttagttttttttatataggttagatgttatggagaataagaaggaggattattcgtttaagcgtatagtatttttgtttttggggatttgttggtaaaggtattttatttttttattagtaaaatgggtatgaatttaataatgttatagaaatgtagggatatttttgaatgttttttatgttatttggtatatagaggggtttatattttgttattgtatttaatgttaataaggatgttggttttttttttgaggataggtgggagttatcgtagggtttagagtaggggaggaggtaggtagattaagttgatttttagttattttttttttatagt

SEQ ID NO: 2010 - DNA, 8049 bp, Artificial Sequence
  chemically treated genomic DNA (Homo sapiens)
gttgtggaaaggaaatagttgggagttagtttgatttgtttgtttttttttttgttttaaattttacggtggtttttatttgtttttaagagaggggttaatatttttattagtattaagtataatgataggatatgagtttttttgtgtgttaggtagtatgagggatatttagaggtgtttttgtatttttgtggtattgttaggtttatgtttattttattgatgaggaaatggaatgtttttgttaataaatttttaagggtaaaagtgttgtgcgtttggacggatagtttttttttttgttttttatgatatttggtttgtgtagaagaaattggaaggatttgggggttagagaaagagggtatttttttagttgggtgattttgataaagtttttaaataatttttattttgtttatttgttaaatagtaatgataataatatatttgttgggcgtggtggtttacgtttgtaattttagtattttgggaggtcgaggagggtagattatttgaggttaggagttcgagattagtttggttaatatggtgaaattttatttttgttaaaaaatataaaaattagtcgggtatggtggtaggtatttgtagttttagttatttaggaggttgaggtaggagaattatttgaattcgggaggtagagattgtagtgagtcgagatcgtattatcgtattttagtttgggcgatagagttagattttgttttaaataaaataaaataaaataaaataaaattaaattaaattaaattaaattaaattaaattaaattttttttattggtatgttattgaaattgtaaagtaagaagggggttgtgaggataataagtatttttagtttggtgtttgatatatagtaggtatttagtaaatgtttggaatagtaaatagggtttatattattaaaaatatggaaaggggtcgggcgtagtggtttacgtttgtaattttagtattttgggaggtcgaggcgggtggattatcgagattattttggttaatatagtgaaattttgtttttattaaaaatataaaaattagttgggcgtggtagtatgtgtttgtaattttagttattcgggaggttgaggtaggagaattatttgaattagggagtcggaggttgtagtgagttgagattgtgttattgtattttagtttggtaatagagtgagatttcgttttaaaaaaaaaaaaaatatggaaaggattaaaatgtttaattttagaggattggttatataaatatggtgtgtgtgtatagtgtaaaggaataaaagagaaatttttttgatttatagttttaatgtaagtagtagttattaggttttattgtttcgagatttgaggggtttaggtttttgtttttaaggtagatatgggtatatagatgattagtagtttttttttttatttttttttaatttgtttttttttttttagtaaacgtatatgttggggttttttcgtttggaacgttattttttgtttttgggtaatttttattgttttttttattttattatattttggaatttttttttgatttttttttgtttgtttcgagttagtttgggtttttaataattttatttaagggaatgttgttattttatttaataggtaaggtaattgaggttttagggatgtgagaagatatgtggttagtgtttgtttatatttttgagtttttttagtgagtgatagttgatttttagttgttaatgtttgtttttttgagtttgtatgtttcgaggttttttgttttggaattgtagaaagtaggtatatgtaataggatagaagtgttggggagttgataaattttcggtttagaagtttttaattaattattgtggtgtataaatattttagtttttatgttatttggatagtcgggaggttttgttttagtatttaaaaaaaaatatttttatttttgtttattttttgttttatttttatttatttttttgagatagtttttttttgttgtttaggttgtaatgtagtagtatgatttcggtttattgtaatttttgtttttcgggtttaagcgatttttttgttttagttttttaagtagttgggattatagttggttgttattaagattggttaatttttgtatttttaggagaggcgaggttttattatgttggttaggtttgtttcgaatttttggtttgaagttatttatttatttcggttttttaaagtgttgggattataggcgtgagttattgtgtttggtttgtttattttttaaaattgaggaataatatatataaagtatttaacgggtataaattttaaaggtattgttaaataatttttaatgtttatataggaatgtgattattatttggattaagatatggtaatttttagtatttcggtagattttttttatgttttttagggtttttgtttgtttttagaggtgattataattttgatttttagtttagaggtatgtgtttttaaattttacgtagaatttttttagttgagtggtttttattattagaggtggtggttggtttaattgtatatttttttttggttgtttttttttttttattttagtatcgattttttatagtgttttttggaattattttttaaattaattatttgtacgtaaagttgtgttttgttggttggtggaggattttattattataaataatatgtttagggtatttagttggtgggtagtaaggttagaataggagttagagttatttgatttagaaggtggtattgttttagggagagggttcggtttgtgtttttattttttgtttttattgtatttagagtagtttggagcgtgggtttgttaagtttagttagtagatgtggttttttattatattgtagttttttgtcggtgattttggcgattaagtcggggttggtatttagagtttttggggtggacgtaagtagtaatgttagtagtatggacggtagggttttggttaaggtttttattttagatttttagtgtagtgggttaggattgttttagttgtggattgggtttaggttttttaagtagttaaggttcgatggttgggggtagtttttgaggttggatgggtttttgggagcgggaaggggaggtatagggattggaatttgtttgcgatattattgaagttataaggttatatttagaagttagtttttattgtttagattagtggatgaggaagtttgatttttatgattatttttgtttattttttttatagaaagattttatatttattattgtttattttgttttattttagttagttttttaagagttcggttaggaaggtttggtttagtagatgaggaaattgaggtttaaaaaagttatatagtttttttgagattttatttttagtagacggtagggttgagagtgaagttatatttggtattaattaaatttttttttttaaaatatattggttcgtttatttaaaaaataaatgttttttttaatgggaaaatagtgttttttaaattttgttggtggtgaaattttttggaaggtaattggtaaatgtttaaatagttgtatgttttgtgatttaggaatttaattttagggatttgtttttaaatatataattgagttagtgtgttagtaaattattgttttaagatattattgttatgttgtgggaaataggataggagaagtgagatttaattttatgtatttattagaagggtattggttaaatgaattatgatatgttttttaaagtgaggttgtagaaataaaggtattttttggtaaggaaagggatgttatgaggtattcgtttttaatggtattatagagtaaggttttattttggggggtttaaaataggtttttatgtttaataatttggaaaatatttagtaaggagttatgaggtattgtttttggttgtgggggtagaattataagtgttaaaaaagtttttgtttgttgatacgtataatttttttttttttttttattttttgagataaagtttattttgttgtttaagtaggagtttagtggtatgaatatcgttcgttgtaattttaattttttgggtttaagtgatttttttattatagttttttaagtagttgggattataggtgtgagttattatgtttagttaattttttgtattttagtagggacgaggttttgttatgttgtttaggttggtgtcgaatttttgagtttaagtaagtttttcgtttggttttttaaaatattgggattatagatttgggttattatgtttagtttttaaaatttttatttttttgggggtatggtttcgggtatatattcgtagtaagtaaagatagtaaaattttattttggaaaataaaatttatagtatagattgtgtttaatttttagagttttgttttagttttgtttatatttgtgagttttgttttgtttttatttttaggaagttttttttgattatttttatgtttttttggattttagaaagggttttttttgaggttttagaattttttgcgttttttttattatagtattaattattttgttttttgataattgtggttttttaaaaatatgtttacgaattttttgatattttttttattaaaaggtaatgtttttgttttttttttttgaaattgggtaggtttttatgatggttttaattaattgaatgtggtgggattaatagggtgatttttaataggttataaatagtattggtaggtattgaggttaagattagaatgttttacgttaagtatagggaattttatagtttaggtttttttgtttttttgtatcgtgttgtttttgttattggggttgaggtttgttgggatttttattcgtttttttttttagtttttatattattagtttgatggttttttgtaggtacggttgagttttttattttttgagatttttgtagtatttagtaggaattggaaagaaattgatatttattgagtatttattatgtgtaggcgttgtgttggttaagttgtacgtttttttttatttttgtattagtaattttaggtggatattttagttttgttttgagatgaagaaattgaggtttggtagggtgaagtgatgtaggttgtagttatttagtaggaatttaagtttaggtttgtaggatgttattttaaaattttggttagggtagggtttttttgggaggtaataagttgagtagaggttttagggtaaggagttagtttttgggaggttttggagtaggaaagggtttataggtgtatttttagtgtgtttaggggtttttgttttttggattttagtttgtttaggaggggaggagagtgggggaggatattttggagtataaggattttatggggatatagatgttattttttttttggtagtagtttaaggatgtttttggttgggagttatttgtaggggtgggaattttttatagtagtaatttttggattttagagttgttatatggtttaggtttggtttttatttttgtaggtgtttattgttggttaaggtttttgttgatggtttaggatttagtagaggttttagggagtagtacgattttattgttggttagaatttttgggttttttttttattaggttgtttatttaattttataaaagtaatagttgttattattttggttattatttagttttattgtagtgaaatagggatttttttaataaggttgtttattgtgtttttgtgtaggagagggtttttagaaatggtagtgtattaaatgatggataggcgattataaaattgtttttttgatatgataagtggttacgaatggcgttaagagggagaggagttttttaatagatagttgatattatttggagttagtaaattataattttttggtaaggtcgagtagaagggtaaatgttggagtttgatttgtatatgattttttttttgcggcgacggattagtaagggaaaattattttaagtgagtatgcgtataattttagtaaatatattgcgtatgcggttttttttaagtgttggtaggttattgcgtatgtagggagggcgtagtagtttatcgaagggaggaattaaggaggagaagaaattttagaattaagttagtgtataaaagtttcgagttaaaggttgagcggggtatttgattttttaattgtattttgttttttttaataaatttttgtttttgttttaaaatttgtttgcgttttttaattgaatttttttttttgagaagataagggttgggagtgttgcggattcgttatcgataatatttttattataaaagtgttattgaaaagattttgaaaaatttagaatttggaatttatagtgtttagaatattgagtagtaaatagtagataattgttaaaggaataaataaattttatgtttatttttatggattttggggttagatggtttggatttgaattttgatttttttacggggtgattttgggtattttgtgatttagtttttttatttttatttgggtttagttagagggtggtatggtaggaggttagatgttagggtatttttttttgttgttttttttagattataagtgtggtagttggttgtgttttttttgataaggttttgtttttggtttttattatttttttgggttgggatatttagatgtttttttttgttgtttgagttttaggaaaaatagtttttggttggtttttttaagtttgttttttaattttagaaatagttattttaattaaattttaagaattaatgtagttggattttttttttttgtttgaattttgttggatataattagtaatattgagtattttttttgtatttatttattttttgtgtaaacgtttgtttttcgtagagagttttgaatttttttttaaagtttgtataggttttttgttaaggttttgtttttaatgggttgggggatttggaataaattttatttttttttgttttttatgttttttttaaatgtagatgagggttggggattaggatagttttttagaaataaagacgtgtaggtaagttttttagggattttgtttagatgtaaattttgatttattatgttttttttggggttgagtttttgtattttaataagttttttggtgagggtgatgttgttgattacggattgtgtttggagtttcgggaataagggattaaatgagtttcgagttttttttaagtttagtagttttttaacgttttattttttttttcgatagttttttatgacggtgtttatatttttgagaatattgatttttgaaagagaatgatgttatgaatttttttagttttgaatttttgtagggtattttggagttgggagtttaatatttatggtagtttttttttaagttatattatttgtagatttgaacgtgtgtttgtgtacgtatacgtatagatatatatatatgagttttgagatatgcgggtttataaaataaaagtagtaacgttagtgacgattttttgtggtttgaaggttgcgtgttttgagatattaggagtttttatggagtagggttggttatgtggataaatagttttttattttagagagtttttatttttatagatggggaaattgagatttagagagggagaattggtttaggttatattgtgagtttattgttgaattggagaggataaatttagagttgtggttagttaggggttttgatttttggggttaggtttatttaggtagatagttttggattatatattgagaattattggtataaatgttttgagttatgtagatgtgggttgaaattttagattatttttaaaataaatatttattgattattaattatgtggtaggtattgggaatattattgtagttagatatagtattttttttgtttttttttttttgagatagagttttattttattatttaggttggatggagtgtag

SEQ ID NO: 2011 - DNA, 6291 bp, Artificial Sequence
  chemically treated genomic DNA (Homo sapiens)
attttggttaatacggtgaaattttgtttttattaaaaatataaaaaaattgtttgggcgtggtggtatacgtttgtaattttaggtatttgggaggttgaggtaggagaattttttgaattcgggaggtggaggttgtagtgagttaagagggtgttattgtattttagttcgggtgatatagtgagattttattttaaaaaataaataaatatatatatatataaaattattttgttgtgatgtttatgttagtggttaaggtagtagtatattagcgagtatagttttaggagatttgttggtgttaggtggtagtgatgtatgatatttttgtttatttttagttgttttacggtgtatgaatatttagtttttttgaatttagtttagggtgatgatgaaataacggttagtttggtggttttgagaggtttttatttatattaatagttgtgttttttgtttgatagttggttttaggtgtagtttttagtaaatttattatttgggtatatgatttgggataaaaatatatttagtttttttatggagattgatagtgatattattgtgttataaggagttttgtgagattgggtttagtttaaaaagttgttaaatttatttgattataaatattttttttatgttagatttgttttttttttttttttttttttgagacggaggtttattttattatttaggttggagtgtagtggtgcgatttttgtttattgtaagttttgtttttcgggtttacgttatttttttgttttagtttttcgagtagttgggattataggtgtttattattatgttcggttaatttttttttatatttttagtagagatggggttttattgtgttagttaggatggtttcgattttttgatttcgtgatttgttcgtttcggttttttaaagtgttgggattataggcgtgagttattgtgtttggtttgtaatatcggttaatattggataagtatttaagaaaaaatttattttgtggtaatttatgtataaataatattttatatagttgttaaaatttttttgtagtttaaaataatttttagtaatttttgtttttttttattaattttttgtatttataattatttgtgttaaagttatttattttttttagtaatataggtttaatatttttaatttttattattttatttttatatagaggtatatatttatgttatttttttttttttttttttttttgagatcgagttttattttgttgtttaggttggagtgtagtggcgtgattttggtttattgtaatttttattttttgggtttaagtaatttttttgttttagtttttcgagtaattaggattataggtgtgagttattatatttagttaatttttgtatttttagtagagatagggttttattatgttggttaggttggttttaaatttttgattttaggtgatttatttacgttagttttttaaagtgttgggattataggtttgagttattgtttttggttatatgttatttttttaaagatagaggatttgggggtatgagggtttgaggagggtggacgttgtttagagaggtgagttttaggttaggggagggcggagtatattttattagtggtttttaaatttggttgtttattggaattatttggtaaggtttttagtttttgataattggggttttttttattatttttattttttaaagattttgatttaattggtttaggtagggtttgggtatggagatattttagtagtttaggtgattttaatgtgtttttagggttgagtattattattttgtattatttgttatttggtagttaggtttgtggttaagttggtaagagttaggtggaagaatattagaagaggtagtaggggtagtttatatagtggtagtgggatgggttgtagtatagatgatttggtggattaatatgaataggtgagtagtatgattaattttggttttaagtattatgattacgtatgagatgatgatggcggtgttaatgaagaagtttttagaggttagatattttatttttttatagtggatgatgggatgtttttgtatgttgcgttttattatttgtggtagttatgttttatagttattgtgaatattgaattagcgaatatcgagttattgttttttaggtttttgtgagtttttggatataatatttttattatattatgattaatatataattttatatggtgtgtgtttttgtttaatggatattttatttaatatatggttgatttattatattgagtttataattaatagtatagtagtttttgtttgtaggacggttttttagtgggtacgttatagtttttggtgtttagtaataatagatagtattttagtaagttttacgtttcgggttatttatttttatttttattttttttaatttttttattgtggggggggttttacgatattgtttaggatggttttgaatttttgagttcgagtaatttttttatttcggttttttaaagtgttgggattataggtatgagttattgagtttagtcgtttgggggttattttaaatagtaaaattattaataaaaagtatagaagtgtggaaagtataaattaaatggatagtaaaaagaatataagaaggtagagtatcgttttgttttattatagttgggagggtgtgcgtggggtaatttaagatttttattgttttgggatgtgtatatttatgagtgattgggaaaatattttaagtattgattttgagattataaatatattttagtaagtagataagtttataaatatgatatttgtaaaaatgaggatatattgtatataacgtatttataatatcgattttttttgtttcgtttatcgtatttttttttttttttaaaggtttatttattttgttaaggagttttaattgatttgtattttgtttttgattattgttttttgtgtttaatttagagaaaattggtgagataaattagttattaattaattaattaattaattaatattaatgaattattttaaagtatttaatataatttttgggaggtagagtggggaatagataaatataaaaggtagtgtttttttaaaaggagtttattagtagttgaggagataagtttaatatgggtaaataatgttaaaaagtatttaggtttagtttaaaataatgttgtatattatatatgttatagatgttttaaaaagttgtttattaataggagttttaaataaaatttttttgagaaatagaatttttatgggatattaagaaggaaagatagatatggagaatgattgaatgaagtatttagtaagtataaatgtagtttaagaagtggaaattagtatcgtatcgtttttttttaaataagaatgaagagatgaatttagtgaggataattttgtgaggagttagggagttggggagttggttgtaagtttaggtaagtttgatgatgttttgttttttattttgagagatattttattaaaaatattgatagatatttttgatagattaattaatattaaacgtttttgaattttatttttatttgttatatacgtttagttaggattttaaggatttattagtagtagtagaaattttaatgtagggttaatatatttgagaggttatttttaagaaaagtttaggtaataggtttttaggtagtgaattattttgtaggatttattgttttttgttttattttgttttgttttgttttttttttatttttttatttttttttataggatttttgataggttttaattatatatttttttatgggtatttttatgggtaatttattttttttttttagtagtaaattaataattatatattagtgaatattataggtataaattatttttttttttttaaggaattagtatgtaaattttagtattttttttttagtaataaataattgttgtattagattgtgttataaggtagttgttttgatttattgttttgtagttggggttagtttttttagaatattgttaatgagagaaaggaagtgttttgggtagtgtttggtttattaggttttttgtaaatgtttgttattaatgtaatgttgagattttagtgaatagaatttggtttagaagaagtgggtatttacggtgttcgagtttaattttatattttggatttgtaagtggtatttattgagttgaatatgagtttgagtacgcggttatatatttttttagtaaatattggttaggtattagttgttacgtgtaagtattgttttatatgttgggacgtagttgtagtaggaatgaaataacgttagtatttttgtatgcgggtagtgcgggttttgtatagaaaggtatacgagataggtatttttatatttattgttttgggaggaaattgaggttttgagaaacggagaatttgtcgggttatttgattttacgttatttttttttttattaatgttttgaatagttttttgtatatttttaaggaatttattttgtaatgattattaagaatttagcgagatttcgagtattatttcggtatatcgtattttttttttagagaatttttaatgttggaagggattagagcgtatttttttcgtttttgggagtattttttttttaataatattttggggatgggtcggaaggaaaggaaaggagacgcgagaggtgtagtcgatgtgtttgcgaagtttaggtttttttggagattttttcgttcgtttttataggagaaggttggttcgggttgttttatttttcggagttgtagattgagtcgttaggtttttgtgtttttaaagttttgcgcgacggttatattaaatatttaaattttgggtagggattaaacggttattttttcgtttttcgggtttaatatgtaaattcgagtattaggaagtagttgggatttttcggtcgagtttagagatagttagtttttttttcgtcgcgtcgggtcgcgttgtcgttcgtttttcggtcgtggcgttttcgggttagacgcgttgtagtttttagttcgcggtaagcggggcggtcgcgttattttcggtttcgcgttagtagtttttcgtcgcgcgtttagcgttttcggttagtagtttttttatacgtaggttttgttgggtcgtttcgtcgcgttttttattttgaatttaagttatcgtggagtttcgtcgtttcgaaatttttatcgcgagcgggtgagttttttgcgcgagtttaagggtgggcgcgggtacgcgggtagtgggtgtaggggtcgcggttgtgttattagtcggagtttcgggcgtagggtagattcggggtcgggggtatcggcgcggttcgcggggcgttttttggtcgtatcgtttttgggtttcggcggcgaaggtttttagatgtttttagtcgacgggtgatcgggttcgggggagttagggcgcggggattgaggtttcgtaggtgttcgtcgcggagtcgcgtaggggagcggtgggaggtgcgggcgcgggggcgggttttcgcgtgtttttttcggtgagggttcgagggtcggttgttgtttttgtttcggtcgtttttcgtatatagtggggaagtcgttgtttttgcggagcgggcgcgcggcggggatattggagaggatttttcggattgtgtaatttgattttttttttggattttgggttttttggtagtgggagatggggttcggtcggcgttttttcgaggttcgcggatagttgttttttttggtggtttcgggtaggagcgtgacgtcgaggggttgtagcggaggttggaatttattttttcgttgcggcgtttttcggtttgtcgaggagtagttcggtgtttttgtcggttgagaggaagcgagagttattttaagaatttaggggttgtttttttttcgttttgggggaagggcgtaagagttagtttttatttttttgtattttttgggtttatggtggtattttttgtttgcggtgtattcgtaattttttaatagtttgtttgttatgtggattagcggttgtgtttttgtatattcgagtgtgttaattattttaaattcgttttttttcgttagtttagaatttaggttttgtatttttttggttgtatatttaggggatcgattattgaaattttttgtttgagtttttttatttttgagagagtatatatattttaggggttgtttagtat

SEQ ID NO: 2012 - DNA, 6291 bp, Artificial Sequence
  chemically treated genomic DNA (Homo sapiens)
gtattaaatagtttttgaggtatatatgtttttttaaagatgaagaaatttaaatagggaattttaataatcggttttttaaatatatagttagaaaagtgtaaggtttagattttgagttggcgaagaagggcgaatttgggataattaatatattcggatatataaaaatataatcgttaatttatatgataggtaggttgttggaaagttacgaatgtatcgtaagtaaaagatgttattatgggtttagagaatgtaggaaagtgggaattgatttttacgttttttttttaaggcgaaggaaaggtaatttttgaatttttaaaataattttcgtttttttttagtcggtaaaagtatcggattgtttttcggtaggtcgagaggcgtcgtagcgggagggtgagttttagttttcgttgtagtttttcgacgttacgtttttgttcggggttattagggagggtaattgttcgcgggtttcgagagggcgtcggtcgagttttattttttattgttaggagatttagggtttagaggggagattagattgtataattcgaggagttttttttagtattttcgtcgcgcgttcgtttcgtaagggtagcggtttttttattgtgtgcgagaagcggtcggagtagggatagtagtcggttttcgggtttttatcgggaaggatacgcgggagttcgttttcgcgttcgtattttttatcgtttttttgcgcggtttcgcggcggatatttgcggagttttagttttcgcgttttggttttttcgggttcggttattcgtcggttgaagatatttaagagttttcgtcgtcggggtttagaggcggtgcggttaggaagcgtttcgcgggtcgcgtcgatgttttcggtttcgagtttattttgcgttcgggatttcggttggtggtatagtcgcggtttttgtatttattgttcgcgtgttcgcgtttatttttgggttcgcgtagaggatttattcgttcgcggtgaaagtttcggggcggcggagttttacggtgatttgagtttagagtggggggcgcgacggggcggtttagtaggatttgcgtatggggaggttgttggtcgggaacgttggacgcgcggcgaggggttgttggcgcggggtcgggggtggcgcggtcgtttcgtttgtcgcgggttggaggttgtagcgcgtttggttcggaggcgttacggtcggggagcgagcggtagcgcggttcggcgcggcgggagaggaattggttgtttttgggttcggtcgagaggttttagttattttttggtgttcggatttgtatattgagttcggagggcggggaagtgatcgtttggtttttgtttaaggtttgggtgtttggtgtggtcgtcgcgtagggttttgaaggtatagaaatttggcgatttagtttgtagtttcggggagtggagtagttcgggttagtttttttttgtagggacggacggaaggatttttagaggagtttgggtttcgtaggtatatcgattatatttttcgcgttttttttttttttttttcgatttatttttaaggtattattaggaagggggtgtttttaggagcggaggaggtgcgttttgattttttttaatattaggggttttttagagaaaggatgcgatatgtcgaggtgatgttcggggtttcgttgagtttttaataattattataaagtaagttttttaagggtgtataggaggttgtttagggtattgatgggggaggggatgacgtagagttaaatggttcggtaagtttttcgttttttaaagttttagtttttttttaggataatggatgtgaggatgtttatttcgtgtatttttttgtatagggttcgtattgttcgtatgtaggaatgttggcgttattttatttttattatagttgcgttttagtatgtagggtagtgtttgtacgtagtagttggtgtttaattagtgtttgttgaaagaatgtgtgatcgcgtgtttaagtttatgtttaatttaataaatgttatttataaatttaagatgtaagattaggttcgggtatcgtggatatttattttttttaagttagattttgtttattgggattttagtattgtattaatagtaaatatttatagagggtttgatgggttagatattgtttaaagtatttttttttttttattaataatgttttgaagaggttgattttagttatagagtaataagttaaagtagttgttttgtgatataatttgatatagtagttatttgttattaggaaaagagtattaaagtttgtatattaattttttaaaagaagaaaggtggtttatatttgtgatgtttattggtatgtagttgttagtttattgttgaagagaaggggtgggttgtttatggaaatatttatgggaaggtgtgtgattgaaatttattaagaattttatggagaaaaatagaaaaatgaaaaaagaataaaataaaataaaatgaaataaaaaataatgaattttatagaataatttattatttgagggtttattgtttagattttttttaagaatgattttttaaatatattaattttatattaaagtttttgttgttattgatgaatttttgagattttgattaaacgtgtgtggtaaataagaataggatttaaaaacgtttggtattggttaatttattaggaatgtttgttagtgtttttggtaaaatgttttttagggtaaggaataaagtattattaggtttatttgagtttgtaattagttttttaattttttaattttttataaaattgtttttattaagtttatttttttatttttatttggaaaaaaacgatacgatgttaatttttattttttaggttgtatttatatttgttgaatattttatttaattattttttatatttgttttttttttttaatgttttatgaaagttttattttttaggaaagttttatttaaagtttttattgataggtaattttttaaagtatttgtagtatgtatggtgtgtaatattattttaaattagatttaggtattttttagtattgtttgtttatgttaggtttgtttttttaattattggtaaattttttttgggaaggtattgttttttatatttatttattttttattttattttttagaaattatgttgggtgttttaaaatagtttattagtattgattgattggttaattgattgatgattgatttattttattagttttttttaaattgagtatagaaggtagtgattagaggtagggtgtaaattaattaaggttttttgataggatagatgggtttttgaagaaaggaaggaatacgatgggcggggtaagagaagtcggtattgtaaatacgttatgtatagtgtatttttatttttgtagatattatatttgtgaatttatttatttgttaaaatgtatttgtaattttaaaattaatatttgaggtgtttttttagttatttatagatatgtatattttagagtagtaaaaattttgagttgttttacgtatatttttttagttatagtggaataaggcgatgttttgtttttttgtattttttttgttgtttatttagtttatgttttttatatttttgtgttttttgttggtgattttgttgtttaaaatggtttttaagcgattgagtttagtggtttatgtttgtaattttagtattttgggaggtcgaggtgggaggattgttcgagtttaggagtttaagattattttaggtaatatcgtgagattttttttataataaaaaaattaaaaaaaataaaaataaaaataaatggttcgaagcgtagagtttgttaaagtgttgtttgttgttgttaagtattagaggttgtggcgtgtttattggagaatcgttttgtaggtaggagttattgtgttattggttgtgaatttaatgtaatgaattagttatatattaaataaggtgtttattaaatagaaatatatattatataaggttatgtattaattataatgtaatgaaaatgttgtgtttagagatttataggaatttaagaagtagtgattcggtattcgttaatttagtgtttatagtgattatagaatataattattataaataatgggacgtagtatataagagtattttattatttattgtgggaaaatgaaatatttgatttttaggaatttttttattagtatcgttattattattttatgcgtggttatggtgtttgaggttaggattggttatgttgtttatttgtttatgttggtttattaaattatttgtgttgtaatttattttattgttattgtgtgggttgtttttgttgttttttttagtatttttttatttaatttttgttaatttggttatagatttaattattaagtagtaaataatatagagtagtggtgtttaattttgggggtatattagaattatttgagttgttaaaatatttttatgtttaggttttatttagattagttaaattaaagtttttgggggatggggatggtgaggggaattttaattattagagattgaaaattttgttaggtggttttaatgagtagttaagtttgggaattattggtggagtgtgtttcgtttttttttagtttggagtttatttttttgaataacgtttattttttttaagtttttatgtttttaggttttttgtttttaagagagtagtatgtggttaggggtagtggtttaaatttataattttagtattttgggaggttgacgtgggtggattatttgagattaggagtttgagattagtttggttaatatggtgaaattttgtttttattaaaaatataaaaattagttgggtgtggtggtttatatttgtagttttagttattcgggaggttgaggtaagagaattgtttgaatttaggaggtggaggttgtagtgagttaagattacgttattgtattttagtttggataatagagtgagattcggttttaaaaaaaaaaaaaaaaaaaaaagtagtatggatatatgtttttgtgtgagggtaaagtggtaaggattgagaatattaaatttgtattattggggaaaatgggtgattttagtataagtgattatagatataaggaattaataaagaaaaataaaaattgttaagaattattttaggttataaaaaaattttaataattatatgaaatattatttatatataaattgttataaggtagatttttttttaaatatttatttaatgttaatcggtattataggttaggtatagtggtttacgtttgtaattttagtattttgggaggtcgaggcgggtagattacgaggttaggagatcgagattattttggttaatatagtgaaattttatttttattaaaaatataaaaaaaaattagtcgggtatggtgatgggtatttgtagttttaattattcgggaggttaaggtaggagaatggcgtgaattcgggaggtagagtttgtagtgagtagagatcgtattattgtattttagtttgggtgatagagtgagttttcgttttaaaaaaaaaaaaaaaaaaaaaataggtttgatatggagaaagtatttatggttaagtaggtttggtaattttttgagttgaatttagttttataaagttttttgtagtatagtgatgttattgttaatttttatgaaggagttaagtgtatttttgttttagattatatatttaggtgatggatttgttgaaagttgtatttgggattagttgttaagtagaagatatagttattgatgtgaatagagattttttagagttattaagttagtcgttgttttattattattttaaattaaatttagaaaagttgaatgtttatatatcgtaagatagttgagagtgggtaggaatgttatgtattattgttatttggtattagtagattttttggaattgtgttcgttgatgtgttgttgttttggttattggtataggtattatagtaaaatagttttgtgtgtgtgtgtgtttatttattttttgagatggagttttattgtgttattcgggttggagtgtaatggtatttttttggtttattgtaatttttatttttcgggtttaagggatttttttgttttagttttttaagtatttgggattataggcgtgtgttattacgtttaggtaatttttttgtatttttagtagagatagggttttatcgtgttagttaagat

SEQ ID NO: 2013 - DNA, 6277 bp, Artificial Sequence
  chemically treated genomic DNA (Homo sapiens)
tatagtttgaaatttatttggggttttattttttggtgtgttgagaagatatgacgagttggtttatatgtttttaacgtttttataatattgatttagttgtatttttgtttaaagtagtattttagtttttttgatagtagagatttaagataatgaggtgaaaaaaaatcgtaagatatttaaattattattaataaaaattattttatggaattttatattataagaaaattagtttagatttttttaatgtaagaagttttatttttttttttttttttttttttttttttttttttttttgagacggagttttattttgttgtttaggttggagtgtagtagcgtgatttcggttcggtttattgtaattttcgttttttaggtttaagcgatttttttgttttagttttttgagtatttgggattataggtgtgtgttattacgtttagttaatttttgtatttttagtagagacgggggttttattatgttggttaggttgttttcgaattggtgatttcgtgattcgtttgtgttggttttttaaagagttgggattataggtgtgagttattgtattcggtttggaagttttattttttatatgtaatggggtttagtatgttttatttatatttgaataattttaggagtggggattataattgtttatttttttgtattgataggtatttttttgtttaattttttttgagttagaatttgattataaattattattagttttcgttttttttttataattataaagaggaagttagtttattcgttaaataagtattagttattatatttttgaatttttgttttttttattgtgtatattttttcgtttttttgtttttgtttttttaggaagaagtattagtatttttttttatttaagtttattttaaagttaattttatagtttttgtttttgatatttgttttttttttttttttttttaggaattttgttttattttttggttttttttagttttagtttataaatatatttattttattttttatttaatattgtttatttattttaaaagatagttttattttttatttttttgttattattaaatttatggaaagaattgtgtatggttattatttttagtttttttttattttttatggtaatttatttgttttttttttttttagcgtttataggaatttatttttgaaggatagtaatgtttttgaaatgattttattagttagtaggtttttttattttttgtagtatataatattgagtgttgtttttttttttgttttggtattttcgtttagatttttagatgtagaggttttttggttatttttttatttttttaattgattttttgtattatttttttttttattcgtttggtttttataaaaataaaataaaatagttttttttaaggtagtatttttagattatttttttttttagcgtgttttttttttttaggtaaatttatttgattttacggttttatttatttatgtttaatagagataatttcgagagtttttatttttagtttaattttgatttatttttataattttattttaaggtttttgttgaatatttttatttgaatattttgatgttattttaaatttatgatattataaatttaatttttttttaaagttatttattttttggaatttttaattttgttgaggatattattttaattttaattagttaagttttagatttataagttgtttttaagtttttttgttttttttataatttttatttattttttttttgtttgtttttttttatttttattgttttttttttttttttttttttttttttttttgagatagagttattttgttatttagggtggagtgtagtggtacgattttgacgtattgtaatatttgttttttggtttaagtggttttcgtgttttagttttttgagtagttgggattatagttgggattatatggtgtatattattatgtttggttaagtttagtattattattatttttttttgagatggtgttttattttgttgtttaggttggagtgtggtggtgcggtttcggtttattgtaatttttattttttaggtttaagcgatttttttttttagtttttcgagtagttgggattataggtatttgttattacgtttagttaattttttttatttttattagagatagggtattattatgttggttagtttggttttaaatttttgattttatgattttagtagagatagggttttattatgttggttaggttggattttgaatttttgattttaagtgatttgttcgttttagttttttaaatgttgggattataggtatgagttattatgttagtcgtttttttttaatttaggtttttttaattttttgttgaattgttttgatagtataatcggtatgtttattttttatttttaatttattatatttgttgttgttagattgtggtggagttgaattttatgtgaagtataagtattgaagtatttaagttattgtttatgaagaaaattttatataattaatattatttttgaaaatgttttatattgtttataaagtagaatttatagatattgttttttagtaagtttaatattgttagttttttttttatttttggaatagattattttttttttggttgaatattagatgaagttatttgtttggttttaggggtagagtcgtatgaaaaatatgtatttttaaatattagaattatatttaatattagtttatttgagtttatattagttatttatgagtgtgatttaaatttattggaatatttaaaagtatagttttgatttttattatttttatgttaaaaaatttttagtggttttttattgtttattgagaaggtttatttttttaatatggtatttaaaattgtttattgtttgatattaattttttttttttatttagtttatgttttagaatggaatgtttgtgatttttatgttcgttttgtatattttagtttttatttatatttttttttatagtggtttggaacgttttttttttattttttatttttgttgggtttagttattttttataggttaatttatatgttgttttttttaagatttttttatagaattttttttttagattttgtttagttaaaatcgtattttttttttttgaattgtagtcgttttttatttgtattgtgtttatggtaagtattattttttatttagaattgttatttttgtttatgttttataagtttataaatatttttagggtaggggtagtgtttgaattttttttatagttatgtatatattattatttttagttttaaatatgtagtttttaatagattttaatgaaaagataaattaaataatgtagttttttattttttttttatgtagaatgtgttttagtttggtagtgtttaaggatttgggatttagtgttttagaaagagtagtaaattttttttaattttagtagtatttttattaggtaatgaatgaatttaataagaagggggatgggtaaaacgttatatgtaaatagttgtattttgtttttttttaaagagtaaaataaatatgattttttaaaaagattatggaagttgataatataatggtttttttatagaaggttttaggatatgttaagttttgttattggggatggagatattttgtttttattgtgtagaaagagattgatgaggttttttaagtaatttcgtagatttattgttttgaagtattagaatatttttttgtgtattttaaatttattggaattttaagtttgtggagagaaaaattttagtttttttttttttttattttattttttttttaatagatataggatgttttatttcgggaatttaaagttgaaggggagtttagattttaggggtgtattgggtataatagttttttgaattttttttgaattatattttatattttataaatataattttattttcgtttaattaaggaaggtttgggggttggggagtttatttgatattttttaagggatgggggttgaggagtttatttgatattttttaagggatgggggttggggagtttatcgatattttttaagggatggggtttttatttttattatggatatgtagaaaatgtattttgttttagtgatagatagagggagtttgatattgaatttatattcgtagcgttgattttagattgattagggaaaatgattgttttgtatttttgtaaaattttaatgtttcgtgagaagtgtatcgtgttgtttgatgtatagtgtttaggtttgttttgattttattaaattatggaaagcggtttttatgagggaagtttttttttttttttttttttttttttttttttaattttttgtacgattatttaggtggttttttttgtttttatttttttttttggattcgggtttttaattattattgtagagaattggaaggatgtttgttttgtttttttagtacggttttttttgttcggtttttaggttattcgtttttatttttttttttttttagtttcgtttttttcgcgtatttcgtggttagtagttagatagttgtgtttaattagaaattatttataattttagacgattcgaaggggaaatttcggcgtgaagtgtagtttcgtttcggttttttttagttttttttttttttttggaattcgaggcgcggatttttttcgttttatcgttttagttttttcgggagttcgtcggtgttttttagggtgtcggttcgtgttgggaagtgttttttattttggtaatggggggcggcgaggtatcgtaggagtggcgaggcggcgtttagggtggtattgttcggaacgggggttggtgcgcgcgggagggttttcgcgcgggttcgtcgttgtcgtagttgcgagcgcgtcgcgttatcgagttttttgtagtaatggttcgttcgtgaaacgcgagttacggttgttttttttaagagtgtttgtatttttcgtttgcgtttcgtaattgttttgggtgaaaatggttgtttagattaaaatgtggtagaagggattaagtagtggatattgagtttgtgaagtttaatttttaagtttcgagatttgggggattgagagtttagttttgaaaagtgtattatgaatttcggagttgttatgaaatatggaaacgatttttcggtcgagttgagtgaggtaagaaatagttgaggtcgggagttagggtttttcgggcgtttgtttttttataaattttttttttttcgatttttttatagttttatattttatttttttgtgtttttagtttggaggtagcgtaattgaagattagtagattttttggattttgttttaatttgtagtgttatttaggaaatgatttgaattggtttgatattttagtttgaaatgagtggtttaaaaaagaaataattttttattaagtcgcgaggcgttttatttacgatagtttgtattttttgtttttttttattcgtttttattaatttatatatatttttttatttttttgatcggtaaaatatacggatattttcgatgagtttaagtcgacggtaattaatttggtgggggtggtggtggtgagggggacgtattggattattttattttttatttggtttttacgtgcgatgcgtttggttacgtttaggtaaggtggttttttttttaggttgagatgaatgattcgcgttggggaggggtttggggagaaagtattttaaagtcgttttagaattttattttttgttcggatttggatttttgagtttttgaggtaagcgtatttgtaatttttgggtttttattgtaatttatttatttgagtgtttgagattagttttgaaattaaagttatattaaatattatgtaaatgtgtgagcggtaagatgtttaaagttatttttttttatgattttagggatgtttcggtatattttttaaagttttgaatatttgaaaagtgatgagaagttcgtagaattgggtgttgaaaagaagaggaagtttgtgtgtttagtgtttatagttagaggtttggtgtttgtgggttttttttttggttttattattgagttatttatgggggtaaaagtagtataagtagttcgtgttttttgagtatggttgaagagaggaaagaggaagaaaaggaaaatagtgtaaaag

SEQ ID NO: 2014 - DNA, 6277 bp, Artificial Sequence
  chemically treated genomic DNA (Homo sapiens)
tttttatattgtttttttttttttttttttttttttttttagttatatttaagaaatacggattatttatgttatttttgtttttataaatggtttagtgatggaattaagagggaaatttatagatattaagtttttagttgtagatattaagtatatagatttttttttttttttagtatttagttttacgggttttttattattttttaggtatttaaagttttgagggatgtgtcgaagtatttttaaaattatgaaaaaagatggttttgggtattttatcgtttatatatttgtatagtgtttgatgtagttttaattttaaagttggttttaaatatttaagtggataggttatagtgggagtttaggaattgtaaatgcgtttgttttaaagatttaggagtttagattcgggtaggaaataaagttttaaagcggttttgaagtgttttttttttagatttttttttagcgcgggttatttattttagtttagggaagagattattttgtttgaacgtagttaaacgtatcgtacgtgggagttaagtgggagatgaaataatttaatgcgttttttttattattattatttttattaaattagttatcgtcggtttaaatttatcgggaatgttcgtgtattttatcgattagggaaataaaagggtgtatataaattagtggaagcgggtgggaaggaataagggatgtagattgtcgtgagtaaaacgtttcgcggtttggtgagaggttgttttttttttaagttatttattttagattgaaatattaagttagtttaggttattttttgagtagtattataagttaaaataagatttagaaaatttattaatttttaattgcgttgtttttagattgggagtatagggggatagggtgtagggttgtggggaggtcgaggggagggggatttgtggaaaagtaaacgttcgagaaattttagttttcgattttagttgttttttattttatttagttcggtcgaggagtcgtttttatattttatggtaatttcggaatttatgatgtattttttagagttgggtttttagttttttaggtttcggagtttaagagttggattttataggtttaatatttattgtttggttttttttgttatattttagtttagatagttatttttatttaggatagttgcgaagcgtaaacggaggatgtaggtatttttaaaaagagtagtcgtggttcgcgttttacggacgagttattgttgtaggaggttcggtggcgcggcgcgttcgtagttgcggtagcggcggattcgcgcggggattttttcgcgcgtattagttttcgtttcgggtagtgttattttgggcgtcgtttcgttatttttacggtgtttcgtcgttttttattattaggatggagggtattttttagtacgagtcgatattttagagggtatcggcgagttttcgaaaaaattagggcggtggggcgaggaagattcgcgtttcggattttagagaaggaaagaaagttagagggagtcggagcggagttgtattttacgtcgaagtttttttttcgaatcgtttggagttgtaagtggtttttgattgaatatagttgtttagttgttggttacggggtgcgcggaggaggcggggttagagggagaaaagggtgggggcgagtagtttggaggtcgagtagaggagatcgtgttgggagagtagagtaggtatttttttagttttttgtaatagtaattaaggattcgagtttaggagggggagtagaaataggaaaagttatttgaataatcgtgtaggaaattaaaaaaaaaaaaagaaaagaaaaagaaaaaaaattttttttataggagtcgttttttatgatttaataaggttaagataaatttaaatattgtatattagatagtacggtgtattttttacggaatattaagattttataagggtgtagggtagttattttttttaattagtttaaagttaacgttacgggtgtaaatttaatgttaaattttttttgtttgttattggggtagagtatattttttgtatgtttataatgaagatagaggttttattttttgaaagatgtcgataggttttttaatttttattttttgaaagatgttagataggttttttaatttttattttttgaaagatgttagataggttttttaatttttagattttttttaattgagcggaggtagagttgtatttatggagtgtggagtatgatttagaaaagatttaaggggttgttatatttagtatatttttgggatttgagtttttttttaattttgagttttcgaggtaaaatattttgtgtttattgggagagagatgagatgggggaagaggggaattaggatttttttttttataaatttaaagttttaatgaatttgagatgtatagaaaaatgttttgatgttttaaaatagtaggtttgcgagattgtttaagagattttattagtttttttttatataatggggataaaatgtttttatttttaataatagaatttggtatattttgaagttttttgtgaaaaagttattgtattgttaatttttatggtttttttaaaaaattatgtttattttgttttttaagaaggggtagagtgtaattatttgtatataacgttttatttatttttttttttgttgagtttatttattgtttgatggaggtgttgttgggattaggaagagtttgttgttttttttagagtattgggttttaagtttttgggtattgttaaattagagtatattttgtatggggaggagatgggaagttatattatttaatttatttttttattgaaatttgttgaaaattgtatgtttgaagttggaaatggtggtatatatataattatgaagaagatttaagtattgtttttgttttgaaggtgtttatagatttgtaaaatatgaatagaaatgataattttagatagaaaatgatatttgttataaatatagtataaatgaggagcgattgtagtttagaggagggaaatacgattttggttggatagggtttggagagaagattttgtgaaggaattttagaagaggtagtatgtgagttgatttgtgaagaatggttgagtttagtagagatgggaagtaaggggaaagcgttttaggttattgtgagagaaagtatggatggagattggaatgtgtagagcgggtatggggattataggtattttattttggagtataagttgggtgagaaaggggggttggtgttagatagtgaatagttttaagtgttatgttaaaaaaatgggtttttttaataggtaatggagagttattaaaggttttttagtatagaaataatggagattagagttgtgtttttagatattttagtagatttaaattatatttatgagtaattaatatgaatttaaataggttagtgttgaatgtgattttggtgtttaaagatatatattttttatacgattttatttttaaaattaagtagatgattttatttggtgtttaattaaaagaaaagtaatttgttttaaaagtagaggaaaaattagtagtgttgaatttattgagaagtagtgtttgtagattttattttatagataatataaggtatttttaagggtaatgttgattgtatgagattttttttataaataatgatttgaatattttaatatttatattttatataagatttaattttattataatttggtagtagtagatgtagtaggttgaaagtgggaaatgaatatgtcgattgtattattaagatagtttagtaagaggttaaaagggtttgaattaagaagggacggttggtatggtggtttatgtttgtaattttagtatttgggaggttgaggcgggtagattatttgaggttaggaatttaaggtttagtttagttaatatggtaaaattttgtttttattaggattatgaggttaagagtttgagattaggttggttaatatggtgatattttgtttttaataaaaatagaaaaaattagttgggcgtggtggtaggtgtttgtaattttagttattcgggaggttgagaaggagaatcgtttgaatttgggagatggaggttgtagtaagtcgagatcgtattattatattttagtttgggtaatagagtgagatattattttaaaaaaaaataataataatattaaatttagttaggtatggtggtgtgtattatgtagttttagttgtagttttagttatttaggaggttgaggtacgagaattatttgaattaggaggtagatgttgtagtgcgttaagatcgtgttattgtattttattttgggtgatagagtgattttgttttaaaaaaaaaaaaaaaaaaaaaaaaagaagggataatggaaataggaggggataggtagaaagaaagtagatggaaattgtggagaaaataggagagtttaaaaataatttgtagatttagaatttggttgattggggttaaggtaatgtttttaataaaattaggaattttagagaataaatagttttgggaggaaattaggtttgtggtattatgagtttgaggtggtattaggatatttaaatggagatgtttagtaggagttttgaaatggaattatggagataagttagggttgagttggagatggaggttttcgaggttatttttgttagatataaataaataaaatcgtgaaattaggtaaatttgtttaggaagagaggatacgttgaaaagaaaagtggtttaaggatattattttaaggaaggttgttttgttttgtttttatggaggttaaacgaataaaagaggaaatgatatagaaggttaattagggaaatgggaagataattaggagatttttgtatttgggagtttaagcgaagatgttaaggtagaaggaggagtagtatttaatattatatgttatagagggtagagaagtttattgattgataaggttattttaaagatattattgttttttaaagatagatttttataaacgttgaggagaaagaaggtagataaattattatagggagtgaggagaaattgggggtagtgattatgtataattttttttataaatttgatggtgataggaaaatgggagatgagattattttttggagtagataagtaatgttgaatagagagtagaatgggtgtatttgtaagttggagttaagggaaattaggagatggagtaaagtttttaaaaagggagaaaaggggagtaggtgttaaggataaaaattatgagattagttttggagtaggtttggataggaggggatgttgatatttttttttaggagaatagaaataagagaacgagagagtgtatatagtagggaagataagaatttagagatataataattaatatttatttgacgagtaaattaattttttttttgtaattgtgaaggggaaacgaagattaatgataatttgtaattagattttgatttaaggaaagttagatagagaaatgtttgttaatgtaagggaataagtagttgtgatttttatttttgaaattgtttaagtataggtgggatatgttgaattttattgtatgtaaagagtagggtttttaggtcggatgtagtggtttatatttgtaattttagttttttgggaggttaatataggcggattacgaggttattagttcgagagtagtttgattaatatggtgaaattttcgtttttattaaaaatataaaaattagttgggcgtggtggtatatatttataattttagatatttaggaggttgaggtaggagaatcgtttgaatttgggaggcggaggttgtagtgaatcgagtcgagattacgttattgtattttagtttgggtaatagagtgagatttcgttttaaaaaaaaaaaaaaaaaaaaaaaaaaaaaaaaaaaagagtagggttttttgtattgagggagtttagattggtttttttataatgtaaaattttatgaaatgatttttgttggtggtaatttaaatgttttacgatttttttttattttattgttttggatttttgttattaagaaagttaagatattgttttgaataagaatgtaattgggttaatattataagaacgttagaaatatatggattaattcgttatgtttttttaatatattaaagaataaagttttaagtaggttttaggttata

SEQ ID NO: 2015 - DNA, 10039 bp, Artificial Sequence
  chemically treated genomic DNA (Homo sapiens)
tgtatttaaatgaaaggtaaagatgttgttggttatttggtggatttaaaagagggttgtggttggagtagttgaaatttttttttaggaagagtagttatttgagtatagagtttaaggtatattgtgtgtttataaggattttaggagtgagtataaaagtagggtgaggtaaggaaggaagaaagtaaattaagagtagtgttatttatgaattggttataagatttttaagaaatttagttggttatataggaatatatgaaattattttttagaaatttttttaggaaggaagggtgagtaatatatttgttagtgattttttgtttttttttttattggaataagtttgtttgttttattaagtgttaatttttttttatttttcggttgttgtttagttttttaagtagttgttagataagttagagttttaggtggtagatttataggaattgtagtttatggttttttgtttgttttgtaaataaagttttattggtatatagttatatttatggatttatgtattggttggttttttttttttttttttttttttttttttttttttttttttttttttgtttttgttttgtcgtttaggttggagtgtagtgaatttttgattttaggtgatttgttcgttttagttttttaaagtgttaggattataggtgtgagttattgagttcggttttttttttttttttttttttttttgattgggggaggtgggggatagggtttttttatgttgttttaggttggttttgaatttttgggtttaaataatgtttttattttggttttttaaagtattgggattatagatataagttattgtatttggttatgttttgtttatattaatttaagtattagtaaaatttatttggaaggtttattttgaatattaaatgagataatgaatgtaatatttaaagtatagtgtttgtttatattttataaattattttattatttaaattttatttattaggttgggcgtagtgatttacgtttgtaattttcgtattttgggaggttgaggcgggcggattatttgaggttaggagttcgagattagtttggataatttggtaaaacgtcgtttgtattttaaatataaaaaatagttaggtgtggtggtaggtgtttgtaattttagttatttgggagtttgaggtaggagaattatttgaattcgggaggtagaggttgtagtgagttgagatcgtattattgtattttagtttggatgatatagtgagattttatgttaataaataaataaataaattttatttattatttaaatttaaattattgtgaatggtagtttttttatttaggttgtttttgttatttatttgtttttagttattttttttattggattttaagggatatttgagttttattataaattttatttttttggttgagatatttcgatgttaggggatttattatgaaaaataaattgtttgggagagaaatttaggaatcgttttttagtagttgattaagtgtatttgattaagtgggaatggtgggtaaatggtggattgtggaatgagagaaagttaagatgatggagtatttttagggaatagatgttttaggtagtttaaattgtgaaaatggagagcgaatttaggtgttaaattgggaaggagggaaaaacggaggaagggtttatgtaaaaatagatgtatttttatgtatttaaagatcgattgtttttgtatatatattttaaagtttatatttagtatcgttatttttgtattttttatatttacgaaatttttagatgtttttgttttttaagtgtgtgcgtgtgtatttgttttattttttttagatttgtagttgtattgttttatgaaaagttttgttaggttaggtatgatggtttatgtttgtaattttagtattttgagaggttaaagcgggtggattatttgaggttaggagtttaagattagtttggttaatatgacgaaatttatttttattaaaaagataaaaaattagttgagtgtgatggtatgtgtttgtggttttagttgtttaggaggttgaggtatgagaattatttgaatttaggaggtagagattgtagtgagttgagattacgttattgtattttagtttgggtaatggagtaagattttgttttaaaggaaaaaaaaaaaaaaagtttgttattttagtttatttaagttggagtttggtggtgtaattatagtttattgtaattttaaatttttgggtttaagtgatttttttattttattttttttagtagttgtaattataggtgcgtagtagtacgttttgttaatttgagatgtgtcgtttttttttagggatagtaggattggtttttttttgggattttatagaaggtaggtaggaggttttattgttagataggaagtagagttttatttaataataatgagttgtaaattttattattttaaaagatgttgtttttagaggaagacgttagagatgggtttttattatgttgtttaggatggttttaaatttttgggtttaagtaatttttttgttttagtttttttaagtgttgagattataggtgtgagttattgggtttagttttttatattaatttttagtttttttttattttgatgatagggttttaaatttagttttatatttatgtttttgtatttttattttgaggtttatttttattattgttatttgtgttatggttttaggaatttgtatttatatttatttttttattgatgagattttgattattgagtttgagtagtgggtattagagttagttagagttttttggagagtatttttaggttattacgtaggaagtagagaggcggagtgtgttttttggggtatgaaatagtgatttaaatgtagggatttttttgtttggtttattggtttttaatttttaggtaaatgtatagatattttttatttttattttttaaagtattttttattatattaatttttagaagtaattttgtttattaaggtagaaggaaagagagttattgtttaaattagatattagaatttaagtttttaaatattaatgtttggggagtagttttatggtgtttttgattgtttttataatggagtgtgtaatttagtagagttgttaagttttttgaagatgttagtttgttttgatttttaggaaggtagttgtggagtgaataggttgcgtttatagacgtgttagatttggatttttttgaagtggtggagtttgtatttcgttgttaaataaggtttcgttttttgtttggtagtggagtttttcgtttgttttttgtggggttttaagggaaggttagttttgttatttttagaggaagacggtatagattatgttttttttaaaatcgtaaagttggtggggagaataagtgaggaaagtttatgaatataatggggatatttgtattttggttgtttgaaaaaaatttagagaggggtttattttattaggagagaggaggaagggtgttttttgtgtggttataaagagttaatgaggtttgttgaagatgataaatatgatggagttggattttttttttttttttttttttaaaataaaggttataatttagaaggagtatttttatttttagttttgaagaatttaaaaaaaaaaattttagtatgtttattgtaattattaatataatattatttggaaatttatatgtatagaataaagtaagatttttaatgtatgagaaaatatagaaaaattaacgtagttaagaaaaatttaaataaatagaattgaaagttaaggtgtaaaatgtgtttgtgtgtatttatgttgagtatttttttttttatttttttaatgtttttaaattttaaatttaattttgtgtgtgtgtgtgtgtgtgtgtgtgtgtgtgtgtgtgagagagagagatagggttttattttattgtttaggttggagtgtagtggtgtaatttttgtttattgtaatttttatttgtcgggtttaagtgatttttttattttagtttttttagaagttagggttataagtacgttttattatatttagttaatttttgttttgtttcgttttttgatataaggtttggttttatcgtttaggttggagtgtagtggtattattttggtttattgtaaattttattttttgggtttaagcgatttttttattttagtttgtcgagtagtttggattataggtttgggttattatatcgggttaatgtttgtatttttaatagaggtggggtttcgttatgttgtttacgttggtttttaatttttgagtttaagcgatttgtttgtttcggttttttaaggtgttgggattataggtgtgagttattgttttttttttaatattgatttgtttgttttatttattaattgtaaacgaaaattttgtttttgtgggattatatttatgaatgagagaggttataaaaaaaagtattaattggataattatttttatttaggaaaaaagtagttatagggattagttatagtttatgaatatgttttggcgttttaaaggtattaaaattaggatgttagagttttaaataggaaagatttagtttacgaggtttgtttttttagaagattagtaaagatggtaggtttggcgttttaggtggtagagaaattattaggaaggtttggtgaatggggagaaaggtaatttttttaatttttttgtttttttttttattttttttttttttttttttttttttttttttttagttttttttttttttgtttttttttttcgttcgtttaagtattatttcgtgaggtttcgtggcgttagtttagtgttttcggtttttatcgagtttggttttattgtaggcgttgggggttggggtgggggagaggtttagggtatatgatgtcgtttttagttcgtttagtatatgatttaggtaggtcggcggggttttggtatattcgagtcgcgttcgcgaatatagtttatggttttttcgcgtttagggattttttgttgttttacgcgggacgtagttacgtagttcgtgttgagtttttagtcgcgggttttttacgcgttttgtttgggtagcggcgggtttcgtttggcgttgggttttttgtagttgttgttcggtcgtcggttcgcgggtttcgggtttttcgcgacgttttcgtcggtttcggttcgtattttgcgcgttgtcgttgtttgcgattttttcggttgtttgggtaagggcgcgcgcggttcgcgggttggaatttgattagcgtttgggtgagggcgcgtggttcgtaggttgagattcgattggtgttcggataagggcgtacggtttgtggatttggatttgtttcgtgatggagtgaggacgagaggttcgcgggttggaatttgttcggtgtagggttgagggcgcgtagttggttggttgggatttgttcggttttcggttgagggtttgaggttcgcgggttgggatttgtttagtgttggggtgagggcgtgaggttttggggttgggatttgtttaattttcgggtgagagtgcgtggttcgtaggttgagatcggatcgatgttcgggtgagggcgtatggttcgtaggttggaattcgatttattcgggttggaatttgatcggtgttcgggtgatggcgtacggttagcgggttgggttggtcgttttaatatttgaattatagagaaaagagaaagcggaggttgttttttagggatcggatgggataattaggtaattttttttttttttttttgagacggagttttgttttgtcgtttagattgaagtgtagtggcgtaatttcggtttattgtaatttttatttttcgggtttaagggatttttttgttttagtttttcgagtagttgggggaggcgcgcgttattatgttcgattaatttttgtatttttagtagagacggagttttattatgttggttaggttgttttcgaatttttgattttaggtaatttattcgtttcggttttttaaagtgttgggattataggcgtaagttatcgcgttcggtcgattaggtagttttgtaaatatatggtcggtaaaatttttatttaagggacgttgggttttaaaaaattcgtttattgtgtttgttatatggaaattttagatggcgtagttaagtaaaatttagattagaaaagatttttttatttttgtttaattgtattagggagagattaataattaatttttttttgtttcgttttgtgtgtgtgtgtgtgtgtgtgtgtgtgcgcgtgtgtaaatttttttttattgtgtattatatattttttcgagtattttgtaagttgaaattttttttttatttaggttttttgggtatggtttttatattataggtgcgtaaattgtagtttttagattaaattttgttcgttttttagggtttacgagttaagaatggttttatattttattttttaaaaaattaatgattttgttttttgagatagggttttatttttttgtttaggttgagtgtagtgttataattatagtttattgtagtttcgattttttgggtttaagcgatttttttattttagttattcgagtagttgggattatagttatacgttattatgttagggtaaatatatgtggggttttattatgttgtttaggttggtttttaatttttgggtttaattaaaagattattatttttggtatcgtaaagtgttaggattataggcgtgagttattttatttagttttaaaatgtttttaaaaattaaaattaaaaaatattttttggtatgtgattattattgaaatttaaatgttaatgtttataaataaagtttgatgggaacgtagttatgttgtttatgtgtatttgtgaattatttatggttgtttttattttataagggtagggtgaatattggattgagaaagtatggtttttaaagttaaaaatattaagaatgagtttgttaatatttgttttaaattattatgtgatattttatatagattttttagttagatttggttattttgtttagttttttggaatatttttattatgcgtaaatgtagtttataatagaaatatttatagtgaatttttgtacgtgggattcgtgaggtacgggtattcggtttatttgtttttttttttattttttttattggattaatgtgaagttaattttaggttttattattttgtttatttagattttagagagagttttaaaatataataattttaaatatttgtaattttaatattattattattttatttttgagatagggttttattttgttgtttaggttggagtgtgttggtatgattatagtttattgtagtttcgaatttttaggtttaagggatttttttattttagttttttgagtagttggaattataggtatgtattattatattggttaatttttgtattatttttttagagttggagttttattattttgtttaggttggttaaatttttaggtttaagcgatttttttatttcggttttttaaaggtgcggtggtttacgtttgtaattttaattatttaggaggttgtggtggacggattgtttgaatttaggagtttaagattagtttgggtaacgtaacgagatttaggttttatttttaagaaaaaaaaaataataaaaaaaaggttcgttatggtgggatgtatatgtggttttagttatttattaggttgaggtaggaggattatttgagtttaggaattttaggttagagtgagttacgatttagtttgggtgatagttaagattttgtttttaaaaaagtaaggtgtatttaaatattttttgagggttagtgaataatatttgtatattttttagtttttagaagggaagtggatgaggttgcgagtaaataagtagaagttaggaaaaggttgggtgatcgggattttttattgaaaaataagaaatttgaatgtttatgggatagggtttttattaagtttaaaggagtgataaatgttgaaaattttaaggtatcgtatagaagaaaggtattgtttttgttggtagtggtttgataatgagaagatgttttgagttttttagtgtttatagttgtcgtttagtagtgtattatatagtgtgtgtttagtggtatattatatggtatgtgtttagtagtatattacgtagtatttgtttagtggtgtatcgtatggtgtgtgttgtatattatatggtgtgattttagtagtgtattgtatagtgtgtgtttagtggtgtatggtatgtttattagtgagtattattatatagtatgtagtttggtgttgtttatagtttttttttttatattatttagtatattttttttttttttagatggagttttattttgtcgtttaggttggagtgtagtggtatagttttggtttattgtaatttttattttttaggtttaagcgatttttgtgttttagttttttgagtagttgggattataggtgtttattatcgtgtttggttaatttttgtatttttagtagagatgtggtttttttatgttggttaggttggttttaaatttttgattttaggtgatttatttattttagttttttaaagtgttgggattataggcgtgagttattatgttaggttttttattttttttttttttttgatatagggttttattttgtcgtttaggttggagtatagtggtgcgatttcgatttattgtaattttcgtttttcgggtttaagcgatttttttattttagttttttgagtagttgggattataggcgcgtgttattatttttagttaattattgtatttttgtagagatggggttttgttaggttggtgttattttttgggtttaagtgattcgtcggttttggttttttaaagtgttgggattataggcgtgagtattacgtttagattttagtgtatttttaaataacggatattgtattatttaataaagaattataatatgtattatgagtgtgtatattgttttgaggatattagatatttgggtttaatagtaagagaaatttataaagaataaatgttaaaggtaaattattgagaattaatttgtgaaaattttaaatgttgtgtttaaaaaaatgaaggaattatatatttaaatttttaaattgtgttttttgaaaaatttttttttatgtgaggaataattaatatggttattgaaaatgtagtcgagaaatttagattgttagttatatattgtaagtaaattaatagataaataaaatagggatgagattgtggttaattatggtttgcgttaaagtgtttgcgtttgttttgttattataagttattttttgagttttaggttaggcgcggtggtttacgtttgttattttattttgggagattaaggcggatagattatttgaggttaggagtttgagattagtttggttaatatggtgatatttcgtttttattaaaaatataaaaattagttgggcgtggttgtgggtgtttgtaattttagttattcgggaggttgaggtaggagaattatttaaatttgggaggcggaatttgtagtgagtagggtttttattattgtattgtagtttgggtgatagagttagatttcgttttaaaaaaaaagataaataaaaaataaaaataaaaaaaagttattttatgagttttaattttttttttttttttttgtatatataaatatgtatgtttttttttttttttttttttttttttttttgttttttttttttttttttttttttttttttttttttttttttttttttttttttttttttttatttttatttattatgtatttattatttttttaaagtaagaagttagttttatatttgattaggattagatataaagtattatttaatttttttttagg

SEQ ID NO: 2016 - DNA, 10039 bp, Artificial Sequence
  chemically treated genomic DNA (Homo sapiens)
tttaagagagaattggataatattttgtatttgattttaattaaatataaagttgattttttgttttggaaaaatgatagatatataatagatagagataggaagagaggaaggaagaaggaaggaaggaaaggagggagggagagagggagggaaaaagataaggagggaaaaggaagaaaggaagaaaaaatatatatatttgtgtgtgtagagagagaaaaagaagattgaaatttataaaataatttttttttatttttattttttatttatttttttttttgagacggagtttggttttgttatttaggttgtagtatagtggtaaaaattttgtttattgtaaatttcgttttttaggtttaagtaatttttttgttttagtttttcgagtggttgggattataggtatttataattacgtttagttaatttttgtatttttagtagagacggggtattattatgttggttaggttggttttaaatttttgattttaagtgatttgttcgttttggttttttaaagtgggatgataggcgtgagttatcgcgtttggtttgaaatttagaaaataatttatggtagtaaaataaacgtaggtattttaacgtaaattatagttggttatagttttatttttattttgtttgtttgttggtttatttgtaatatgtgattagtaatttggatttttcggttgtatttttagtggttatattagttattttttatataaaaaagaattttttaaaaagtataatttagaagtttgaatatatagtttttttatttttttaaatataatatttaaaatttttataaattaatttttaataatttgtttttaatatttattttttgtgagttttttttgttattagatttaaatgtttaatatttttaaaatagtatgtatatttatggtatatattatggttttttgttaggtaatgtaatattcgttgtttaaaagtatattagggtttgagcgtggtgtttacgtttgtaattttagtattttgggaggttaaggtcggcggattatttgagtttaggagatgatattagtttggtaaaattttatttttataaaaatataataattagttggaggtggtggtacgcgtttgtggttttagttatttaggaggttgaggtgggagaatcgtttgagttcggaaggcggaggttgtagtgagtcgagatcgtattattgtattttagtttgggcgatagagtgagattttgtgttaaaaagaaaagaaaagtaaagagtttggtatggtggtttacgtttgtaattttagtattttgggaggttgaggtgggtggattatttgaggttaggagtttaagattagtttagttaatatggggaaattatatttttattaaaaatataaaaattagttaggtacggtggtgggtatttataattttagttgtttaggaggttgaggtataagaatcgtttgaatttgggaggtggaggttgtagtgagttaagattgtattattgtattttagtttgggcgatagagtgagattttatttgagaaaaaaaaaagtatgttaggtaatataaaggggagaattgtaaataatattaagttatatattatgtagtagtgtttattggtaaatatgttatatattattaaatatatattgtgtaatatattattaaaattatattatataatatgtaatatatattatgcgatatattattaaataaatgttacgtaatatattattaaatatatattatgtaatatattattaaatatatattatgtaatatattattaaacgataattgtgaatattaaaaagtttaagatatttttttattattaagttattgttaataaaaataatgttttttttttgtacggtgttttagaatttttagtatttattatttttttgagtttaataaaagttttattttatgggtatttaaattttttattttttagtaaggggtttcgattatttagtttttttttgatttttgtttatttgttcgtaattttatttattttttttttaaaggttaaaggatatgtaagtattatttattaatttttaaaagatgtttgggtatattttatttttttagagatagggttttggttgttatttaggttggatcgtagtttattttagtttggaatttttgggtttaaatggtttttttgttttagtttggtgagtagttgggattatatgtgtattttattatgacgggttttttttttgttgtttttttttttttgggggtagagtttgggtttcgttacgttgtttaggttagttttgaatttttgggtttaagtaattcgtttattatagttttttgagtagttaggattataggcgtgagttatcgtatttttaggaggtcgaagtaggaggatcgtttgagtttagaagtttgattagtttgggtaagatggtgagattttagttttgaaaaaataatgtaaaaattagttagtgtggtgatgtatgtttgtagttttagttgtttaggaggttgaggtaggaggattttttgagtttagaagttcgaggttgtagtgagttatgattatgttagtatattttaatttgggtaatagagtgagattttgttttaaaaataaagtgataatgatattggggttgtaaatgtttagaattattatgttttagggttttttttgagatttgaatgggtaggatgatggagtttgagattggttttatattaatttagtgaggagggtgaagaggggagtagatgagtcgggtattcgtattttacgaattttacgtatagggatttattgtaagtgtttttattatagattgtatttacgtatggtggaaatgttttaaaaagttaaatagaatggttaaatttagttgagaggtttgtataaagtgttatataatagtttaaagtagatgttggtaaatttatttttaatatttttggttttgggagttatatttttttagtttaatatttattttgtttttgtagggtaaaggtagttatgaataatttataaatgtatatgaataatatagttgcgtttttattaaattttatttgtagatattaatatttaaattttagtaatagttatatgttaggaaatattttttaattttgatttttaaaaatattttagggttgggtgaggtggtttacgtttgtaattttaatattttacgatgttaagggtggtgattttttaattaagtttaggagttggagattagtttgggtaatatagtgagattttatatatatttattttagtatggtggcgtgtggttgtagttttagttattcgggtagttgaggtgggaggatcgtttgaatttaggaggtcgaggttgtagtgagttgtgattgtgatattgtatttaatttgggtaagagggtgagattttgttttaaaaaataaaattattaattttttaaaaagtaggatgtaaaattatttttagttcgtggattttagaaaacgggtaggatttggtttgagggttgtagtttgcgtatttgtggtgtaaaaattatatttaaaaagtttggatagggaagggattttagtttataaaatattcgagagaatatatagtgtataatagaaaagaatttatatacgcgtatatatatatatatatatatatatatagagcgagatagagagaagttaattgttagtttttttttggtgtagttgggtaaaaatgaggaaattttttttggtttgggttttgtttaattgcgttatttgaagtttttatataataaatataataaacggattttttaaaatttaacgttttttggatgggaattttatcgattatgtgtttgtaaaattatttagtcggtcgggcgcggtggtttacgtttgtaattttagtattttgggaggtcgaggcgggtggattatttgaggttaggagttcgagagtagtttggttaatatggtgaaatttcgtttttattaaaaatataaaaattagtcgggtatggtggcgcgcgttttttttagttattcgggaggttgaggtaagagaattttttgaattcgggaggtggaggttgtagtgagtcgagattgcgttattgtattttagtttgggcgatagagtaagatttcgttttaaaaaaaaaaaaaaaaaattatttagttgttttattcggtttttagggaatagttttcgtttttttttttttttgtggtttaagtgttaagacggttagtttaattcgttagtcgtgcgttattattcgggtatcgattaagttttaattcgagtggatcgagttttaatttgcgggttatgcgtttttattcgggtatcgattcggttttaatttgcgggttacgtatttttattcggggattgagtaggttttaattttagggttttacgtttttattttagtattgagtaggttttaattcgcgggttttaagtttttagtcggggatcgagtaggttttaattagttagttacgcgtttttagttttgtatcgggtaggttttaattcgcgggtttttcgtttttattttattacggaataggtttaaatttataggtcgtgcgtttttattcgggtattagtcgggttttaatttgcgggttacgcgtttttatttaggcgttgattagattttaattcgcgggtcgcgcgcgtttttatttaggtagtcgagaaggtcgtaggtagcggtagcgcgtaggatgcggatcgaggtcggcggggacgtcgcgggggattcggggttcgcgggtcggcggtcgggtagtagttgtagaaggtttagcgttaagcggagttcgtcgttgtttaggtagagcgcgtggaaggttcgcggttggaagtttagtacgagttgcgtggttgcgtttcgcgtggggtagtagaaggtttttaggcgcggggaggttatgggttgtgttcgcggacgcggttcgggtgtgttaggatttcgtcggtttgtttgggttatgtgttgggcgggttgggggcggtattatgtgttttgggttttttttttattttaatttttagcgtttgtagtagagttaggttcggtgggggtcgagagtattgggttaacgttacgaggttttacgaggtgatgtttgggcgggcggaggaggaggatagagagagggagggttgagaggagaggaagagggaggaggaggagggaagtggaaggagaagtagaaaggttgggaaggttatttttttttttatttattaagtttttttggtggtttttttgttatttagagcgttaaatttgttatttttattggttttttagagaaataggtttcgtggattagattttttttatttgggattttgatattttgattttgatgtttttaaggcgttagaatatgtttataaattgtgattgatttttgtaattgttttttttttaagtagagatggttgtttaattagtgtttttttttatggttttttttatttatggatataattttatagaggtaggattttcgtttataattaatgaatgaaataaatagattaatgttaaagaaagagtagtagtttatatttgtaattttagtattttgggaggtcgaggtaggtagatcgtttgagtttaagagttggagattagcgtgggtaatatggcgaaattttatttttattaaaaatataaatattagttcggtgtggtggtttaggtttgtgatttaagttattcggtaggttgaggtgggaggatcgtttgagtttaggaggtggagtttgtagtgagttaagatagtgttattgtattttagtttgagcgatagagttagattttgtattaaaaaacgaaataaaataaaaattagttggatgtggtggggcgtgtttgtagttttagtttttggggaggttgaggtgggaggattatttgagttcggtaagtggaggttgtagtgagtagagattatattattgtattttagtttgagtaatggagtgagattttattttttttttttatatatatatatatatatatatatatatatatatatagaattaagtttaaaatttaaaaatattaaaaaaataaagggaaaagtatttagtataagtatatatagatatattttgtattttaatttttagttttatttatttggattttttttaattgcgttaatttttttatgtttttttatatattgaaaattttgttttattttatatatgtaagtttttaagtaatattgtgttaatgattatagtaagtatattaagatttttttttttaagttttttaaggttgaaaatagaagtgttttttttagattatggtttttattttaaaaaaagaaaagaaaaaaaaatttagttttattatatttattatttttaataaattttattggttttttgtgattatataagagatattttttttttttttttttggtaaaatgggtttttttttgggttttttttaagtaattaaggtgtaggtgtttttattgtgtttatggattttttttatttgttttttttattagttttgcggttttaaggaaggtatgatttgtgtcgtttttttttagggatagtaggattggtttttttttgggattttatagaaggtaggcgggaggttttattgttagataggaagcggagttttatttaataacgaggtgtaaattttattattttaaaagagtttagatttggtacgtttataaacgtagtttgtttattttatagttgtttttttagaagttagaatagattgatatttttagaaagtttaatagttttgttggattatatattttattgtaaaaatagttagaagtattatagaattattttttaagtattaatgtttaaaagtttgaattttaatatttaatttggatagtggttttttttttttttgttttggtaagtagagttgtttttggaggttagtgtaatggaaagtgttttaaaagataaaaatgaagagtgtttgtatatttgtttgaaggttgagggttagtgggttaggtaaaggggtttttgtatttgagttattgttttatgttttagaaaatatatttcgtttttttgttttttacgtgataatttgggagtattttttagggggttttggttgattttggtgtttattatttaagtttagtagttagaattttattagtgagaaaatggatatgaatgtagatttttagggttatggtatagatgataatggtaaagatgagttttagagtaaaggtgtagaagtatgagtgtaagattaaatttaaaattttgttattaaagtgagagggaattagaaattggtatgagaggttgggtttagtggtttatatttgtaattttagtatttaaggaggttgaggtaggaggattatttgagtttaagagtttgagattattttgggtaatatagtgagagtttatttttagcgtttttttttaggagtagtattttttgaagtggtggagtttgtagtttattgttgttaaataaggttttgttttttgtttggtagtggagttttttgtttgttttttgtggggttttaagggaaggttagttttgttgtttttagaggaagacgatatattttaaattagtagagcgtgttgttgcgtatttgtagttgtagttattggggaggatgaggtgggaggattatttgagtttaggagtttgaggttgtagtgagttgtgattgtattattaaattttagtttgggtgaattgagatgataaatttttttttttttttttttttgagatagagttttgttttattgtttaggttggagtgtagtggcgtgattttagtttattgtaatttttgttttttgggtttaagtgatttttatgttttagttttttgagtagttgggattataggtatatgttattatatttagttaattttttgtttttttagtagagataggtttcgttatgttggttaggttggttttgaatttttggttttaagtgatttattcgttttggttttttaaagtgttgggattataggtatgagttattatgtttggtttgataaaattttttatgaaatagtataattataaatttgagaaaagtgaagtaaatatatacgtatatatttgggaggtagaaatatttggaagtttcgtagatatgggagatatagggatggcggtgttgaatatgaattttgaggtatgtgtgtagaaataatcggtttttgagtatatgaaggtatatttgtttttgtatgaatttttttttcgttttttttttttttttagtttagtatttgaattcgttttttatttttatagtttgggttgtttggggtatttgttttttggaaatgttttattattttggtttttttttattttataatttattatttatttattatttttatttgattagatgtatttgattaattgttggaagacggtttttgagttttttttttaggtagtttattttttatggtgagttttttgatatcgagatgttttaattaaaagaatggggtttatggtgagatttagatattttttagaatttagtagaggaggtggttaggggtagatggatggtagaaatagtttaagtaaggagattgttatttataataatttgaatttaaataataaataagatttgtttatttatttattgatatggagttttattatattatttaggttggagtgtagtggtgcgattttagtttattgtaatttttgtttttcgggtttaagtgatttttttgttttaggtttttaagtagttgggattataggtatttgttattatatttggttattttttgtatttagagtatagacggcgttttgttaagttgtttaggttggtttcgaatttttgattttaggtgattcgttcgttttagttttttaaagtgcggggattgtaggcgtgagttattgcgtttagtttaataaataagatttaaataataaaataatttatggagtgtaggtaggtattatgttttgaatattatatttattattttatttaatatttagaatgagttttttaagtgggttttattgatatttaaattgatatagataaaatatggttaggtgtagtggtttatgtttgtaattttagtattttgggaggttaaggtgggagtattgtttgagtttaggagtttaagattagtttggggtaatatagggagattttgttttttattttttttagttaaaaaaaaaaaaaaaaaaaaaaaaagtcgggtttagtggtttatatttgtaattttagtattttgggaggttgaggcgggtagattatttgaggttaggagtttattatattttagtttgggcgatagagtaagaataggagaaagaaagaaagaaaaagagagagagagagagagagaggaagattagttaatatataagtttatgggtatggttgtgtgttaataaaattttatttataaaataggtaaagggttataggttgtagtttttgtaagtttattatttgaggttttggtttatttagtagttgtttgaaaggttgggtaataatcgagaaatggaggaggattaatatttagtggggtagataaatttattttaatgagagaggaagtaggaagttattggtagatgtattgtttattttttttttttagggaggtttttgaggagtggttttatatgtttttgtgtaattagttgggttttttgggaattttgtggttagtttatgaatggtattgtttttaatttgtttttttttttttttgttttattttgtttttgtgtttatttttagagtttttatagatatataatgtgttttaaattttgtgtttagatagttgttttttttgagaaaggattttagttgttttagttatagtttttttttgggtttattagatgattaatagtatttttgttttttatttaagtgta

SEQ ID NO: 2017 - DNA, 7319 bp, Artificial Sequence
  chemically treated genomic DNA (Homo sapiens)
aaaagattttaaaagtttcgtttaatattgattattgagatatagatatagagtataaaataagtaggtaagaaatatttaaagaaatgaagtatggaattataaagatcgggaaggaatataagagtattaggaataattgggaagatacgtataataataaaatggaatttttaaaatgaaaaatagatttttagaaattaaaaaagttttaatgtatgggtttattaatagatgaaatatagttgaatagtgatatggaatatatatttgaggaaattatttagaatagagtatagagagtagtaagatgaaaaagatgaaagaagttaagagatacggagaatagaagaggaaatagaaatatatgtattttgaattttaagatagtaaagagaattgagaaaaaggaattaattgaagagatagtaattgagaattttatagaagtgatgataaatataaatttatttttttaagtagaataaaagaaatttaaatgtagatatattatagtgaaattgtagaagagtaaatataaaaaggttttaaagtagttagaggaaaagagataaattatttatatgatataatagtagtgataaaaattaaaatgaaatggaataatatttttaaagtgtttattttgtattgtagatttaatttattgttagaggatgaaagtgatataaatatatttttagataaatatagttttttattaatagattgttattaaaggaatttttaaaagatgtattttagaaagaaaaatgattatagaatgatttgagatatgaaaaggaatagtaagtaaataaaatataaatatgtaagtatatatatatatatatatatataaatatttgtgtaagagtttggagagaggtgtttatatttaaaatattttaaggtttttggattgtttaggggtagtgtttaagatatttaatttaaaattttattgtattaaatatgtaaggtaaaaatttaagggtaatattaagaaaaattggtagtataaatttgaaaaaaaaaaaagaataaaatatatatgttcgatattttttttaaaggtaaggaagaaaaaagtatagaaaaaaaaagagattaataaaattagtttaaataagtttaaatgtatgttaataattataatgaatgtaaatggaataaatttgttaattaaaggttatattgttatattggataaaaaaataaaatttagttgcgtgaagtttatgagatataaaataaaaaggatagagaaaggttgaaagagaggtggggagcgaaaagatatataaggtaaatattaataaaaagagagttgggatgttattttaatatttgataaaaattttaagataaaaagtagtattggtgattaagagggtaattattaaataataaagaataaatttattagaaaggaaaaatataataatttaaatttttatttttttaatagttttaaaatataaaaagtaaaaatttatagaattttagggtaaaatggttaaatgtagaattataagttttttttgttttttattgtaaaaattatatatagtgaatatatttaaaagatatttgtattagtttgtgggattaaggatttttttttattttttaaattttattgttgtgatattgattttataatttatatattttttttagaaatgaattatgcggtgaaatttttaaataattgatggttaattatggttttattaaatttgggggtaattattgtgtatagttttagattttgtttttaatgattattaggttgtgtatattttaaagataattttttgtttgtgttttgttaaaattttaaatgatttttatatggatttaagtggtttagatattatttgatttatatattaaagaacgtggtttattatatagtttttgttttatttaataagaataaaataattttggaaagaatgtataataatgtattttaaatttaaatatgttattgattgttaatggttatattattttggttatttgtattaataatatagttataatttttttaaatttttgtttagatattataattattttagggattatttatttttagaaaagtagaggaagatataaattggtaatttttttttttatattgatatttttttggatttaagtgaattaatattgttattattaaagtttagtattttatttttatttatattttttgaaacgtataagtaatatttagatgaaataggaagggattattgtatataaatggaaaataaagtagtatgtaaggaagttggttttaaagaaaataagtataggtggtcgggtatggtggtttatgtttgtaattttagtattttgggaggtcgaggtaggcgaataacgaggttaggagtttgagattagtttggttaatatggtgaaatttcgtttttataaaaaatataaaaaattagttgggcgtagtggcgggtgtttgtaattttagttatttttgggaggttgaggtaggagaatcgtttgaatttaggaagcggaggttgtagtgagtcgagattatgttattgtattttagttttggtgacggagttttattttaataaataaataaataaaaaagtataggttattttattatagtattgaaaattaagatagtatatggattttttttgaatatataatttaaaaattgaaattgtaaaatttaatttattatatagaattttttttatagttgtttaaattttattgtttgtaattttagaaaaataatattatgttggaaaagtaagtagtaatttaaaatgaattatattttgaaaaatatagaagaatgataagaattttaaatttttgtgaatattttatttaagaaatgtgttttagaattttttgagatttgaattagaaaatattgttggttaaatttttttattgtttaaagttaataataaaagaataggaaaagaatgtagttatttttaattttgtgttataataataagatagtaacgtttagaaattatattttaaaatttttagagtaaattaataaaaatttaatatattttaagttattattgtattttttttataattattttttcgtttattgttttaatttattgaattatatatataatgaagagtataataaatgtatatatagtttgatgaatttttatatagtgagtttgtgttataagtaatttattattaatttttaagatgatatagtgttatgatcgaaggattaaaatgattaatattattataaaaggtagagttataaataagaataattaagtgtaattaaattaggtgggaggtatatttataaaaatgaaataatttttggtttatattttatattatataggtattttgtatttttagaatatgagaaaatatatatttttagtttgataggtttttgatttgggggttttttttattgtattttttttttttttagtagttgaatattttaaagtaattagtagaaaaaatataaaattttagaattaattagatttttaaaagtaacgtttttgttttttttagagatatattttttaatttttttataaattatgattttatacgataattttaagggtgaatattaatttatttatattttggtgtttttttttttttaagtggtagatggtttttattaatttaaaattgaagttattgttgggggatttttaattttatgtttagttttagtgtttagaggttattaaagacgatacgaatagttttttaggtattttatttatcgtttattttgttaatataaattttttttagatttgggtttcgaaattattttattttgtagagtagaaatgttacggtgtttatttagtgaatttttttttagtttttaatttttgtattttttgcgtatattttaagttattagtaatttttttagttattaagaaatagtgtaatataggtcgttatttgttttgttcggaatttacgagtaatttaattatacgtgattagtaatattaagggggtttttttaggtaaagaatttatagaatgagaggtttttggtatttaaatgaagtaataatgaaagatcggcgaagtttagtaaggtttttgagcgttacggacgtttgttttgattttaggttgtcggcgcgcgttcgcgggtttgtttttatggacgaggcgtaagagggatttaggaaagacggtgtttttagagattcggagattagcgtgggtaattttgttattagttgtttttgttattagtcgtttttataataaaaaggaggaaacgtttcgtatttcgttattaggataattttgtaattcgatatcgaggtttaagatttcgtatttcgggtagcgaatataggagaaaagtatatcgcggttcggtcgcggggttttaaggcgttcgtgtcgtcgttgtttttggggtgtcgagagcgacgcggggtttatttttttcgtcggttcgaggttcgaagttcggttcgttatcgttttcggtcggcgtttttcgtacgtggcggtcgtgattgtttcggggcggtattttttcgcgttttcgttttagttttttttcgtttttttcgggatttttcgtgttcgggcgtcgcggaaggatcgtacgtacgcgcgcgcgtacgtttagtcgtgttcgcggaaaacggagggcgttgcggtaaggagtagtcgttataggtatagtcgtttcgtagtttttcgtcgttggtttgttagtttcgcggttgcgggcggtcgggcggtcgagcgcgttttgaggttcgttttttatcgttgaattcgcgttttttcgtcgtagtttttcggggaggggggcggtcggtgtttgcgtagagtcgtttttttttcgttttcgtttcgttttttttcgcgtcgtcgtcgttcgttatcgtcgtcgtcgtcgttgcgtttgttgtttttcgtcgttcgcgttgtagtgcgaagggttcgaagatggtcggttggtagagttacgtggataatttgatgtgcgatggttgttgttaggaggtcgttattgtcggttattgcgacgttaaatacgtttgggtagttacggtcgggggcgttttttagagtattacggtgaggattagtggcggtcggtattttggtttttgtatcggagcggggtggtcggtcgcgggggtatcgtagcgcggggttggaatattgagggtcgagttcgtaggtgtgttaggtagcgggcgtcgaggatgcggttgtcgggcgggcggggaggtcgaggttcggggacgtttttttattcggggttgcgttgataggttgggggcggcggtcggattttttgttggttttggtcgggcgttttcggcgtttttagcgtcggtttaggtgttcgggttgggggagggggtacgtatcggttagggtaaggggaggggttttttttttttttttagtgcggtttttttaggtttttttgaagttttgaggtttgttatgtacgttttggggtggaagcgggggtcggggattcgggttggggcgcgcgggtttcgggtggaggtttttaggttttttggtcggtttttgtttcgcggatagcgcgtttttcgcgttttcggttgtgggaggcggcggtttcggttcggttttcgggattttcgaagcgattttgcgtaggtttatcgatgtttaggtttttggggtttgcgagagatgtacgtcgatcgcgtaggtggattcgtgaatttcgattttagttttagttttataggttgttttttttttttttttaaattttttaagatggcgaattgttattgatttttttttttatatggagatttatcgatatacggttatttttagttatgtaatatagtttaaaaaaggggtgtttttcgggggtttttaattatttgcgaagattaggagtatattttatttttttaagtttttttttttttagtggtggtagtaaaggaattaatgtagttttatgttttatattgtttgatttttttgagatttgatggttttgagttggttgtaatatgtttggagaatatttgttataaaatttttagtttattgttttgtttgtttttgtttaaggttgtttttaaaattatgataattgtattaaatacgagattattttttttattttttagtattacgttttttttttattaagtattaaaatttaggttttttattaagggtgttaattatttttttattatttaatatggtttaaagtttaattttagaatttagtttttgatagtagtattttaaggtttcgtatattcgtagtggattataatttttgtagggaattggtatttggttattaattttttttttgtagtttttttgtttttgtgtgtgagttttcgttgtttgattaggaagattgcgggagtgtgtttggaaatggttggggtttgttatgattttgtagttttgatgggggcgacgtttttttttttatttatggaatgttagaatgtacgttttttttttttcggttttggtggttattttagttttttttttaatttttttttattttttttgttttattattgtttatcgtagtgttgtagatagaatttattttgcgtttgtttagaaagaaaattgattattgagatgggaggggaagggaagttggaaagaaacgggagtcgtggttagaaaaataggagggaaatatgaatttggaaaagtattgatgtttaggggttgaagtttattttattacgtatatttttagttattttaagtagagaagtgaatatattaaagaataggttttattttgggagattttgaagtaattttaaatttgatgaaatatgatttattgtaatgggattgaatatgatagattagttttgtttagagttgatagttgaatttttattattacgtgaatatttttaggtattagttgatttaatatagtttataaataattttttaagtttgtattttgtttagtgttaattgttaattttttatagtttttttgtatagattggttttggttaagagacgatattattaattgaagttaaattaatttatgtaaaatatgtgattatataggattaaataattatttagaaaagattgaattttggttttatattagtgaaatgtggttatttggtagtggtagtataagtttagttatagttttttttgttatattaagttttaaaaggagttaattataatttaatgtgtgtgtttttttttttttttttttggtggggggtagt

SEQ ID NO: 2018 - DNA, 7319 bp, Artificial Sequence
  chemically treated genomic DNA (Homo sapiens)
gttgttttttattaaaaagaaaaaaaaaaaaatatatatattaagttgtagttaattttttttagggtttgatgtaataggaagggttgtagttaggtttatgttattattgttagatagttatattttattaatgtaaaattaagatttagttttttttaaataattatttaattttatataattatatattttatatgagttgatttgattttagttaatgatgtcgttttttaattaagattagtttatataaagaaattgtaaagagttgatagttgatattagataaagtgtaaatttaaagagttatttataaattgtattaagttagttggtgtttgaaagtgtttacgtaatggtaaaaatttagttattaattttgaataaagttggtttattatatttagttttattatagtaaattatgttttattaaatttaaagttgttttaaagttttttaaaataaagtttgttttttgatgtgtttatttttttgtttagagtaattagaaatatacgtgatgagatggattttaatttttggatattagtgtttttttaaatttatattttttttttatttttttagttacgattttcgtttttttttaattttttttttttttttattttagtaattagttttttttttgggtaaacgtaaagtggattttgtttatagtattgcggtaggtaatagtaaaatagaaaaaatggagggagattgggaaagaaattgaggtagttattagaatcggaaaggagaaaacgtgtattttaatattttatgaataagaaggaaggcgtcgtttttattagaattgtagagttatagtaggttttagttatttttaagtatattttcgtaatttttttagttagatagcgggaatttatatataaagataagaggattgtaggaaaaaagttgatgattagatgttaattttttataagaattgtagtttattgcgggtatacgagattttaaagtattattattaaggattgagttttaaagttagattttaaattatgttaagtggtaaaagaataattagtatttttaataggggatttgaattttggtgtttaatggaaagggagcgtggtgttaagaaataaagagaatggtttcgtatttagtataattattataattttagaaatagttttgggtagaaataggtaaaataataagttggaggttttgtggtaaatattttttaaatatattgtaattaatttaaaattattaagttttaagaaaattaggtaatgtgaagtataaaattgtattagtttttttattgttattattaaagagggagggatttagagaagtgaagtgtgtttttggttttcgtagataattgaaagttttcgaaaagtattttttttttgagttatgttgtataattggggataatcgtatatcgatgaatttttatatgagaagagaaattaatggtagttcgttattttggagaatttaaaaaaaaaaaaaaaataatttatagagttagagttgaagtcgagatttacgaatttatttacgcggtcggcgtatatttttcgtaagttttagaggtttggatatcggtaaatttacgtaaagtcgtttcgagaatttcgggggtcgggtcggggtcgtcgttttttatagtcggaggcgcgggaggcgcgttgttcgcggagtaagagtcggttagagagtttagggatttttattcggggttcgcgcgttttagttcggattttcgattttcgtttttattttagaacgtgtatagtaaattttagggttttaagagaatttaggggaatcgtattaggaggaaaaaaggaatttttttttttgttttggtcggtgcgtgtttttttttttaattcgggtatttggatcgacgttgggaacgtcgggggcgttcggttagggttagtaaggagttcggtcgtcgtttttagtttgttagcgtagtttcgggtgagggggcgttttcgggtttcggttttttcgttcgttcggtagtcgtattttcggcgttcgttgtttagtatatttgcgggttcggtttttagtgttttagtttcgcgttgcggtgttttcgcggtcggttatttcgtttcggtgtagggattagggtatcggtcgttattggtttttatcgtaatgttttgaaagacgttttcggtcgtggttgtttagacgtatttggcgtcgtagtagtcgataatggcggttttttggtagtagttatcgtatattaggttatttacgtagttttgttaatcggttattttcgagtttttcgtattgtagcgcggacggcgaggagtagtaggcgtagcggcggcggcggcggtagcgggcggcggcggcgcggggggaggcggggcgggggcggggaggaggcggttttgcgtaggtatcgatcgttttttttttcgaggagttgcggcgggaggacgcgggtttagcgatgagggacgaattttagagcgcgttcggtcgttcggtcgttcgtagtcgcggggttgataaattagcggcgggaggttgcgaagcggttgtgtttgtggcggttgttttttatcgtagcgtttttcgtttttcgcggatacggttgggcgtgcgcgcgcgcgtgcgtgcgattttttcgcggcgttcgggtacggagggtttcgggaagggcggggggagattgaggcgggggcgcggagggatatcgtttcgggataattacggtcgttacgtgcgggaggcgtcggtcgggagcggtggcgggtcgagtttcggatttcgggtcggcggagagggtggatttcgcgtcgttttcggtattttaggaatagcggcggtacggacgttttggagtttcgcggtcgggtcgcgatgtgttttttttttgtgttcgttgttcgggatgcggaattttgagtttcggtgtcgggttatagagttgttttggtgacgggatgcggagcgtttttttttttttgttgtgggggcggttggtggtaggggtagttggtggtagggttgtttacgttaattttcgagtttttaagggtatcgttttttttggattttttttgcgtttcgtttataaaggtagattcgcgggcgcgcgtcggtaatttgaaattagagtaggcgttcgtggcgtttaggaattttgttgagtttcgtcgattttttattgttgttttatttgggtattaagggttttttattttgtggattttttgtttggaggagtttttttaatgttgttaattacgtgtggttaaattgttcgtaaatttcgaataaaataaatagcgatttgtgttatattgttttttggtaattgggaaagttattggtggtttgaagtatacgtagaaaatataaagattaaaaattagggaagagtttattgaatgaatatcgtaatatttttgttttgtagggtaaaataatttcgggatttaggtttgggaaagatttgtattaataaggtaaacggtgggtagagtgtttgagaagttattcgtatcgtttttggtagtttttgggtattaggattagatatggaattaggggttttttaataatgattttaattttaggttaatagaaattatttgttatttaagggaaagaaagtattaaaatgtagataagttgatgtttatttttaaagttatcgtgtgaggttatgatttgtaggaggattaaggaatgtatttttggaaagggtaagaacgttgtttttaaaagtttaattggttttgaagttttatattttttttgttgattgttttaaaatgtttagttattagagagaaaaaaagtatagtaaaagaaatttttaagttagagatttattagattgagaatatgtatttttttatgttttaaagatatagaatatttgtgtggtgtaaaatgtgaattaaaaattgttttatttttgtaagtgtgttttttatttgatttaattatatttaattgtttttgtttatgattttgttttttatggtgatgttgattattttagtttttcgattatagtattgtattattttaaaagttaataatagattatttgtaatataggtttattatgtgagaatttattaagttgtatgtatatttattgtgttttttattgtatgtataatttaataaattgaaatagtaaacgaaaaggtaattatagaaaaaatatagtgataatttgaagtatgttgaatttttattaatttattttgaaggttttaagatataatttttagacgttattattttattgttatagtatagagttggaaataattatattttttttttatttttttattgttggttttaaatagtgaaagaatttgattaataatattttttaatttaaattttaaaagattttaaaatatattttttgggtaaaatatttataaaaatttagaatttttgttatttttttatattttttaaaatataatttattttaaattattgtttatttttttaatatgatgttatttttttagaattgtaaatagtaaaatttaaataattatgaaaaaaattttgtataatagattaaattttatagttttaatttttaggttatatatttaaagagagtttatgtgttgttttggtttttagtattgtaataaagtaatttgtgtttttttgtttgtttgtttattgagatgagatttcgttattagggttggagtgtagtggtatgatttcggtttattgtaattttcgttttttgggtttaagcgatttttttgttttagttttttaaaagtagttgggattatagatattcgttattacgtttagttaattttttgtattttttgtagagacggggttttattatgttggttaggttggttttaaatttttgatttcgttattcgtttgtttcggttttttaaagtgttgggattataggtatgagttattatgttcggttatttgtgtttgttttttttagaattagtttttttgtatgttgttttattttttatttgtgtatagtgatttttttttattttatttaagtgttgtttatacgttttagaaagtataaatagaggtggaatattgagttttagtaataataatattggtttatttaagtttaaaggagtattagtgtgagaaaaagaattgttaatttgtatttttttttatttttttgagagtaagtaatttttaggataattgtaatatttgggtagaagtttagaaaagttgtggttgtgttgttgatataaatagttagaataatgtagttattaataattagtagtatatttaagtttggagtgtattattatgtattttttttagaattattttatttttattgagtaaagtagaaattgtgtagtaagttacgttttttaatgtgtaagttaagtggtgtttgaattatttgagtttatgtaaaaattatttgaaattttagtaaaatataaataagaaattatttttaaaatgtatataatttgataattattgggagtaggatttaaaattatatatagtaattatttttaaatttagtaaaattataattaattattagttatttaaaaattttatcgtatagtttatttttgaaaaaagtatatgaattataaaattaatattatagtaataaagtttagaaaatggagaaaaatttttaattttataagttaatataaatattttttgaatgtatttattatgtatgatttttatagtaaagaataaggagaatttataattttgtatttggttattttattttgaaattttatgaatttttgttttttatattttgaggttattaggaaaatggaaatttaaattgttatattttttttttttgatgaatttattttttattatttagtagttgtttttttgattattaatattgttttttgttttaaaatttttgttaaatattaaggtaatattttagttttttttttattggtgtttattttatatattttttcgttttttattttttttttaatttttttttgttttttttattttgtgttttataaattttacgtagttggattttgtttttttatttaatatggtagtataatttttaattggtaagtttattttatttatatttattgtaattattgatatatatttggatttgtttgaattaattttattagtttttttttttttttatgttttttttttttttgtttttaaaaaaaatgtcgggtatgtgtgttttattttttttttttttttaaatttatgttattaattttttttagtgttatttttaaatttttgttttgtatatttaatataataaagttttaagttaaatattttaaatattatttttagataatttaaaaattttagaatgttttaagtgtggatatttttttttagatttttatatagatgtttatgtatgtgtgtatatatatgtatttatatgtttgtattttatttatttattatttttttttatattttagattattttatgattatttttttttttaaagtatattttttagaagtttttttaatagtagtttgttggtgagaaattatgtttatttgaaaatgtatttatattatttttattttttgataatgggttggatttataatgtaaaatggatattttgaagatgttattttattttattttggtttttgttattgttgttgtattatatggatgatttgtttttttttttttggttattttggaatttttttgtgtttgtttttttatagttttattatgatgtgtttatatttgggttttttttattttatttaggaaaatagatttatatttattattatttttgtaaaatttttaattattatttttttaattaattttttttttttagttttttttattgttttagagtttagaatatatatgtttttgtttttttttttgtttttcgtattttttaattttttttattttttttattttattattttttgtgttttattttgggtaatttttttagatgtgtattttatattattgtttaattatgttttatttgttgataaatttatatattgagatttttttaatttttaaaagtttattttttattttagaagttttattttattgttatgcgtatttttttagttatttttgatatttttgtattttttttcgatttttgtggttttatattttatttttttaaatgttttttatttatttattttgtattttgtatttgtattttagtagttagtattaaacgaggtttttaaaatttttt

SEQ ID NO: 2019 - DNA, 12359 bp, Artificial Sequence
  chemically treated genomic DNA (Homo sapiens)
taggtttgtaattaagtttgtgagattttaattttagtattgtttattttaaaaatgaggaggtttttattttggttaatatggtgaaatttcgtttttattaaaaaatataaaaaattagttaggcgtggtggcgggcgtttgtagttttagttatttgggaggttaagtcggagaatggcgtgaatttaggaggcggagttcgaagtgagttaagattgtgttattgtattttagtttgggcgatagagtgagattttattttaaaaaaaaaaaaaaaaaaaaaaaatgaggagtttaggtcggtgaggtggtttatttttgtaattttagtattttgggaggttaagggaggaagattatttgaggttaggagttcgaggttaagattagtttggttaatatggtgaagttttttttttattaaaaatataaaaattagtcgggtttggtggcgggtatttgtaattttagttattcgggaggttgagataggagaattatttgaattttggagatagagattgtagtgagtcgagattgtattattgtatattagtttggcgataagagggagattttgttataaaaaaaaaaaaaaaaaaaaaaagaggagtttaaatgtttattaagagagattgttaattaaataaatattggggggtgggggtagagaaagaattattaaaaggattaatatgattatttttaaaagatatttgtattattaagtgaaaataaaagtgtatagttgtttatttgttattagtgtgtatattaaataaatttgtgaggatataagaaattggcgtacggttttttgggggaaagtgagtgatgaggggataggtaagggaaaatattttttttttatgtaagtttttatattttttagatttttaattaagagaatgtattatttatttaaaaaataataatttttttttaaaaaaagagggtgatagagaatttttttgtttaatttttttaaatttaatgaaatagatttttattgagtatttagggtgtgttaagtcgttggtgggtgttgtgggttatattatgatgaataggatgttgtttttgtttagtaggggtttatttattttaggtaatttaggttttttaggttggagggtgggataggttgttataggatttatatagtttttttttcgttatgtatttgtttagattttatttattttggattgggagttttaattagtatagggtgagggttcgtttagggttagtttttgtgggttttgatgattattgagtagtttgagttaaatttttcgggtttatattgttttttttcggtaaagttttaggattattacgggggaggtgggaagtttgagtattttttttttgtatttttatggaaagagtattatataattgtgttttttttttttttgttttaagtatttattgtttgtaattaaggtagtaattattgtgagggttaaagaaatggtaagttttttagatggatttcggtttggatgggaagtgtgggtaggttttaattttgtaaatgtagttgaaatttattaatttggagagttttttttttttgttgtttggttttttttgtattttgttttttaattatgttgtttttagtttttttttaggattaggtagtagtagtagtaataatgtgtatatttggattttttattatatgttttagtatttatattatgtgtttgtgattgttttttggttatattagtaagagataaatattttttttgggttgaagatatattattggtgtttttgagattttaggagagtagaggaggttttttttggaggatttatatagttttagggtgtatgaagttagtgaattataaaatatttttttgttattgttgttaatgatttttgtgttattttgggtatattttgggagggagatggggtagatgagaaaattaaggttcgtgtgttgagatttgtttattaggtagttagagaatagtagagttgatattttaatttaggttttttaattttaaattttatattttttttttatagtattgttggaagagtattgagaggttatttggtataatttcgtgttttataaatggtaaattgaggttagagagggagagagatatttttaaggttatatagtatgtaatggggtaaagttaggttttaagaatttggatttttgtttattaggatggcgattgtgttgaattgggaagtgtttgttttgattaaaggtgtttaaatttttttttttttttttaattaatgttttaaaatatattagtagggtttgtgggagtggggaatatagaagaaataagattggttatgagtcggtaattgttgaagttaggtattagataatggggatattaatattatattgtgtaaatatgtatacgttttaaaatttttataaaatttttaaaaaattaacgtgttgttaaaaaaaattaggtatttaagttatattaggtttataagttattgattagtaaattttattttggatatttttgaatattttgttggttatgtttatatttttttttaattttttttgtatagcgtgggatgcgggagataggagagggaggaagggagataattggtttaggtagggtttggaagttggttatttattttcgagagtatagatttttgggatttggatggttgttatataaatggatataggtgatatttttgtttttgtttatattttatattttttttagtttgtttatttttatagatattttatttattatttttgtattttattgtattttgtttattttattattttttgagatagggttttgttttgtgatttaggttggagggtattggcgtaattatagtttattatagttttggttttttggttttaaataatttttttattttagttttttaagtagttgggattttaggtatatattattatatttagttaatttttaaattatttgtataaatagggtttttttatatggtttaggttggtttcgaatttttgggttttattaattttttgttttcgttttttatagtgttgggattatagatatgagttttcgtgtttagttagttttttttgttttttattatttattatttattatattaagggaaataagtaaatttggcgtttgatgttttcggtttgtagaagacgttatattttatttggatgagaaatgaagtatatgagtagtttggtagagttatagttaatgtgaatttggagaggaatcgtgttgttttttagtaagattttattagtagggcgtgaagttatgagatttggggtggaagggggttggagaaaggtttgggttttattttttttttttttttttttaggttaattattatttatcgtaattttttttttaaattttaatatttttttagtttataaagtgtttttatatttataatatttaatttttttaattttgtgaggttaatattatttatattttgtaaatgaggaaattgaaggtttttatgattaagtgatttatttaagattatatagtttgtgggtggttgagtttagggttgtagattttaattttaatgtttttttttttattttatattgcggagggtaggtaggtagttttttgttatggggttttgtagttttttatggaattaataatggagaagaaaattgcgttgtattttttaagtagttagttgggatggtaggaatttatttattttatttatttatttattttttgagatagagttacgtttttgttgtttaggttggagtgtagtggtacgattttggtttattgtaagttttgttttttaggtttaagtaatttttttgttttagtttttttagtagttgggattatagatgttcgttattatatttagttaatttttttgtatttttagtatagatagggttttattatgttggttaggttggttttaaatttttgattttaggtgattcgtttgtttttgttttttatagtattgggattataggcgtgagttattgtgtttggttatggtaggaaattttgatgggtatttatttatttgtaagtgtgttgtgtttttttaattgaggggtattgttagaggattgttagaggtagtggtgttatttgattgggttttttggggtgttgatgtgtataggggaaatttggattttttattattttgtgtgatgattatatagtttttaaattttatttaagtgtgatatggagaagttgaaagaagttattatattgtttatatgagttaggaatagtgattttaggttttatattaaattttaattttgttttaattttgttgtgtaatttaggttagatttttttttttttggtttttagaatagttttggtagttaaatcgaagttattttttatgttagtttgagattttattttttttgtaattttttggagaagataatttagggaaagattgttattgtttagaggaagtattttaaattttttattggtttaggaatttaatattatcgagtaacggttttagaaggtaaggcgattgttaggaggaattaaataggttagtgttggatttagttatttagttttggtttatatagaggttgttttttatgtttttttattttgttaatttggtttgttttttaaatatgggttaaataatttttttttagaagcggtagtagtagaaggaaatgttattaaaaatgagtttgttagtgggaatggtgtgtggatgaagtttttgggagttttggttgttaaataaagattttattgttatttttttttttttaagtttttttttttttttttttttttttttttttttttttttttttttttttttttttttttttttatgatttgtttttttttttttttaagttaatttttttattttaataggatttggtggaagaaaagttaggtaaatataagtacgtatatattattgggagattagattttttagttggttttttgttgttatagtttcgtcgaagggagggggtggaagaggaggattaaatttagagttgagaggagaggtaggtgtgtgtaggtaagtttagttgggagatgggtaggagattgggaagaattttttatttagtaagttttttttagttttgtttatttattgatttagtttttatttttttattttttttttttttttatttttttttttttttaaatgagtttaaatttagtttttttaattttttttttatagttttttttttttttttttattattttgtatttttatatttgtttattgtaaaagttaagtttttttgttgtagatgtttgttgtagtatagagagttacgttgtataaagtgtttttatagattaggtgtttttatagaaattggattttagaatttatttttttgtattttttgtgtattgttatatattgtggaagttatatatattatacggaggttgtacgtttattattattattttatacgattatataaaatgaagatattttgtttatttatttttgttttttgtatttgatatgtagagttagattatattattattagatattagtagatatatatatatatgtatgtatatatgttttttgtattttgtttttcgtttttttatatatatttttttagttgtaagagtaaagataaagtacgtttttttattgagatggtagagttagaagaaaattttgtattttaagtttaggtcgaatagggaggagataagtaagagcgggagttggaagggtttttttattatttagggttttattgggtaggagggagagaaaaacggttttttttaatttgtatagtgtttttttagtagtttttaatttttgttttattggtttaaattatttggtttttggaaagaaagaagaaagcgatttagtttttaatttttgaaggttttaatttttagttttggggatagtttatttttttattttttttttttgtaggtagttagaaaaatatttttttttaaagtcgttttgaaattattttaattatttaggttggtaaaaggttttgtggtagaggagaaaaaaaaaaaaaggtagtagttttttaagtagttggggaggggaaaattgaagggcggttttttttttgtttttttgtttatttttttttattaatagagagggtttgttttaaggtaggcggggtgtagggagattaggggttttatatatagttgatttttatagttatttaagggttggagagggaggagtgtggagggtttattaaaaatatagatgtcggtttttattgtagatttattgaatcgagatttaggaattttgttttaatattttaggagattttgatggtttattagggttcgagaattaggggtttgagagagagttttgttgtaatttttaagtttaagatttcggtagtgttagttgggtagaaggattgtgttttggaaaaggagtattagagtgttttaaataggttattttttttttggggagtgggagtaaatagggaagagttgttttttttttttttttttgtaagtataagtagttatatatattatagaggaatattttagtaagaaagtttttttaagatggttttatagagtttttgtttttttttatttgttaatttgtttgttttaggattttaggagtatgtgttgggttttttttttgatttttataggtttttgttttttttttttagtagttatttgtttgggtttttatagagggtgagttgaatattttttttatgttttttttatttttttaatgggtaattttatttattgggtatgtgagtgaagtattttaaggttggaaggggtaaaaagttgggtgtaaaaggttgggagaagttaagaatcgtagtggaattttatggtttattgaggaaggtagatttgtattttttgtggttagtgtttttttatttgttgtagaaagtatcggtgagaagttggtgaattagaaagatagaataagttttttttaggtggttggggatttttagagtttttttagttagttgtttttgagatttaagtgtgattttataagttataaaggggaggaagttgttttgtgtggaagagttggtattttatttataaggatttttgttttcgagtagtgtatgggggttgttttttagttaggttggagggaaggagattttattattttgaaataatattaataagattttaatatttagaaaatatttattttgtatgtattaatttatttaatttttaaaatagaaaagaaggtgttagtatttttattttatagagtagaaaagtaattgttttgtttaagtttatttagttaagtatttgaatgaagaattgtaggattgggttttagatttataattatttaaggtattagatatatttttttaggttttttttaaggtttggagatgttgggggaatggggtagaggatatggtaggtggcgggttgttagagaagagtcgttttattttggttttttttttatcgtttagaatggaaaatttttttttttaaattagtggtttgaggttagaaaatttttattttgtttatattttgttttgtggtagatattggggagatagatggtttttttataatagtgttatttttatttttagtattttttgatttgtagtgtattttaaagttgttaattgcgtttgtttttgataattgggtaaggaatataggtatagggaagatttttttatttttattttatagataagaaaattgaggtttagaatagggttcgtattattaggtagtggtggaggggtgagaatttttttttttaattagtatgtattataggttttttttttattgttttaggtaagtttatttttgtatcgttttatttttttagaaaggggtattttgaagttattatgtttttataaggtttttttgttattttaggattatattagttttaatgggggttttgaaagggttttaggtttatttttttattaattttgtttataaattggtaaagattgtttgattttttttgtttttaatatttttttggattataggaagagatatagagagtaggatggtttttagatatttaggttgagaatagaaagaagggaaaaaagagagaggggtgtttcgatatttatcggtatagcgttaggttagaagtagttttattttttattgtagggtagttttgggttaaggtatggaggtttaggggtgattaattagataggagatttgataagtaagaagaatgttagtttagagtgcggcgtaattttgttgttagttttgtttagttttgggagataaatttaattttatttttagtttaattttaatttttttatataaagttaattagttttaaatagttgtttttaatgatttgattaatttattaggatttttatttaattttgttttgagtagaaatattttattatttttgggttttaatattaaattaatgagagagatagggaagggggttattttattttaaaaattaaggagtttttggggcgttgtggtttatgtttgtaattttagtattttgggagattgaggaggatagattatttgagtttaggggttggagattagtttgggtaatatggtaaaattttatttttataaaaaagataaaaattagttagttgtggtagtatatgtttatagtattagttgtttaggacgttgagatggaaggattatttgagtttagggaggttaaggttgtagtgagttgtgattgtattattgtattttagtttggttaataaagggagattttgtattattaaaaaaaaaaaaaaaaaaaaaaaaaattaaggagtttttttagagaatttgttgtttataaataaataaatgagtaagtaagtttttgttatttgtagagattttgtattttataatatgtttttaaatgtatgattttatttgatttttatatagatgaggagttcgggttggagagttagagttaggagttaagtttagatttataatagttggaattgaaattagaatttaaaatttttttagaggttgggtgtagtggtttatatttgtaattttagtaatttgaaaggtcgaggtgggaggattgtttgagtttaggagtttaagattagtttgagtaatatagtgagatttttattttatttttgtttaaagtgaaaaaagaaaaaaaaattaagatttttttaggaaacgttttttaatgtggagagtgaatgttgggttgggtaaagtaattgtttttttttttcgtgaagtagtagtttttttagaattgatggtggagagtagaattgtatgtagttggttgttgtaggtggttaataaatttttattgattgagtaatgagtagagtttagtagaaagttgtgggtggagaagtgtatttgtgaaagtataagaaaaatttaaaaatatatatatggatttattttaaggaattttatgattggatagaagtttttagaaggtaggagtatagagtgtgggtttgaggttttgtaggagggattatgattatttatggagtttaggtatttttagtttgttatacggattttggttttagagatttaggatattacggagtattgttagagagaatggttgtgttgttagttgttagaattttttattttgttttatggtaaagtttcggtaggaaggggtattattttatgagaaaagttttagaaatgaatgttatttttttaagagagaagtatttttgtatttggaatggttttgatttagtttggggtgagggaaggggaggagagtaggtttagtttttttatataatttgtttttgggagtattttttggggaattttttgttggttttgggagtagtttggttaggtttagaggtttggaatgtaaacgggttagaggattagtgaaaagataagtttttaaagggtttggtgttgtatatggggatgaggaaggtttgtgtttattgtggatgagaaggcgcgtatagttagtttgttgggtggagttgtgagtaatttgtttgttttttttatttttgataatgaagattagggttgttttggtattgagttaaggaaatttcgtttcgtttcgtttagtataggttatagttatagtgttttattgtttttgttggaagttttgggtaaattggtgtttagtttttggtatatgttttcggtgataaaggtagtgaagggatatagaaaaattttcgttagtgttgggagtttttttgggatagggttttttatagtatgaaagatttttagattatttttaggtttgtgggtgaatagaaaataaatttttttttttaaattagggttataaaaattgaggtttttagaaatgtttgttttagaatattaatgttttaattatttttttaatttatatgtaagatgattgttttgttttttagaaaattatagaatttatataatgttaatttatagtttattaattataagtgaagtggggtttagttaataagatttaagtttaaagttttgtaattaatgttttttttttttaatttttgtaatgtatttttgataatgttatatttttaacgggagattaagttaaaaatttaattgtaaggttttttgtgataggaggttagggaaaatggttttttagatttttttggagaggtttgttttggaagagattattttagagggaggtggagaaagatagtttttgttttttttttttttcgttttttttttttttttttaatatttagtgtattgcgtatgggtttatatacgtatatagaggataagtgagtgagtttgtttatgtgtatgggatttgaagaggtgtgtgtgtgagtgtgtagattggatttgttgttaaatagtattttggttttggcgagttattttttttttttagtttttagtttttgtaaatggtggggtttggagttgattggtggattttaagttatttttagtaaagaaacgtgttttttgttttttaataaatgaatgtttcggttaaattttaatatatataataggtttttttaaagagagttgttgaggttggtatagggatgggttgagggtattttagggttatttttttagttttttttttataggggtatgttatagaaatgaaagtagagttggaaaattattaggttataggatttttaaggatttttttggatttaattaggacgttaaggtttatatattttaatattttttttatgaagatattgatgatttttttatgttgtgaatgggaggattgagggttagagtggttaagggttttttttgataagttttaggatttttgattcggagtttagtgtgttttttttttttttttttttttttttgagaaagagttttgtttttgttgtttaggttggagtgtattggtgtaatttcggtttattgtaattttttttttttgggtttaagcgatttttttgttttagttttttaagtagttgagattataggtgtttattattatattttgttaattttttgtatttagtagagatggggtttttttatgttggttaggttgatttcgaatttttgatttgaagtgatttattcgttttggttttttaaagtgttgggattataggtttgtatgttattgttttattagttttaatgtgtttttttttttttttttttttttttttttgagatggagttttattttgttatttaggttggagtgtagtggtgtaatttcggtttattgtaaatttcgtttttcgggtttacgttatttttttgttttagttttttaagtagttgggattataggtattcgttattacgtttggttaattttttgtatttttagtagagatagggttttatcgtgtaagttaggatggtttcgattttttgattttatgatttgtttattttggttttttaaagtgttggattataggtgtgagttatcgtatttggttattaatgtgttttttattagtatgtttttcgttttttttagagtaggtttaatatatcgagtggttaagttaatggttagggaatttagagttttaagtttttgttatttttttatttgttgggtataggtaaataaggagatgtttttatagttttttgagttttgtttattttttttagagttttagttttgtttaattttggttttaaaaatatgataattagttattgagggtttaaggataatgattttatgtgttttttttttgtagg
